(19) United States
(12) Patent Application Publication
(10) Pub. No.: US 2024/0002870 A1
(43) Pub. Date: Jan. 4, 2024

(54) RAPID TRANSFORMATION OF MONOCOT LEAF EXPLANTS

(71) Applicants: PIONEER HI-BRED INTERNATIONAL, INC., JOHNSTON, IA (US); CORTEVA AGRISCIENCE LLC, INDIANAPOLIS, IN (US)

(72) Inventors: AJITH ANAND, DAVIS, CA (US); WILLIAM JAMES GORDON-KAMM, URBANDALE, IA (US); LARISA A. RYAN, ANKENY, IA (US); NAGESH SARDESAI, JOHNSTON, IA (US); NING WANG, JOHNSTON, IA (US); HUIXIA WU, JOHNSTON, IA (US); XINLI EMILY WU, JOHNSTON, IA (US)

(73) Assignees: PIONEER HI-BRED INTERNATIONAL, INC., JOHNSTON, IA (US); CORTEVA AGRISCIENCE LLC, INDIANAPOLIS, IN (US)

(21) Appl. No.: 18/246,899

(22) PCT Filed: Sep. 28, 2021
(86) PCT No.: PCT/US21/52377

§ 371 Date: Mar. 28, 2023

Related U.S. Application Data
(60) Provisional application No. 63/085,588, filed on Sep. 30, 2020.

(51) Int. Cl. C12N 15/82

(52) U.S. Cl. CPC C12N 15/8225; C12N 15/8205

(57) ABSTRACT

Methods for transforming monocot leaf explants are provided.

### CROSS-REFERENCE TO RELATED APPLICATIONS

[0001] This application claims priority to U.S. Provisional Patent Application No. 63/085,588 filed on Sep. 30, 2020, which is hereby incorporated herein in its entirety by reference.

### FIELD OF THE DISCLOSURE

[0002] The present disclosure relates to the field of plant molecular biology, including genetic manipulation of plants. More particularly, the present disclosure pertains to the transformation of monocot leaf explants.

### REFERENCE TO SEQUENCE LISTING SUBMITTED ELECTRONICALLY

[0003] The official copy of the sequence listing is submitted electronically via EFS-Web as an ASCII formatted sequence listing with a file named 20210927_8418-WO-PCT_ST25 created on Sep. 27, 2021 and having a size of 4,465,021 bytes and is filed concurrently with the specification. The sequence listing contained in this ASCII formatted document is part of the specification and is herein incorporated by reference in its entirety.

### BACKGROUND OF THE DISCLOSURE

[0004] In recent years, there has been a tremendous expansion of the capabilities for the genetic engineering of plants. Current transformation technology provides an opportunity to produce commercially viable transgenic plants, enabling the creation of new plant varieties containing desirable traits. One limitation of the genetic engineering of plants is the availability of plant tissue explants that are amenable to transformation since many plant tissue explants are recalcitrant to transformation and regeneration. Thus, there is a need for plant transformation methods permitting a broader range of transformable and regenerable plant explant tissues.

### SUMMARY OF THE DISCLOSURE

[0005] The present disclosure comprises methods and compositions using monocot leaf explants for producing transgenic plants that contain a heterologous polynucleotide and methods and compositions using monocot leaf explants for producing gene edited plants. In a further aspect, the present disclosure provides a seed from the plant produced by the methods disclosed herein.

[0006] In an aspect, a method of producing a transgenic monocot plant that contains a heterologous polynucleotide comprising contacting a monocot leaf explant with a heterologous polynucleotide expression cassette and a morphogenic gene expression cassette, wherein the morphogenic gene expression cassette comprises a nucleotide sequence encoding a functional WUS/WOX polypeptide and a nucleotide sequence encoding a Babyboom (BBM) polypeptide or an Ovule Development Protein 2 (ODP2) polypeptide or a functional homolog of a WUS/WOX and a BBM or ODP2 polypeptide, wherein the combined expression of the nucleotide sequence encoding the functional WUS/WOX polypeptide and the nucleotide sequence encoding the Babyboom (BBM) polypeptide or the Ovule Development Protein 2 (ODP2) polypeptide or the functional homolog of a WUS/WOX and a BBM or ODP2 polypeptide is adequate in strength and duration such that the monocot leaf explant forms a regenerable plant structure containing the heterologous polynucleotide expression cassette within about eight weeks or less, or within about 6 weeks or less, or within about 4 weeks or less, or within about ten days to about fourteen days of the contacting; and regenerating a transgenic monocot plant from the regenerable plant structure containing the heterologous polynucleotide expression cassette is provided. In an aspect, the monocot leaf explant is a haploid monocot leaf explant. In an aspect, the heterologous polynucleotide expression cassette and the morphogenic gene expression cassette are introduced through a method of transformation by a Rhizobia bacterial species or particle bombardment. In an aspect, wherein the heterologous polynucleotide expression cassette and the morphogenic gene expression cassette are introduced through a method of electroporation, PEG transfection, or RNP (ribonucleoprotein) delivery. In an aspect, the combined expression of the nucleotide sequence encoding the functional WUS/WOX polypeptide and the nucleotide sequence encoding the Babyboom (BBM) polypeptide or the Ovule Development Protein 2 (ODP2) polypeptide or the functional homolog of a WUS/WOX and a BBM or ODP2 polypeptide is greater than the expression of the morphogenic gene expression cassette comprising the nucleotide sequence encoding the functional WUS/WOX polypeptide operably linked to the Agrobacterium-NOS promoter having SEQ ID NO: 290 and the nucleotide sequence encoding the Babyboom (BBM) polypeptide or the Ovule Development Protein 2 (ODP2) polypeptide operably linked to the ubiquitin (UBI) promoter having SEQ ID NO: 339. In an aspect, the monocot leaf explant is derived from a seedling and not directly derived from an embryo or a seed or an unmodified embryonic tissue. In an aspect, the monocot leaf explant is derived from a seedling that is about 8-20 days old, about 12-18 days old, about 10-20 days old, about 14-16 days old, about 16-18 days old or about 14-18 days old. In an aspect, the nucleotide sequence encoding the functional WUS/WOX polypeptide is selected from WUS, WUS1, WUS2, WUS3, WOX2A, WOX4, WOX5A, and WOX9, and wherein the nucleotide sequence encoding the Babyboom (BBM) polypeptide is selected from BBM, BBM1, BBM2, BBM3, BMN2, and BMN3 or the Ovule Development Protein 2 (ODP2) polypeptide is ODP2. In an aspect, heterologous polynucleotide expression cassette comprises a heterologous polynucleotide selected from the group consisting of a heterologous polynucleotide conferring a nutritional enhancement, a heterologous polynucleotide conferring a modified oil content, a heterologous polynucleotide conferring a modified protein content, a heterologous polynucleotide conferring a modified metabolite content, a heterologous polynucleotide conferring increased yield, a heterologous polynucleotide conferring abiotic stress tolerance, a heterologous polynucleotide conferring drought tolerance, a heterologous polynucleotide conferring cold tolerance, a heterologous polynucleotide conferring herbicide tolerance, a heterologous polynucleotide conferring pest resistance, a heterologous polynucleotide conferring pathogen resistance, a heterologous polynucleotide conferring insect resistance, a heterologous polynucleotide conferring nitrogen use efficiency (NUE), a heterologous polynucleotide conferring disease resistance, a heterologous polynucleotide conferring increased biomass, a heterologous polynucleotide conferring an ability to alter a metabolic pathway, and a combination of the foregoing. In an aspect, the leaf explant is selected from the group consisting of a leaf, a radical leaf, a cauline leaf, an alternate leaf, an opposite leaf, a decussate leaf, an opposite superposed leaf, a whorled leaf, a petiolate leaf, a sessile leaf, a subsessile leaf, a stipulate leaf, an exstipulate leaf, a simple leaf, a compound leaf, leaf primordia, a leaf sheath, a leaf base, a portion of a leaf immediately proximal to its attachment point to a petiole or stem, a bud, including but not limited to a lateral bud, and a combination of the foregoing. In an aspect, the monocot is selected from the group consisting of Panicum virgatum (switchgrass), Sorghum bicolor (sorghum, sudangrass), Miscanthus giganteus (miscanthus), Saccharum sp. (energy cane), Zea mays (corn), Triticum aestivum (wheat), Oryza sativa (rice), Pennisetum glaucum (pearl millet), Panicum spp., Sorghum spp., Miscanthus spp., Saccharum spp., and Erianthus spp. In an aspect, the monocot is selected from the Poaceae family. In an aspect, the monocot is selected from a Poaceae sub-family selected from Chloridoideae, Panicoideae, Oryzoideae, and Pooideae. In an aspect, the monocot selected from the Poaceae sub-family Chloridoideae is Eragrostis tef In an aspect, the monocot selected from the Poaceae sub-family Panicoideae is selected from Zea mays, Sorghum bicolor, Pennisitum glaucum, and Panicum virgatum. In an aspect, the monocot selected from the Poaceae sub-family Oryzoideae is Oryza sativa. In an aspect, the monocot selected from the Poaceae sub-family Pooideae is selected from Hordeum vulgare, Secale cereal, and Triticum aestivum. In an aspect, the functional WUS/WOX polypeptide comprises an amino acid sequence selected from SEQ ID NO: 144, 146, 148, 150, 152, 154, 156, 158, 160, 162, 164, 166, 168, 170, 172, 174, 176, 178, 180, 182, 184, 186, 188, 190, 192, 194, 196, 198, 200, 202, 204, 206, 208, 210, or 212; or wherein the functional WUS/WOX polypeptide is encoded by a nucleotide sequence selected from SEQ ID NO: 143, 145, 147, 149, 151, 153, 155, 157, 159, 161, 163, 165, 167, 169, 171, 173, 175, 177, 179, 181, 183, 185, 187, 189, 191, 193, 195, 197, 199, 201, 203, 205, 207, 209, or 211, and wherein the Babyboom (BBM) polypeptide or the Ovule Development Protein 2 (ODP2) polypeptide comprises an amino acid sequence selected from SEQ ID NO: 214, 216, 219, 221, 223, 225, 227, 229, or 231; or wherein the Babyboom (BBM) polypeptide or the Ovule Development Protein 2 (ODP2) polypeptide is encoded by a nucleotide sequence selected from SEQ ID NO: 213, 215, 217, 218, 220, 222, 224, 226, 228, 230, or 232. In an aspect, the morphogenic gene expression cassette further comprises a polynucleotide selected from a ZM-MIR-Corngrass1 nucleotide, a ZM-GRF5 nucleotide, a ZM-GRF4 nucleotide, a ZM-GIF1 nucleotide, a ZM-GRF4˜GIF1 nucleotide, a ZM-STEMIN1 nucleotide, a ZM-REV nucleotide, a ZM-ESR1 nucleotide, a ZM-LAS nucleotide, a ZM-CUC1 nucleotide, a ZM-CUC2 nucleotide, a ZM-CUC3 nucleotide, a ZM-RLD1 nucleotide, a ZM-KN1 nucleotide, a ZM-CYCD2 nucleotide, a ZM-GPCNAC-1 nucleotide, a ZM-MIR156B nucleotide, a ZM-LEC1 nucleotide, an AT-RKD4 nucleotide, an AT-LEC2 nucleotide, an AT-RAP2.6L nucleotide, a ZM-MIR-SPS1 nucleotide, a ZM-MIR-MAX1 nucleotide, or a ZM-MIR-MAX4 nucleotide. In an aspect, the morphogenic gene expression cassette further comprises a polynucleotide sequence encoding a site-specific recombinase selected from the group consisting of FLP, FLPe, KD, Cre, SSV1, lambda Int, phi C31 Int, HK022, R, B2, B3, Gin, Tn1721, CinH, ParA, Tn5053, Bxb1, TP907-1, or U153, wherein the site-specific recombinase is operably linked to a constitutive promoter, an inducible promoter, a tissue-specific promoter, or a developmentally regulated promoter. In an aspect, excising the morphogenic gene expression cassette to provide the transgenic monocot plant that contains the heterologous polynucleotide. In an aspect, breeding away from the morphogenic gene expression cassette. In an aspect, the transgenic plant comprises the heterologous polynucleotide. In an aspect, the transgenic seed comprises the heterologous polynucleotide.

[0007] In an aspect, a regenerable plant structure derived from a transgenic monocot leaf explant, the monocot leaf explant comprising a heterologous polynucleotide expression cassette and a morphogenic gene expression cassette, wherein the morphogenic gene expression cassette comprises a nucleotide sequence encoding a functional WUS/WOX polypeptide and a nucleotide sequence encoding a Babyboom (BBM) polypeptide or an Ovule Development Protein 2 (ODP2) polypeptide or a functional homolog of a WUS/WOX and a BBM or ODP2 polypeptide, wherein the combined expression of the nucleotide sequence encoding the functional WUS/WOX polypeptide and the nucleotide sequence encoding the Babyboom (BBM) polypeptide or the Ovule Development Protein 2 (ODP2) polypeptide or the functional homolog of a WUS/WOX and a BBM or ODP2 polypeptide is adequate in strength and duration such that the monocot leaf explant forms a regenerable plant structure containing the heterologous polynucleotide expression cassette within about eight weeks or less, or within about 6 weeks or less, or within about 4 weeks or less, or within about ten days to about fourteen days of the monocot leaf explant receiving the heterologous polynucleotide expression cassette and the morphogenic gene expression cassette is provided. In an aspect, the monocot leaf explant is a haploid monocot leaf explant. In an aspect, the nucleotide sequence encoding the functional WUS/WOX polypeptide is selected from WUS, WUS1, WUS2, WUS3, WOX2A, WOX4, WOX5A, and WOX9, and wherein the nucleotide sequence encoding the Babyboom (BBM) polypeptide is selected from BBM, BBM1, BBM2, BBM3, BMN2, and BMN3 or the Ovule Development Protein 2 (ODP2) polypeptide is ODP2. In an aspect, the heterologous polynucleotide expression cassette and the morphogenic gene expression cassette are introduced through a method of transformation by a Rhizobia bacterial species or particle bombardment. In an aspect, the heterologous polynucleotide expression cassette and the morphogenic gene expression cassette are introduced through a method of electroporation, PEG transfection, or RNP (ribonucleoprotein) delivery. In an aspect, the heterologous polynucleotide expression cassette comprises a heterologous polynucleotide selected from the group consisting of a heterologous polynucleotide conferring a nutritional enhancement, a heterologous polynucleotide conferring a modified oil content, a heterologous polynucleotide conferring a modified protein content, a heterologous polynucleotide conferring a modified metabolite content, a heterologous polynucleotide conferring increased yield, a heterologous polynucleotide conferring abiotic stress tolerance, a heterologous polynucleotide conferring drought tolerance, a heterologous polynucleotide conferring cold tolerance, a heterologous polynucleotide conferring herbicide tolerance, a heterologous polynucleotide conferring pest resistance, a heterologous polynucleotide conferring pathogen resistance, a heterologous polynucleotide conferring insect resistance, a heterologous polynucleotide conferring nitrogen use efficiency (NUE), a heterologous polynucleotide conferring disease resistance, a heterologous polynucleotide conferring increased biomass, a heterologous polynucleotide conferring an ability to alter a metabolic pathway, and a combination of the foregoing. In an aspect, the leaf explant is selected from the group consisting of a leaf, a radical leaf, a cauline leaf, an alternate leaf, an opposite leaf, a decussate leaf, an opposite superposed leaf, a whorled leaf, a petiolate leaf, a sessile leaf, a subsessile leaf, a stipulate leaf, an exstipulate leaf, a simple leaf, a compound leaf, leaf primordia, a leaf sheath, a leaf base, a portion of a leaf immediately proximal to its attachment point to a petiole or stem, a bud, including but not limited to a lateral bud, and a combination of the foregoing. In an aspect, the monocot is selected from the group consisting of Panicum virgatum (switchgrass), Sorghum bicolor (sorghum, sudangrass), Miscanthus giganteus (miscanthus), Saccharum sp. (energycane), Zea mays (corn), Triticum aestivum (wheat), Oryza sativa (rice), Pennisetum glaucum (pearl millet), Panicum spp., Sorghum spp., Miscanthus spp., Saccharum spp., and Erianthus spp. In an aspect, the monocot is selected from the Poaceae family. In an aspect, the monocot is selected from a Poaceae sub-family selected from Chloridoideae, Panicoideae, Oryzoideae, and Pooideae. In an aspect, the monocot selected from the Poaceae sub-family Chloridoideae is Eragrostis tef In an aspect, the monocot from the Poaceae sub-family Panicoideae is selected from Zea mays, Sorghum bicolor, Pennisitum glaucum, and Panicum virgatum. In an aspect, the monocot from the Poaceae sub-family Oryzoideae is Oryza sativa In an aspect, the monocot from the Poaceae sub-family Pooideae is selected from Hordeum vulgare, Secale cereal, and Triticum aestivum. In an aspect, the functional WUS/WOX polypeptide comprises an amino acid sequence selected from SEQ ID NO: 144, 146, 148, 150, 152, 154, 156, 158, 160, 162, 164, 166, 168, 170, 172, 174, 176, 178, 180, 182, 184, 186, 188, 190, 192, 194, 196, 198, 200, 202, 204, 206, 208, 210, or 212; or wherein the functional WUS/WOX polypeptide is encoded by a nucleotide sequence selected from SEQ ID NO: 143, 145, 147, 149, 151, 153, 155, 157, 159, 161, 163, 165, 167, 169, 171, 173, 175, 177, 179, 181, 183, 185, 187, 189, 191, 193, 195, 197, 199, 201, 203, 205, 207, 209, or211, and wherein the Babyboom (BBM) polypeptide or the Ovule Development Protein 2 (ODP2) polypeptide comprises an amino acid sequence selected from SEQ ID NO: 214, 216, 219, 221, 223, 225, 227, 229, or 231; or wherein the Babyboom (BBM) polypeptide or the Ovule Development Protein 2 (ODP2) polypeptide is encoded by a nucleotide sequence selected from SEQ ID NO: 213, 215, 217, 218, 220, 222, 224, 226, 228, 230, or 232. In an aspect, the morphogenic gene expression cassette further comprises a polynucleotide selected from a ZM-MIR-Corngrass1 nucleotide, a ZM-GRF5 nucleotide, a ZM-GRF4 nucleotide, a ZM-GIF1 nucleotide, a ZM-GRF4˜GIF1 nucleotide, a ZM-STEMIN1 nucleotide, a ZM-REV nucleotide, a ZM-ESR1 nucleotide, a ZM-LAS nucleotide, a ZM-CUC1 nucleotide, a ZM-CUC2 nucleotide, a ZM-CUC3 nucleotide, a ZM-RLD1 nucleotide, a ZM-KN1 nucleotide, a ZM-CYCD2 nucleotide, a ZM-GPCNAC-1 nucleotide, a ZM-MIR156B nucleotide, a ZM-LEC1 nucleotide, an AT-RKD4 nucleotide, an AT-LEC2 nucleotide, an AT-RAP2.6L nucleotide, a ZM-MIR-SPS1 nucleotide, a ZM-MIR-MAX1 nucleotide, or a ZM-MIR-MAX4 nucleotide. In an aspect, the morphogenic gene expression cassette further comprises a polynucleotide sequence encoding a site-specific recombinase selected from the group consisting of FLP, FLPe, KD, Cre, SSV1, lambda Int, phi C31 Int, HK022, R, B2, B3, Gin, Tn1721, CinH, ParA, Tn5053, Bxb1, TP907-1, or U153, wherein the site-specific recombinase is operably linked to a constitutive promoter, an inducible promoter, a tissue-specific promoter, or a developmentally regulated promoter. In an aspect, excising the morphogenic gene expression cassette to provide the transgenic monocot plant that contains the heterologous polynucleotide. In an aspect, a fertile transgenic monocot plant is produced from the regenerable plant structure. In an aspect, the fertile transgenic monocot plant does not comprise the morphogenic gene expression cassette. In an aspect, a plurality of monocot seed is produced from the transgenic monocot plant.

[0008] In an aspect, a method of producing a transgenic monocot plant that contains a heterologous polynucleotide comprising contacting a monocot leaf explant with a heterologous polynucleotide expression cassette and a morphogenic gene expression cassette, wherein the morphogenic gene expression cassette comprises a nucleotide sequence encoding a functional WUS/WOX polypeptide and a nucleotide sequence encoding a Babyboom (BBM) polypeptide or an Ovule Development Protein 2 (ODP2) polypeptide or a functional homolog of a WUS/WOX and a BBM or ODP2 polypeptide, wherein the combined expression of the nucleotide sequence encoding the functional WUS/WOX polypeptide and the nucleotide sequence encoding the Babyboom (BBM) polypeptide or the Ovule Development Protein 2 (ODP2) polypeptide is greater than the combined expression of the morphogenic gene expression cassette comprising the nucleotide sequence encoding the functional WUS/WOX polypeptide operably linked to the Agrobacterium-NOS promoter having SEQ ID NO: 290 and the nucleotide sequence encoding the Babyboom (BBM) polypeptide or the Ovule Development Protein 2 (ODP2) polypeptide operably linked to the ubiquitin (UBI) promoter having SEQ ID NO: 339; selecting a monocot leaf explant containing the heterologous polynucleotide expression cassette, wherein the monocot leaf explant forms a regenerable plant structure containing the heterologous polynucleotide expression cassette within about eight weeks or less, or within about 6 weeks or less, or within about 4 weeks or less, or within about ten days to about fourteen days of the contacting; and regenerating a transgenic monocot plant from the regenerable plant structure containing the heterologous polynucleotide expression cassette is provided. In an aspect, the monocot leaf explant is a haploid monocot leaf explant. In an aspect, the nucleotide sequence encoding the functional WUS/WOX polypeptide is selected from WUS, WUS1, WUS2, WUS3, WOX2A, WOX4, WOX5A, and WOX9, and wherein the nucleotide sequence encoding the Babyboom (BBM) polypeptide is selected from BBM, BBM1, BBM2, BBM3, BMN2, and BMN3 or the Ovule Development Protein 2 (ODP2) polypeptide is ODP2. In an aspect, the heterologous polynucleotide expression cassette and the morphogenic gene expression cassette are introduced through a method of transformation by a Rhizobia bacterial species or particle bombardment. In an aspect, the heterologous polynucleotide expression cassette and the morphogenic gene expression cassette are introduced through a method of electroporation, PEG transfection, or RNP (ribonucleoprotein) delivery. In an aspect, the heterologous polynucleotide expression cassette comprises a heterologous polynucleotide selected from the group consisting of a heterologous polynucleotide conferring a nutritional enhancement, a heterologous polynucleotide conferring a modified oil content, a heterologous polynucleotide conferring a modified protein content, a heterologous polynucleotide conferring a modified metabolite content, a heterologous polynucleotide conferring increased yield, a heterologous polynucleotide conferring abiotic stress tolerance, a heterologous polynucleotide conferring drought tolerance, a heterologous polynucleotide conferring cold tolerance, a heterologous polynucleotide conferring herbicide tolerance, a heterologous polynucleotide conferring pest resistance, a heterologous polynucleotide conferring pathogen resistance, a heterologous polynucleotide conferring insect resistance, a heterologous polynucleotide conferring nitrogen use efficiency (NUE), a heterologous polynucleotide conferring disease resistance, a heterologous polynucleotide conferring increased biomass, a heterologous polynucleotide conferring an ability to alter a metabolic pathway, and a combination of the foregoing. In an aspect, the leaf explant is selected from the group consisting of a leaf, a radical leaf, a cauline leaf, an alternate leaf, an opposite leaf, a decussate leaf, an opposite superposed leaf, a whorled leaf, a petiolate leaf, a sessile leaf, a subsessile leaf, a stipulate leaf, an exstipulate leaf, a simple leaf, a compound leaf, leaf primordia, a leaf sheath, a leaf base, a portion of a leaf immediately proximal to its attachment point to a petiole or stem, a bud, including but not limited to a lateral bud, and a combination of the foregoing. In an aspect, the monocot is selected from the group consisting of Panicum virgatum (switchgrass), Sorghum bicolor (sorghum, sudangrass), Miscanthus giganteus (miscanthus), Saccharum sp. (energycane), Zea mays (corn), Triticum aestivum (wheat), Oryza sativa (rice), Pennisetum glaucum (pearl millet), Panicum spp., Sorghum spp., Miscanthus spp., Saccharum spp., and Erianthus spp. In an aspect, the monocot is selected from the Poaceae family. In an aspect, the monocot is selected from a Poaceae sub-family selected from Chloridoideae, Panicoideae, Oryzoideae, and Pooideae. In an aspect, the monocot selected from the Poaceae sub-family Chloridoideae is Eragrostis tef In an aspect, the monocot from the Poaceae sub-family Panicoideae is selected from Zea mays, Sorghum bicolor, Pennisitum glaucum, and Panicum virgatum. In an aspect, the monocot from the Poaceae sub-family Oryzoideae is Oryza sativa. In an aspect, the monocot from the Poaceae sub-family Pooideae is selected from Hordeum vulgare, Secale cereal, and Triticum aestivum. In an aspect, the functional WUS/WOX polypeptide comprises an amino acid sequence selected from SEQ ID NO: 144, 146, 148, 150, 152, 154, 156, 158, 160, 162, 164, 166, 168, 170, 172, 174, 176, 178, 180, 182, 184, 186, 188, 190, 192, 194, 196, 198, 200, 202, 204, 206, 208, 210, or 212; or wherein the functional WUS/WOX polypeptide is encoded by a nucleotide sequence selected from SEQ ID NO: 143, 145, 147, 149, 151, 153, 155, 157, 159, 161, 163, 165, 167, 169, 171, 173, 175, 177, 179, 181, 183, 185, 187, 189, 191, 193, 195, 197, 199, 201, 203, 205, 207, 209, or 211, and wherein the Babyboom (BBM) polypeptide or the Ovule Development Protein 2 (ODP2) polypeptide comprises an amino acid sequence selected from SEQ ID NO: 214, 216, 219, 221, 223, 225, 227, 229, or 231; or wherein the Babyboom (BBM) polypeptide or the Ovule Development Protein 2 (ODP2) polypeptide is encoded by a nucleotide sequence selected from SEQ ID NO: 213, 215, 217, 218, 220, 222, 224, 226, 228, 230, or 232. In an aspect, the morphogenic gene expression cassette further comprises a polynucleotide selected from a ZM-MIR-Corngrass1 nucleotide, a ZM-GRF5 nucleotide, a ZM-GRF4 nucleotide, a ZM-GIF1 nucleotide, a ZM-GRF4˜GIF1 nucleotide, a ZM-STEMIN1 nucleotide, a ZM-REV nucleotide, a ZM-ESR1 nucleotide, a ZM-LAS nucleotide, a ZM-CUC1 nucleotide, a ZM-CUC2 nucleotide, a ZM-CUC3 nucleotide, a ZM-RLD1 nucleotide, a ZM-KN1 nucleotide, a ZM-CYCD2 nucleotide, a ZM-GPCNAC-1 nucleotide, a ZM-MIR156B nucleotide, a ZM-LEC1 nucleotide, an AT-RKD4 nucleotide, an AT-LEC2 nucleotide, an AT-RAP2.6L nucleotide, a ZM-MIR-SPS1 nucleotide, a ZM-MIR-MAX1 nucleotide, or a ZM-MIR-MAX4 nucleotide. In an aspect, the morphogenic gene expression cassette further comprises a polynucleotide sequence encoding a site-specific recombinase selected from the group consisting of FLP, FLPe, KD, Cre, SSV1, lambda Int, phi C31 Int, HK022, R, B2, B3, Gin, Tn1721, CinH, ParA, Tn5053, Bxb1, TP907-1, or U153, wherein the site-specific recombinase is operably linked to a constitutive promoter, an inducible promoter, a tissue-specific promoter, or a developmentally regulated promoter In an aspect, excising the morphogenic gene expression cassette to provide the transgenic monocot plant that contains the heterologous polynucleotide. In an aspect, breeding away from the morphogenic gene expression cassette. In an aspect, the transgenic plant produced by the method comprises the heterologous polynucleotide. In an aspect, seed of the transgenic plant comprises the heterologous polynucleotide.

[0009] In an aspect, a method of producing a transgenic maize plant that contains a heterologous polynucleotide comprising contacting a maize leaf explant with a heterologous polynucleotide expression cassette and a morphogenic gene expression cassette, wherein the morphogenic gene expression cassette comprises a nucleotide sequence encoding a functional WUS/WOX polypeptide and a nucleotide sequence encoding a Babyboom (BBM) polypeptide or an Ovule Development Protein 2 (ODP2) polypeptide or a functional homolog of a WUS/WOX and a BBM or ODP2 polypeptide, wherein the combined expression of the nucleotide sequence encoding the functional WUS/WOX polypeptide and the nucleotide sequence encoding the Babyboom (BBM) polypeptide or the Ovule Development Protein 2 (ODP2) polypeptide or the functional homolog of a WUS/WOX and a BBM or ODP2 polypeptide is adequate in strength and duration such that the maize leaf explant forms a regenerable plant structure containing the heterologous polynucleotide expression cassette within about eight weeks or less, or within about 6 weeks or less, or within about 4 weeks or less, or within about ten days to about fourteen days of the contacting; and regenerating a transgenic maize plant from the regenerable plant structure containing the heterologous polynucleotide expression cassette is provided. In an aspect, the maize leaf explant is a haploid maize leaf explant. In an aspect, the heterologous polynucleotide expression cassette and the morphogenic gene expression cassette are introduced through a method of transformation by a Rhizobia bacterial species or particle bombardment. In an aspect, the heterologous polynucleotide expression cassette and the morphogenic gene expression cassette are introduced through a method of electroporation, PEG transfection, or RNP (ribonucleoprotein) delivery. In an aspect, the combined expression of the nucleotide sequence encoding the functional WUS/WOX polypeptide and the nucleotide sequence encoding the Babyboom (BBM) polypeptide or the Ovule Development Protein 2 (ODP2) polypeptide or the functional homolog of a WUS/WOX and a BBM or ODP2 polypeptide is greater than the expression of the morphogenic gene expression cassette comprising the nucleotide sequence encoding the functional WUS/WOX polypeptide operably linked to the Agrobacterium-NOS promoter having SEQ ID NO: 290 and the nucleotide sequence encoding the Babyboom (BBM) polypeptide or the Ovule Development Protein 2 (ODP2) polypeptide operably linked to the ubiquitin (UBI) promoter having SEQ ID NO: 339. In an aspect, the maize leaf explant is derived from a seedling and not directly derived from an embryo or a seed or an unmodified embryonic tissue. In an aspect, the maize leaf explant is derived from a seedling that is about 8-20 days old, about 12-18 days old, about 10-20 days old, about 14-16 days old, about 16-18 days old or about 14-18 days old. In an aspect, the nucleotide sequence encoding the functional WUS/WOX polypeptide is selected from WUS, WUS1, WUS2, WUS3, WOX2A, WOX4, WOX5A, and WOX9, and wherein the nucleotide sequence encoding the Babyboom (BBM) polypeptide is selected from BBM, BBM1, BBM2, BBM3, BMN2, and BMN3 or the Ovule Development Protein 2 (ODP2) polypeptide is ODP2. In an aspect, the heterologous polynucleotide expression cassette comprises a heterologous polynucleotide selected from the group consisting of a heterologous polynucleotide conferring a nutritional enhancement, a heterologous polynucleotide conferring a modified oil content, a heterologous polynucleotide conferring a modified protein content, a heterologous polynucleotide conferring a modified metabolite content, a heterologous polynucleotide conferring increased yield, a heterologous polynucleotide conferring abiotic stress tolerance, a heterologous polynucleotide conferring drought tolerance, a heterologous polynucleotide conferring cold tolerance, a heterologous polynucleotide conferring herbicide tolerance, a heterologous polynucleotide conferring pest resistance, a heterologous polynucleotide conferring pathogen resistance, a heterologous polynucleotide conferring insect resistance, a heterologous polynucleotide conferring nitrogen use efficiency (NUE), a heterologous polynucleotide conferring disease resistance, a heterologous polynucleotide conferring increased biomass, a heterologous polynucleotide conferring an ability to alter a metabolic pathway, and a combination of the foregoing. In an aspect, the leaf explant is selected from the group consisting of a leaf, a radical leaf, a cauline leaf, an alternate leaf, an opposite leaf, a decussate leaf, an opposite superposed leaf, a whorled leaf, a petiolate leaf, a sessile leaf, a subsessile leaf, a stipulate leaf, an exstipulate leaf, a simple leaf, a compound leaf, leaf primordia, a leaf sheath, a leaf base, a portion of a leaf immediately proximal to its attachment point to a petiole or stem, a bud, including but not limited to a lateral bud, and a combination of the foregoing. In an aspect, the functional WUS/WOX polypeptide comprises an amino acid sequence selected from SEQ ID NO: 144, 146, 148, 150, 152, 154, 156, 158, 160, 162, 164, 166, 168, 170, 172, 174, 176, 178, 180, 182, 184, 186, 188, 190, 192, 194, 196, 198, 200, 202, 204, 206, 208, 210, or 212; or wherein the functional WUS/WOX polypeptide is encoded by a nucleotide sequence selected from SEQ ID NO: 143, 145, 147, 149, 151, 153, 155, 157, 159, 161, 163, 165, 167, 169, 171, 173, 175, 177, 179, 181, 183, 185, 187, 189, 191, 193, 195, 197, 199, 201, 203, 205, 207, 209, or 211, and wherein the Babyboom (BBM) polypeptide or the Ovule Development Protein 2 (ODP2) polypeptide comprises an amino acid sequence selected from SEQ ID NO: 214, 216, 219, 221, 223, 225, 227, 229, or 231; or wherein the Babyboom (BBM) polypeptide or the Ovule Development Protein 2 (ODP2) polypeptide is encoded by a nucleotide sequence selected from SEQ ID NO: 213, 215, 217, 218, 220, 222, 224, 226, 228, 230, or 232. In an aspect, the morphogenic gene expression cassette further comprises a polynucleotide selected from a ZM-MIR-Corngrass1 nucleotide, a ZM-GRF5 nucleotide, a ZM-GRF4 nucleotide, a ZM-GIF1 nucleotide, a ZM-GRF4˜GIF1 nucleotide, a ZM-STEMIN1 nucleotide, a ZM-REV nucleotide, a ZM-ESR1 nucleotide, a ZM-LAS nucleotide, a ZM-CUC1 nucleotide, a ZM-CUC2 nucleotide, a ZM-CUC3 nucleotide, a ZM-RLD1 nucleotide, a ZM-KN1 nucleotide, a ZM-CYCD2 nucleotide, a ZM-GPCNAC-1 nucleotide, a ZM-MIR156B nucleotide, a ZM-LEC1 nucleotide, an AT-RKD4 nucleotide, an AT-LEC2 nucleotide, an AT-RAP2.6L nucleotide, a ZM-MIR-SPS1 nucleotide, a ZM-MIR-MAX1 nucleotide, or a ZM-MIR-MAX4 nucleotide. In an aspect, the morphogenic gene expression cassette further comprises a polynucleotide sequence encoding a site-specific recombinase selected from the group consisting of FLP, FLPe, KD, Cre, SSV1, lambda Int, phi C31 Int, HK022, R, B2, B3, Gin, Tn1721, CinH, ParA, Tn5053, Bxb1, TP907-1, or U153, wherein the site-specific recombinase is operably linked to a constitutive promoter, an inducible promoter, a tissue-specific promoter, or a developmentally regulated promoter. In an aspect, excising the morphogenic gene expression cassette to provide the transgenic maize plant that contains the heterologous polynucleotide. In an aspect, breeding away from the morphogenic gene expression cassette. In an aspect, the transgenic plant produced by the method comprises the heterologous polynucleotide. In an aspect, a seed of the transgenic plant comprises the heterologous polynucleotide.

[0010] In an aspect, a regenerable plant structure derived from a transgenic maize leaf explant, the maize leaf explant comprising a heterologous polynucleotide expression cassette and a morphogenic gene expression cassette, wherein the morphogenic gene expression cassette comprises a nucleotide sequence encoding a functional WUS/WOX polypeptide and a nucleotide sequence encoding a Babyboom (BBM) polypeptide or an Ovule Development Protein 2 (ODP2) polypeptide or a functional homolog of a WUS/WOX and a BBM or ODP2 polypeptide, wherein the combined expression of the nucleotide sequence encoding the functional WUS/WOX polypeptide and the nucleotide sequence encoding the Babyboom (BBM) polypeptide or the Ovule Development Protein 2 (ODP2) polypeptide or the functional homolog of a WUS/WOX and a BBM or ODP2 polypeptide is adequate in strength and duration such that the maize leaf explant forms a regenerable plant structure containing the heterologous polynucleotide expression cassette within about eight weeks or less, or within about 6 weeks or less, or within about 4 weeks or less, or within about ten days to about fourteen days of the maize leaf explant receiving the heterologous polynucleotide expression cassette and the morphogenic gene expression cassette is provided. In an aspect, the maize leaf explant is a haploid maize leaf explant. In an aspect, the nucleotide sequence encoding the functional WUS/WOX polypeptide is selected from WUS, WUS1, WUS2, WUS3, WOX2A, WOX4, WOX5A, and WOX9, and wherein the nucleotide sequence encoding the Babyboom (BBM) polypeptide is selected from BBM, BBM1, BBM2, BBM3, BMN2, and BMN3 or the Ovule Development Protein 2 (ODP2) polypeptide is ODP2. In an aspect, the heterologous polynucleotide expression cassette and the morphogenic gene expression cassette are introduced through a method of transformation by a Rhizobia bacterial species or particle bombardment. In an aspect, the heterologous polynucleotide expression cassette and the morphogenic gene expression cassette are introduced through a method of electroporation, PEG transfection, or RNP (ribonucleoprotein) delivery. In an aspect, the heterologous polynucleotide expression cassette comprises a heterologous polynucleotide selected from the group consisting of a heterologous polynucleotide conferring a nutritional enhancement, a heterologous polynucleotide conferring a modified oil content, a heterologous polynucleotide conferring a modified protein content, a heterologous polynucleotide conferring a modified metabolite content, a heterologous polynucleotide conferring increased yield, a heterologous polynucleotide conferring abiotic stress tolerance, a heterologous polynucleotide conferring drought tolerance, a heterologous polynucleotide conferring cold tolerance, a heterologous polynucleotide conferring herbicide tolerance, a heterologous polynucleotide conferring pest resistance, a heterologous polynucleotide conferring pathogen resistance, a heterologous polynucleotide conferring insect resistance, a heterologous polynucleotide conferring nitrogen use efficiency (NUE), a heterologous polynucleotide conferring disease resistance, a heterologous polynucleotide conferring increased biomass, a heterologous polynucleotide conferring an ability to alter a metabolic pathway, and a combination of the foregoing. In an aspect, the leaf explant is selected from the group consisting of a leaf, a radical leaf, a cauline leaf, an alternate leaf, an opposite leaf, a decussate leaf, an opposite superposed leaf, a whorled leaf, a petiolate leaf, a sessile leaf, a subsessile leaf, a stipulate leaf, an exstipulate leaf, a simple leaf, a compound leaf, leaf primordia, a leaf sheath, a leaf base, a portion of a leaf immediately proximal to its attachment point to a petiole or stem, a bud, including but not limited to a lateral bud, and a combination of the foregoing. In an aspect, the functional WUS/WOX polypeptide comprises an amino acid sequence selected from SEQ ID NO: 144, 146, 148, 150, 152, 154, 156, 158, 160, 162, 164, 166, 168, 170, 172, 174, 176, 178, 180, 182, 184, 186, 188, 190, 192, 194, 196, 198, 200, 202, 204, 206, 208, 210, or 212; or wherein the functional WUS/WOX polypeptide is encoded by a nucleotide sequence selected from SEQ ID NO: 143, 145, 147, 149, 151, 153, 155, 157, 159, 161, 163, 165, 167, 169, 171, 173, 175, 177, 179, 181, 183, 185, 187, 189, 191, 193, 195, 197, 199, 201, 203, 205, 207, 209, or 211, and wherein the Babyboom (BBM) polypeptide or the Ovule Development Protein 2 (ODP2) polypeptide comprises an amino acid sequence selected from SEQ ID NO: 214, 216, 219, 221, 223, 225, 227, 229, or 231; or wherein the Babyboom (BBM) polypeptide or the Ovule Development Protein 2 (ODP2) polypeptide is encoded by a nucleotide sequence selected from SEQ ID NO: 213, 215, 217, 218, 220, 222, 224, 226, 228, 230, or 232. In an aspect, the morphogenic gene expression cassette further comprises a polynucleotide selected from a ZM-MIR-Corngrass1 nucleotide, a ZM-GRF5 nucleotide, a ZM-GRF4 nucleotide, a ZM-GIF1 nucleotide, a ZM-GRF4˜GIF1 nucleotide, a ZM-STEMIN1 nucleotide, a ZM-REV nucleotide, a ZM-ESR1 nucleotide, a ZM-LAS nucleotide, a ZM-CUC1 nucleotide, a ZM-CUC2 nucleotide, a ZM-CUC3 nucleotide, a ZM-RLD1 nucleotide, a ZM-KN1 nucleotide, a ZM-CYCD2 nucleotide, a ZM-GPCNAC-1 nucleotide, a ZM-MIR156B nucleotide, a ZM-LEC1 nucleotide, an AT-RKD4 nucleotide, an AT-LEC2 nucleotide, an AT-RAP2.6L nucleotide, a ZM-MIR-SPS1 nucleotide, a ZM-MIR-MAX1 nucleotide, or a ZM-MIR-MAX4 nucleotide. In an aspect, the morphogenic gene expression cassette further comprises a polynucleotide sequence encoding a site-specific recombinase selected from the group consisting of FLP, FLPe, KD, Cre, SSV1, lambda Int, phi C31 Int, HK022, R, B2, B3, Gin, Tn1721, CinH, ParA, Tn5053, Bxb1, TP907-1, or U153, wherein the site-specific recombinase is operably linked to a constitutive promoter, an inducible promoter, a tissue-specific promoter, or a developmentally regulated promoter. In an aspect, excising the morphogenic gene expression cassette to provide the transgenic maize plant that contains the heterologous polynucleotide. In an aspect, a fertile transgenic maize plant produced from the regenerable plant structure is provided. In an aspect, the maize plant does not comprise the morphogenic gene expression cassette. In an aspect, a plurality of maize seeds produced from the transgenic maize plant is provided.

[0011] In an aspect, a method of producing a transgenic maize plant that contains a heterologous polynucleotide comprising contacting a maize leaf explant with a heterologous polynucleotide expression cassette and a morphogenic gene expression cassette, wherein the morphogenic gene expression cassette comprises a nucleotide sequence encoding a functional WUS/WOX polypeptide and a nucleotide sequence encoding a Babyboom (BBM) polypeptide or an Ovule Development Protein 2 (ODP2) polypeptide or a functional homolog of a WUS/WOX and a BBM or ODP2 polypeptide, wherein the combined expression of the nucleotide sequence encoding the functional WUS/WOX polypeptide and the nucleotide sequence encoding the Babyboom (BBM) polypeptide or the Ovule Development Protein 2 (ODP2) polypeptide is greater than the combined expression of the morphogenic gene expression cassette comprising the nucleotide sequence encoding the functional WUS/WOX polypeptide operably linked to the Agrobacterium-NOS promoter having SEQ ID NO: 290 and the nucleotide sequence encoding the Babyboom (BBM) polypeptide or the Ovule Development Protein 2 (ODP2) polypeptide operably linked to the ubiquitin (UBI) promoter having SEQ ID NO: 339; selecting a maize leaf explant containing the heterologous polynucleotide expression cassette, wherein the maize leaf explant forms a regenerable plant structure containing the heterologous polynucleotide expression cassette within about eight weeks or less, or within about 6 weeks or less, or within about 4 weeks or less, or within about ten days to about fourteen days of the contacting; and regenerating a transgenic maize plant from the regenerable plant structure containing the heterologous polynucleotide expression cassette is provided. In an aspect, the maize leaf explant is a haploid maize leaf explant. In an aspect, the nucleotide sequence encoding the functional WUS/WOX polypeptide is selected from WUS, WUS1, WUS2, WUS3, WOX2A, WOX4, WOX5A, and WOX9, and wherein the nucleotide sequence encoding the Babyboom (BBM) polypeptide is selected from BBM, BBM1, BBM2, BBM3, BMN2, and BMN3 or the Ovule Development Protein 2 (ODP2) polypeptide is ODP2. In an aspect, the heterologous polynucleotide expression cassette and the morphogenic gene expression cassette are introduced through a method of transformation by a Rhizobia bacterial species or particle bombardment. In an aspect, the heterologous polynucleotide expression cassette and the morphogenic gene expression cassette are introduced through a method of electroporation, PEG transfection, or RNP (ribonucleoprotein) delivery. In an aspect, the heterologous polynucleotide expression cassette comprises a heterologous polynucleotide selected from the group consisting of: a heterologous polynucleotide conferring a nutritional enhancement, a heterologous polynucleotide conferring a modified oil content, a heterologous polynucleotide conferring a modified protein content, a heterologous polynucleotide conferring a modified metabolite content, a heterologous polynucleotide conferring increased yield, a heterologous polynucleotide conferring abiotic stress tolerance, a heterologous polynucleotide conferring drought tolerance, a heterologous polynucleotide conferring cold tolerance, a heterologous polynucleotide conferring herbicide tolerance, a heterologous polynucleotide conferring pest resistance, a heterologous polynucleotide conferring pathogen resistance, a heterologous polynucleotide conferring insect resistance, a heterologous polynucleotide conferring nitrogen use efficiency (NUE), a heterologous polynucleotide conferring disease resistance, a heterologous polynucleotide conferring increased biomass, a heterologous polynucleotide conferring an ability to alter a metabolic pathway, and a combination of the foregoing. In an aspect, the leaf explant is selected from the group consisting of a leaf, a radical leaf, a cauline leaf, an alternate leaf, an opposite leaf, a decussate leaf, an opposite superposed leaf, a whorled leaf, a petiolate leaf, a sessile leaf, a subsessile leaf, a stipulate leaf, an exstipulate leaf, a simple leaf, a compound leaf, leaf primordia, a leaf sheath, a leaf base, a portion of a leaf immediately proximal to its attachment point to a petiole or stem, a bud, including but not limited to a lateral bud, and a combination of the foregoing. In an aspect, the functional WUS/WOX polypeptide comprises an amino acid sequence selected from SEQ ID NO: 144, 146, 148, 150, 152, 154, 156, 158, 160, 162, 164, 166, 168, 170, 172, 174, 176, 178, 180, 182, 184, 186, 188, 190, 192, 194, 196, 198, 200, 202, 204, 206, 208, 210, or 212; or wherein the functional WUS/WOX polypeptide is encoded by a nucleotide sequence selected from SEQ ID NO: 143, 145, 147, 149, 151, 153, 155, 157, 159, 161, 163, 165, 167, 169, 171, 173, 175, 177, 179, 181, 183, 185, 187, 189, 191, 193, 195, 197, 199, 201, 203, 205, 207, 209, or 211, and wherein the Babyboom (BBM) polypeptide or the Ovule Development Protein 2 (ODP2) polypeptide comprises an amino acid sequence selected from SEQ ID NO: 214, 216, 219, 221, 223, 225, 227, 229, or 231; or wherein the Babyboom (BBM) polypeptide or the Ovule Development Protein 2 (ODP2) polypeptide is encoded by a nucleotide sequence selected from SEQ ID NO: 213, 215, 217, 218, 220, 222, 224, 226, 228, 230, or 232. In an aspect, the morphogenic gene expression cassette further comprises a polynucleotide selected from a ZM-MIR-Corngrass1 nucleotide, a ZM-GRF5 nucleotide, a ZM-GRF4 nucleotide, a ZM-GIF1 nucleotide, a ZM-GRF4˜GIF1 nucleotide, a ZM-STEMIN1 nucleotide, a ZM-REV nucleotide, a ZM-ESR1 nucleotide, a ZM-LAS nucleotide, a ZM-CUC1 nucleotide, a ZM-CUC2 nucleotide, a ZM-CUC3 nucleotide, a ZM-RLD1 nucleotide, a ZM-KN1 nucleotide, a ZM-CYCD2 nucleotide, a ZM-GPCNAC-1 nucleotide, a ZM-MIR156B nucleotide, a ZM-LEC1 nucleotide, an AT-RKD4 nucleotide, an AT-LEC2 nucleotide, an AT-RAP2.6L nucleotide, a ZM-MIR-SPS1 nucleotide, a ZM-MIR-MAX1 nucleotide, or a ZM-MIR-MAX4 nucleotide. In an aspect, the morphogenic gene expression cassette further comprises a polynucleotide sequence encoding a site-specific recombinase selected from the group consisting of FLP, FLPe, KD, Cre, SSV1, lambda Int, phi C31 Int, HK022, R, B2, B3, Gin, Tn1721, CinH, ParA, Tn5053, Bxb1, TP907-1, or U153, wherein the site-specific recombinase is operably linked to a constitutive promoter, an inducible promoter, a tissue-specific promoter, or a developmentally regulated promoter. In an aspect, excising the morphogenic gene expression cassette to provide the transgenic maize plant that contains the heterologous polynucleotide. In an aspect, breeding away from the morphogenic gene expression cassette. In an aspect, the transgenic plant produced by the method comprises the heterologous polynucleotide. In an aspect, seed of the transgenic plant comprises the heterologous polynucleotide.

[0012] In an aspect, a method of producing a genome-edited maize plant comprising contacting a maize leaf explant with a morphogenic gene expression cassette, wherein the morphogenic gene expression cassette comprises a nucleotide sequence encoding a functional WUS/WOX polypeptide and a nucleotide sequence encoding a Babyboom (BBM) polypeptide or an Ovule Development Protein 2 (ODP2) polypeptide or a functional homolog of a WUS/WOX and a BBM or ODP2 polypeptide, wherein the combined expression of the nucleotide sequence encoding the functional WUS/WOX polypeptide and the nucleotide sequence encoding the Babyboom (BBM) polypeptide or the Ovule Development Protein 2 (ODP2) polypeptide or the functional homolog of a WUS/WOX and a BBM or ODP2 polypeptide is greater than the expression of the morphogenic gene expression cassette comprising the nucleotide sequence encoding the functional WUS/WOX polypeptide operably linked to the Agrobacterium-NOS promoter having SEQ ID NO: 290 and the nucleotide sequence encoding the Babyboom (BBM) polypeptide or the Ovule Development Protein 2 (ODP2) polypeptide operably linked to the ubiquitin (UBI) promoter having SEQ ID NO: 339; providing a polynucleotide encoding a site-specific polypeptide or a site-specific nuclease; selecting a maize leaf explant containing a genome edit, wherein the maize leaf explant forms a regenerable plant structure containing the genome edit within about eight weeks or less, or within about 6 weeks or less, or within about 4 weeks or less, or within about ten days to about fourteen days of the contacting; and regenerating a genome-edited plant from the regenerable plant structure containing the genome edit is provided. In an aspect, the maize leaf explant is a haploid maize leaf explant. In an aspect, the nucleotide sequence encoding the functional WUS/WOX polypeptide is selected from WUS, WUS1, WUS2, WUS3, WOX2A, WOX4, WOX5A, and WOX9, and wherein the nucleotide sequence encoding the Babyboom (BBM) polypeptide is selected from BBM, BBM1, BBM2, BBM3, BMN2, and BMN3 or the Ovule Development Protein 2 (ODP2) polypeptide is ODP2. In an aspect, the site-specific polypeptide or the site-specific nuclease is selected from the group consisting of a zinc finger nuclease, a meganuclease, a transposase, TALEN, and a CRISPR-Cas nuclease. In an aspect, the CRISPR-Cas nuclease is Cas9, Cpf1 or a Cas12f1 nuclease and further comprising providing a guide RNA. In an aspect, the site-specific polypeptide or the site-specific nuclease effects an insertion, a deletion, or a substitution mutation. In an aspect, the guide RNA and CRISPR-Cas nuclease is a ribonucleoprotein complex. In an aspect, the leaf explant is selected from the group consisting of a leaf, a radical leaf, a cauline leaf, an alternate leaf, an opposite leaf, a decussate leaf, an opposite superposed leaf, a whorled leaf, a petiolate leaf, a sessile leaf, a subsessile leaf, a stipulate leaf, an exstipulate leaf, a simple leaf, a compound leaf, leaf primordia, a leaf sheath, a leaf base, a portion of a leaf immediately proximal to its attachment point to a petiole or stem, a bud, including but not limited to a lateral bud, and a combination of the foregoing. In an aspect, the functional WUS/WOX polypeptide comprises an amino acid sequence selected from SEQ ID NO: 144, 146, 148, 150, 152, 154, 156, 158, 160, 162, 164, 166, 168, 170, 172, 174, 176, 178, 180, 182, 184, 186, 188, 190, 192, 194, 196, 198, 200, 202, 204, 206, 208, 210, or 212; or wherein the functional WUS/WOX polypeptide is encoded by a nucleotide sequence selected from SEQ ID NO: 143, 145, 147, 149, 151, 153, 155, 157, 159, 161, 163, 165, 167, 169, 171, 173, 175, 177, 179, 181, 183, 185, 187, 189, 191, 193, 195, 197, 199, 201, 203, 205, 207, 209, or 211, and wherein the Babyboom (BBM) polypeptide or the Ovule Development Protein 2 (ODP2) polypeptide comprises an amino acid sequence selected from SEQ ID NO: 214, 216, 219, 221, 223, 225, 227, 229, or 231; or wherein the Babyboom (BBM) polypeptide or the Ovule Development Protein 2 (ODP2) polypeptide is encoded by a nucleotide sequence selected from SEQ ID NO: 213, 215, 217, 218, 220, 222, 224, 226, 228, 230, or 232. In an aspect, the morphogenic gene expression cassette further comprises a polynucleotide selected from a ZM-MIR-Corngrass1 nucleotide, a ZM-GRF5 nucleotide, a ZM-GRF4 nucleotide, a ZM-GIF1 nucleotide, a ZM-GRF4˜GIF1 nucleotide, a ZM-STEMIN1 nucleotide, a ZM-REV nucleotide, a ZM-ESR1 nucleotide, a ZM-LAS nucleotide, a ZM-CUC1 nucleotide, a ZM-CUC2 nucleotide, a ZM-CUC3 nucleotide, a ZM-RLD1 nucleotide, a ZM-KN1 nucleotide, a ZM-CYCD2 nucleotide, a ZM-GPCNAC-1 nucleotide, a ZM-MIR156B nucleotide, a ZM-LEC1 nucleotide, an AT-RKD4 nucleotide, an AT-LEC2 nucleotide, an AT-RAP2.6L nucleotide, a ZM-CUC3 nucleotide, a ZM-MIR-SPS1 nucleotide, a ZM-MIR-MAX1 nucleotide, or a ZM-MTR-MAX4 nucleotide. In an aspect, the morphogenic gene expression cassette further comprises a polynucleotide sequence encoding a site-specific recombinase selected from the group consisting of FLP, FLPe, KD, Cre, SSV1, lambda Int, phi C31 Int, HK022, R, B2, B3, Gin, Tn1721, CinH, ParA, Tn5053, Bxb1, TP907-1, or U153, wherein the site-specific recombinase is operably linked to a constitutive promoter, an inducible promoter, a tissue-specific promoter, or a developmentally regulated promoter. In an aspect, excising the morphogenic gene expression cassette to provide a genome-edited plant. In an aspect, breeding away from the morphogenic gene expression cassette to provide the genome-edited plant containing the genome edit. In an aspect, the genome-edited plant produced by the method is provided. In an aspect, a seed of the genome-edited plant comprises the genome edit.

[0013] In an aspect, a method of producing a genome-edited monocot plant comprising contacting a monocot leaf explant with a morphogenic gene expression cassette, wherein the morphogenic gene expression cassette comprises a nucleotide sequence encoding a functional WUS/WOX polypeptide and a nucleotide sequence encoding a Babyboom (BBM) polypeptide or an Ovule Development Protein 2 (ODP2) polypeptide, wherein the combined expression of the nucleotide sequence encoding the functional WUS/WOX polypeptide and the nucleotide sequence encoding the Babyboom (BBM) polypeptide or the Ovule Development Protein 2 (ODP2) polypeptide is greater than the expression of the morphogenic gene expression cassette comprising the nucleotide sequence encoding the functional WUS/WOX polypeptide operably linked to the AT-NOS promoter having SEQ ID NO: 290 and the nucleotide sequence encoding the Babyboom (BBM) polypeptide or the Ovule Development Protein 2 (ODP2) polypeptide operably linked to the ubiquitin (UBI) promoter having SEQ ID NO: 339 and providing a polynucleotide encoding a site-specific polypeptide or a site-specific nuclease; selecting a monocot leaf explant containing a genome edit, wherein the monocot leaf explant forms a regenerable plant structure containing the genome edit within about eight weeks or less, or within about 6 weeks or less, or within about 4 weeks or less, or within about ten days to about fourteen days of the contacting; and regenerating a genome-edited plant from the regenerable plant structure containing the genome edit is provided. In an aspect, the monocot leaf explant is a haploid monocot leaf explant. In an aspect, wherein the nucleotide sequence encoding the functional WUS/WOX polypeptide is selected from WUS, WUS1, WUS2, WUS3, WOX2A, WOX4, WOX5A, and WOX9, and wherein the nucleotide sequence encoding the Babyboom (BBM) polypeptide is selected from BBM, BBM1, BBM2, BBM3, BMN2, and BMN3 or the Ovule Development Protein 2 (ODP2) polypeptide is ODP2. In an aspect, the site-specific polypeptide or the site-specific nuclease is selected from the group consisting of a zinc finger nuclease, a meganuclease, TALEN, and a CRISPR-Cas nuclease. In a further aspect, the CRISPR-Cas nuclease is Cas9 or Cpf1 nuclease and further comprising providing a guide RNA. In an aspect, the site-specific polypeptide or the site-specific nuclease effects an insertion, a deletion, or a substitution mutation. In an aspect, the guide RNA and CRISPR-Cas nuclease is a ribonucleoprotein complex. In an aspect, the leaf explant useful in the methods of the disclosure is selected from the group consisting of a leaf, a radical leaf, a cauline leaf, an alternate leaf, an opposite leaf, a decussate leaf, an opposite superposed leaf, a whorled leaf, a petiolate leaf, a sessile leaf, a subsessile leaf, a stipulate leaf, an exstipulate leaf, a simple leaf, a compound leaf, leaf primordia, a leaf sheath, a leaf base, a portion of a leaf immediately proximal to its attachment point to a petiole or stem, a bud, including but not limited to a lateral bud, and a combination of the foregoing. In an aspect, monocots useful in the methods of the disclosure are selected from the group consisting of Panicum virgatum (switchgrass), Sorghum bicolor (sorghum, sudangrass), Miscanthus giganteus (miscanthus), Saccharum sp. (energy cane), Zea mays (corn), Triticum aestivum (wheat), Oryza sativa (rice), Pennisetum glaucum (pearl millet), Panicum spp., Sorghum spp., Miscanthus spp., Saccharum spp., and Erianthus spp. In an aspect the monocot useful in the methods of the disclosure is selected from the Poaceae family. In an aspect, wherein the monocot is from the Poaceae family, the monocot is selected from a Poaceae sub-family selected from Chloridoideae, Panicoideae, Oryzoideae, and Pooideae. In an aspect, wherein the monocot is from the Poaceae sub-family Chloridoideae, the monocot is Eragrostis tef In an aspect, wherein the monocot is from the Poaceae sub-family Panicoideae the monocot is selected from Zea mays, Sorghum bicolor, Pennisitum glaucum, and Panicum virgatum. In an aspect, wherein the monocot is from the Poaceae sub-family Oryzoideae the monocot is Oryza sativa. In an aspect, wherein the monocot is from the Poaceae sub-family Pooideae the monocot is selected from Hordeum vulgare, Secale cereal, and Triticum aestivum. In an aspect, wherein the functional WUS/WOX polypeptide comprises an amino acid sequence selected from SEQ ID NO: 144, 146, 148, 150, 152, 154, 156, 158, 160, 162, 164, 166, 168, 170, 172, 174, 176, 178, 180, 182, 184, 186, 188, 190, 192, 194, 196, 198, 200, 202, 204, 206, 208, 210, or 212; or wherein the functional WUS/WOX polypeptide is encoded by a nucleotide sequence selected from SEQ ID NO: 143, 145, 147, 149, 151, 153, 155, 157, 159, 161, 163, 165, 167, 169, 171, 173, 175, 177, 179, 181, 183, 185, 187, 189, 191, 193, 195, 197, 199, 201, 203, 205, 207, 209, or 211, and wherein the Babyboom (BBM) polypeptide or the Ovule Development Protein 2 (ODP2) polypeptide comprises an amino acid sequence selected from SEQ ID NO: 214, 216, 219, 221, 223, 225, 227, 229, or 231; or wherein the Babyboom (BBM) polypeptide or the Ovule Development Protein 2 (ODP2) polypeptide is encoded by a nucleotide sequence selected from SEQ ID NO: 213, 215, 217, 218, 220, 222, 224, 226, 228, 230, or 232. In an aspect, the morphogenic gene expression cassette further comprises a polynucleotide selected from a ZM-MIR-Corngrass1 nucleotide, a ZM-GRF5 nucleotide, a ZM-GRF4 nucleotide, a ZM-GIF1 nucleotide, a ZM-GRF4˜GIF1 nucleotide, a ZM-STEMIN1 nucleotide, a ZM-REV nucleotide, a ZM-ESR1 nucleotide, a ZM-LAS nucleotide, a ZM-CUC3 nucleotide, a ZM-MIR-SPS1 nucleotide, a ZM-MIR-MAX1 nucleotide, or a ZM-MTR-MAX4 nucleotide. In a further aspect, the morphogenic gene expression cassette further comprises a polynucleotide sequence encoding a site-specific recombinase selected from the group consisting of FLP, FLPe, KD, Cre, SSV1, lambda Int, phi C31 Int, HK022, R, B2, B3, Gin, Tn1721, CinH, ParA, Tn5053, Bxb1, TP907-1, or U153, wherein the site-specific recombinase is operably linked to a constitutive promoter, an inducible promoter, a tissue-specific promoter, or a developmentally regulated promoter. In an aspect, the morphogenic gene expression cassette is excised to provide a genome-edited plant. In an aspect, the morphogenic gene expression cassette is bred away from to provide the genome-edited plant that contains the genome edit. In an aspect, a genome-edited plant produced by the methods disclosed herein is provided, wherein the plant comprises genome edit. In an aspect, a seed of the genome-edited plant produced by the methods disclosed herein is provided, wherein the seed comprises the genome edit.

### DETAILED DESCRIPTION

[0014] The disclosures herein will be described more fully hereinafter, in which some, but not all possible aspects are shown. Indeed, disclosures may be embodied in many different forms and should not be construed as limited to the aspects set forth herein; rather, these aspects are provided so that this disclosure will satisfy applicable legal requirements.

[0015] Many modifications and other aspects disclosed herein will come to mind to one skilled in the art to which the disclosed methods pertain having the benefit of the teachings presented in the following descriptions. Therefore, it is to be understood that the disclosures are not to be limited to the specific aspects disclosed and that modifications and other aspects are intended to be included within the scope of the appended claims. Although specific terms are employed herein, they are used in a generic and descriptive sense only and not for purposes of limitation.

[0016] It is also to be understood that the terminology used herein is for the purpose of describing particular aspects only and is not intended to be limiting. As used in the specification and in the claims, the term “comprising” can include the aspect of “consisting of.” Unless defined otherwise, all technical and scientific terms used herein have the same meaning as commonly understood by one of ordinary skill in the art to which the disclosed compositions and methods belong. In this specification and in the claims which follow, reference will be made to a number of terms which shall be defined herein.

[0017] As used herein, “contacting”, “contact”, “contacted”, “comes in contact with” or “in contact with” means “direct contact” or “indirect contact”. For example, cells are placed in a condition where the cells can come into contact with an expression cassette, a nucleotide, a peptide, a RNP (ribonucleoprotein), or other substance disclosed herein. Such expression cassette, nucleotide, peptide, or other substance is allowed to be present in an environment where the cells survive (for example, medium or expressed in the cell or expressed in an adjacent cell) and can act on the cells. For example, medium comprising a selection agent may have direct contact with a cell or the medium comprising the selection agent may be separated from the cell by filter paper, plant tissues, or other cells thus, the selection agent is transferred through the filter paper, plant tissues, or other cells to the cell. The expression cassettes, nucleotides, peptides, and other substances disclosed herein may be contacted with a cell by T-DNA transfer, particle bombardment, electroporation, PEG transfection, or RNP (ribonucleoprotein) delivery.

[0018] As used herein, a “somatic embryo” is a multicellular structure that progresses through developmental stages that are similar to the development of a zygotic embryo, including formation of globular and transition-stage embryos, formation of an embryo axis and a scutellum, and accumulation of lipids and starch. Single somatic embryos derived from a zygotic embryo germinate to produce single non-chimeric plants, which may originally derive from a single-cell.

[0019] As used herein, an “embryogenic callus” or “callus” is a friable or non-friable mixture of undifferentiated or partially undifferentiated cells which subtend proliferating primary and secondary somatic embryos capable of regenerating into mature fertile plants.

[0020] As used herein, “germination” is the growth of a regenerable structure to form a plantlet which continues growing to produce a plant.

[0021] As used herein, a “transgenic plant” is a mature, fertile plant that contains a transgene.

[0022] The methods of the disclosure can be used to transform leaf explants. As used herein, “leaf explants” include but are not limited to radical leaves, cauline leaves, alternate leaves, opposite leaves, decussate leaves, opposite superposed leaves, whorled leaves, petiolate leaves, sessile leaves, subsessile leaves, stipulate leaves, exstipulate leaves, simple leaves, or compound leaves. Leaf explants include buds, including but not limited to lateral buds, leaf primordia, the leaf sheath, leaf base or the portion of the leaf immediately proximal to its attachment point to the petiole or stem. Such vegetative organs and their composite tissues can be used for transformation with nucleotide sequences encoding agronomically important traits.

[0023] As used herein, a “leaf” is a flat lateral structure that protrudes from a plant's stem, including the supporting stalk between the flattened leaf and the plant stem, but not including the axillary meristem located at the junction of the petiole and stem, including but not limited to a radical leaf, a cauline leaf, an alternate leaf, and opposite leaf, a decussate leaf, an opposite superposed leaf, a whorled leaf, a petiolate leaf, a sessile leaf, a subsessile leaf, a stipulate leaf, an exstipulate leaf, a simple leaf, or a compound leaf.

[0024] As used herein, a “homolog” is either a paralog (for example, a family member within the genome of the same species) or an ortholog (the corresponding gene from another plant species). More generically, a gene related to a second gene by descent from a common ancestral DNA sequence is referred to as a homolog. The term, homolog, applies to the relationship between genes separated by the event of speciation (ortholog) or to the relationship between genes separated by the event of genetic duplication within the same species (paralog).

[0025] As used herein, the term “morphogenic gene” means a gene that when ectopically expressed stimulates formation of a somatically-derived structure that can produce a plant. More precisely, ectopic expression, or mutation, or silencing, or decreased expression of the morphogenic gene stimulates the de novo formation of a somatic embryo or an organogenic structure, such as a shoot meristem or an axillary meristem, that can produce a plant or stimulates regeneration of a plant. This stimulated de novo formation occurs either in the cell in which the morphogenic gene is expressed, or silenced, or repressed, or in a neighboring cell. A morphogenic gene can be a transcription factor that regulates expression of other genes, or a gene that influences hormone levels in a plant tissue, both of which can stimulate morphogenic changes. A morphogenic gene may be stably incorporated into the genome of a plant or it may be transiently expressed. In an aspect, expression of the morphogenic gene is controlled. The expression can be controlled transcriptionally or post-transcriptionally. The controlled expression may also be a pulsed expression of the morphogenic gene for a particular period of time. Alternatively, the morphogenic gene may be expressed in only some transformed cells and not expressed in others. The control of expression of the morphogenic gene can be achieved by a variety of methods as disclosed herein below. The morphogenic genes useful in the methods of the present disclosure may be obtained from or derived from any plant species.

[0026] As used herein, the term “morphogenic factor” means a morphogenic gene and/or the protein expressed by a morphogenic gene.

[0027] A morphogenic gene is involved in plant metabolism, organ development, stem cell development, cell growth stimulation, organogenesis, regeneration, somatic embryogenesis initiation, accelerated somatic embryo maturation, initiation and/or development of the apical meristem, initiation and/or development of shoot meristem or axillary meristem, initiation and/or development of shoots, or a combination thereof, such as WUS/WOX genes (WUS, WUS1, WUS2, WUS3, WOX2A, WOX4, WOX5, or WOX9) see U.S. Pat. Nos. 7,348,468 and 7,256,322 and United States Patent Application publications 20170121722 and 20070271628; Laux et al. (1996) Development 122:87-96; and Mayer et al. (1998) Cell 95:805-815; van der Graaff et al., 2009, Genome Biology 10:248; Dolzblasz et al., 2016, Mol. Plant 19:1028-39 are useful in the methods of the disclosure. Modulation of WUS/WOX is expected to modulate plant and/or plant tissue phenotype including plant metabolism, organ development, stem cell development, cell growth stimulation, organogenesis, regeneration, somatic embryogenesis initiation, accelerated somatic embryo maturation, initiation and/or development of the apical meristem, initiation and/or development of shoot meristem, initiation and/or development of shoots, or a combination thereof. Expression of Arabidopsis WUS can induce stem cells in vegetative tissues, which can differentiate into somatic embryos (Zuo, et al. (2002) Plant J 30:349-359). Also of interest in this regard would be a MYB118 gene (see U.S. Pat. No. 7,148,402), MYB115 gene (see Wang et al. (2008) Cell Research 224-235), a BABYBOOM gene (BBM; see Boutilier et al. (2002) Plant Cell 14:1737-1749), a CLAVATA gene (see, for example, U.S. Pat. No. 7,179,963), an Enhancer of Shoot Regeneration 1 (ESR1) gene (see Banno et al. (2001), The Plant Cell, Vol. 13:2609-2618), a Corngrass1 (Cg1) gene (see Chuck et al. (2007) Nature Genetics, Vol. 39(4):544-549), a Cup-Shaped Cotyledon (CUC) gene (see Hibara et al. (2006) The Plant Cell, Vol. 18:2946-2957), a REVOLUTA (REV) gene (see Otsuga et al. (2001) The Plant Journal 25(2):223-236), a More Axillary Growth1 (MAX1) gene (see Stirnberg et al. (2002) Development 129:1131-1141), a SUPERSHOOT (SPS) gene (see Tanikanjana, et al. (2001) Genes & Development 15:1577-1588), a Lateral Suppressor (LAS) gene (see Greb et al. (2003) Genes & Development 17:1175-1187), a More Axillary Growth4 (MAX4) gene (see Sorefan et al. (2003) Genes & Development 17:1469-1474), a Stem Cell-Inducing Factor 1 (STEMIN1) gene (see Ishikawa et al. (2019) Nature Plants 5:681-690), a Growth-Regulating Factor 4 (GRF4) gene and/or a GRF-Interacting Factor 1 (GIF1) gene (see Debernardi et al. bioRxiv 2020.08.23.263905; doi:https://doi.org/10.1101/2020.08.23.263905), and a Growth-Regulating Factor 5 (GRF5) gene (see Kong et al. bioRxiv 2020.08.23.263947; doi:https://doi.org/10.1101/2020.08.23.263947).

[0028] Morphogenic polynucleotide sequences and amino acid sequences of functional WUS/WOX polypeptides are useful in the disclosed methods. As defined herein, a “functional WUS/WOX nucleotide” is any polynucleotide encoding a protein that contains a homeobox DNA binding domain, a WUS box, and an EAR repressor domain (Ikeda et al., 2009 Plant Cell 21:3493-3505). As demonstrated by Rodriguez et al., 2016 PNAS www.pnas.org/cgi/doi/10.1073/pnas.1607673113 removal of the dimerization sequence which leaves behind the homeobox DNA binding domain, a WUS box, and an EAR repressor domain results in a functional WUS/WOX polypeptide. The Wuschel protein, designated hereafter as WUS, plays a key role in the initiation and maintenance of the apical meristem, which contains a pool of pluripotent stem cells (Endrizzi, et al., (1996) Plant Journal 10:967-979; Laux, et al., (1996) Development 122:87-96; and Mayer, et al., (1998) Cell 95:805-815). Arabidopsis plants mutant for the WUS gene contain stem cells that are misspecified and that appear to undergo differentiation. WUS encodes a novel homeodomain protein which presumably functions as a transcriptional regulator (Mayer, et al., (1998) Cell 95:805-815). The stem cell population of Arabidopsis shoot meristems is believed to be maintained by a regulatory loop between the CLAVATA (CLV) genes which promote organ initiation and the WUS gene which is required for stem cell identity, with the CLV genes repressing WUS at the transcript level, and WUS expression being sufficient to induce meristem cell identity and the expression of the stem cell marker CLV3 (Brand, et al., (2000) Science 289:617-619; Schoof, et al., (2000) Cell 100:635-644). Constitutive expression of WUS in Arabidopsis has been shown to lead to adventitious shoot proliferation from leaves (in planta) (Laux, T., Talk Presented at the XVI International Botanical Congress Meeting, Aug. 1-7, 1999, St. Louis, Mo.).

[0029] In an aspect, the functional WUS/WOX polypeptides useful in the methods of the present disclosure is a WUS, WUS1, WUS2, WUS3, WOX2A, WOX4, WOX5, WOX5A, or WOX9 polypeptide (see, U.S. Pat. Nos. 7,348,468 and 7,256,322 and US Patent Application Publication Numbers 2017/0121722 and 2007/0271628, herein incorporated by reference in their entirety and van der Graaff et al., 2009, Genome Biology 10:248). The functional WUS/WOX polypeptides useful in the methods of the present disclosure can be obtained from or derived from any plant including but not limited to monocots, dicots, Angiospermae, and Gymnospermae. Additional functional WUS/WOX sequences useful in the methods of the present disclosure are listed in Table 2.

[0030] Other morphogenic genes useful in the present disclosure include, but are not limited to, LEC1 (U.S. Pat. No. 6,825,397 incorporated herein by reference in its entirety, Lotan et al., 1998, Cell 93:1195-1205), LEC2 (Stone et al., 2008, PNAS 105:3151-3156; Belide et al., 2013, Plant Cell Tiss. Organ Cult 113:543-553), KN1/STM (Sinha et al., 1993. Genes Dev 7:787-795), the IPT gene from Agrobacterium (Ebinuma and Komamine, 2001, In vitro Cell. Dev Biol—Plant 37:103-113), MONOPTEROS-DELTA (Ckurshumova et al., 2014, New Phytol. 204:556-566), the Agrobacterium AV-6b gene (Wabiko and Minemura 1996, Plant Physiol. 112:939-951), the combination of the Agrobacterium IAA-h and IAA-m genes (Endo et al., 2002, Plant Cell Rep., 20:923-928), the Arabidopsis SERK gene (Hecht et al., 2001, Plant Physiol. 127:803-816), the Arabidopsis AGL15 gene (Harding et al., 2003, Plant Physiol. 133:653-663), the FUSCA gene (Castle and Meinke, Plant Cell 6:25-41), and the PICKLE gene (Ogas et al., 1999, PNAS 96:13839-13844).

[0031] As used herein, the term “transcription factor” means a protein that controls the rate of transcription of specific genes by binding to the DNA sequence of the promoter and either up-regulating or down-regulating expression. Examples of transcription factors that are also morphogenic genes, include members of the AP2/EREBP family (including BBM (ODP2)), plethora and aintegumenta sub-families, CAAT-box binding proteins such as LEC1 and HAP3, and members of the MYB, bHLH, NAC, MADS, bZIP and WRKY families.

[0032] Morphogenic polynucleotide sequences and amino acid sequences of Ovule Development Protein 2 (ODP2) polypeptides, and related polypeptides, e.g., Babyboom (BBM) protein family proteins are useful in the methods of the disclosure. In an aspect, a polypeptide comprising two AP2-DNA binding domains is an ODP2, BBM2, BMN2, or BMN3 polypeptide see, US Patent Application Publication Number 2017/0121722, herein incorporated by reference in its entirety. ODP2 polypeptides useful in the methods of the disclosure contain two predicted APETALA2 (AP2) domains and are members of the AP2 protein family (PFAM Accession PF00847). The AP2 family of putative transcription factors has been shown to regulate a wide range of developmental processes, and the family members are characterized by the presence of an AP2 DNA binding domain. This conserved core is predicted to form an amphipathic alpha helix that binds DNA. The AP2 domain was first identified in APETALA2, an Arabidopsis protein that regulates meristem identity, floral organ specification, seed coat development, and floral homeotic gene expression. The AP2 domain has now been found in a variety of proteins.

[0033] ODP2 polypeptides useful in the methods of the disclosure share homology with several polypeptides within the AP2 family, e.g., see FIG. 1 of U.S. Pat. No. 8,420,893, which is incorporated herein by reference in its entirety, and provides an alignment of the maize and rice ODP2 polypeptides with eight other proteins having two AP2 domains. A consensus sequence of all proteins appearing in the alignment of U.S. Pat. No. 8,420,893 is also provided in FIG. 1 therein. The polypeptide comprising the two AP2-DNA binding domains useful in the methods of the disclosure can be obtained from or derived from any of the plants described herein. In an aspect, the polypeptide comprising the two AP2-DNA binding domains useful in the methods of the disclosure is an ODP2 polypeptide. In an aspect, the polypeptide comprising the two AP2-DNA binding domains useful in the methods of the disclosure is a BBM2 polypeptide. The ODP2 polypeptide and the BBM2 polypeptide useful in the methods of the disclosure can be obtained from or derived from any plant including but not limited to monocots, dicots, Angiospermae, and Gymnospermae. Additional Ovule Development Protein 2 (ODP2) sequences and Babyboom (BBM) (BBM, BBM1, BBM2, BBM3, BMN2, and BMN3) sequences useful in the methods of the present disclosure are listed in Table 2.

[0034] As used herein, the term “expression cassette” means a distinct component of vector DNA consisting of coding and non-coding sequences including 5′ and 3′ regulatory sequences that control expression in a transformed/transfected cell.

[0035] As used herein, the term “coding sequence” means the portion of DNA sequence bounded by a start and a stop codon that encodes the amino acids of a protein.

[0036] As used herein, the term “non-coding sequence” means the portions of a DNA sequence that are transcribed to produce a messenger RNA, but that do not encode the amino acids of a protein, such as 5′ untranslated regions, introns and 3′ untranslated regions. Non-coding sequence can also refer to RNA molecules such as micro-RNAs, interfering RNA or RNA hairpins, that when expressed can down-regulate expression of an endogenous gene or another transgene.

[0037] As used herein, the term “regulatory sequence” means a segment of a nucleic acid molecule which is capable of increasing or decreasing the expression of a gene. Regulatory sequences include promoters, terminators, enhancer elements, silencing elements, 5′ UTR and 3′ UTR (untranslated regions).

[0038] As used herein, the term “UBI” or “UBI1” or “UBI PRO” or “UBI1 PRO” or “ZM-UBI PRO” or “ZM-UBI1 PRO” or “ZM-UBI1 PRO Complete” (SEQ ID NO: 339) is made up of the UBI1ZM PRO sequence (SEQ ID NO: 333) and the UBI1ZM 5UTR (SEQ ID NO: 334) and the UBI1ZM INTRON1 (SEQ ID NO: 335).

[0039] As used herein, the term “3×ENH” (SEQ ID NO: 340) is made up of the FMV ENH (SEQ ID NO: 336) and the PCSV ENH (SEQ ID NO: 337) and the MMV ENH (SEQ ID NO: 338).

[0040] As used herein, the term “transfer cassette” means a T-DNA comprising an expression cassette or expression cassettes flanked by the right border and the left border.

[0041] As used herein, “T-DNA” means a portion of a Ti plasmid that is inserted into the genome of a host plant cell.

[0042] As used herein, the term “selectable marker” means a transgene that when expressed in a transformed/transfected cell confers resistance to selective agents such as antibiotics, herbicides and other compounds toxic to an untransformed/untransfected cell.

[0043] As used herein, the term “EAR” means an Ethylene-responsive element binding factor-associated Amphiphilic Repression motif having general consensus sequences that act as transcriptional repression signals within transcription factors. Addition of an EAR-type repressor element to a DNA-binding protein such as a transcription factor, dCAS9, or LEXA (as examples) confers transcriptional repression function to the fusion protein (Kagale, S., and Rozwadowski, K. 2010. Plant Signaling and Behavior 5:691-694).

[0044] In an aspect, the methods of the disclosure comprise contacting a monocot leaf explant with a recombinant expression cassette or construct comprising a nucleotide sequence encoding a functional WUS/WOX polypeptide, or a nucleotide sequence encoding a Babyboom (BBM) polypeptide or an Ovule Development Protein 2 (ODP2) polypeptide, or a combination of a nucleotide sequence encoding a functional WUS/WOX polypeptide and a nucleotide sequence encoding a Babyboom (BBM) polypeptide or an Ovule Development Protein 2 (ODP2) polypeptide to produce a transgenic monocot plant comprising a heterologous polynucleotide.

[0045] In an aspect, a nucleotide sequence encoding a functional WUS/WOX polypeptide, or a nucleotide sequence encoding a Babyboom (BBM) polypeptide or an Ovule Development Protein 2 (ODP2) polypeptide, or the combination of a nucleotide sequence encoding a functional WUS/WOX polypeptide and a nucleotide sequence encoding a Babyboom (BBM) polypeptide or an Ovule Development Protein 2 (ODP2) polypeptide can be targeted for excision by a site-specific recombinase. Thus, the expression of the nucleotide sequence encoding the functional WUS/WOX polypeptide, or the nucleotide sequence encoding a Babyboom (BBM) polypeptide or an Ovule Development Protein 2 (ODP2) polypeptide, or the combination of a nucleotide sequence encoding a functional WUS/WOX polypeptide and a nucleotide sequence encoding a Babyboom (BBM) polypeptide or an Ovule Development Protein 2 (ODP2) polypeptide can be controlled by excision at a desired time post-transformation. It is understood that when a site-specific recombinase is used to control the expression of the nucleotide sequence encoding the functional WUS/WOX polypeptide, or the nucleotide sequence encoding a Babyboom (BBM) polypeptide or an Ovule Development Protein 2 (ODP2) polypeptide, or the combination of a nucleotide sequence encoding a functional WUS/WOX polypeptide and a nucleotide sequence encoding a Babyboom (BBM) polypeptide or an Ovule Development Protein 2 (ODP2) polypeptide, the expression construct comprises appropriate site-specific excision sites flanking the polynucleotide sequences to be excised, e.g., Cre lox sites if Cre recombinase is utilized. It is not necessary that the site-specific recombinase be co-located on the expression construct comprising the nucleotide sequence encoding the functional WUS/WOX polypeptide, or the nucleotide sequence encoding a Babyboom (BBM) polypeptide or an Ovule Development Protein 2 (ODP2) polypeptide, or the combination of a nucleotide sequence encoding a functional WUS/WOX polypeptide and a nucleotide sequence encoding a Babyboom (BBM) polypeptide or an Ovule Development Protein 2 (ODP2) polypeptide. However, in an aspect, the morphogenic gene expression cassette further comprises a nucleotide sequence encoding a site-specific recombinase.

[0046] The site-specific recombinase used to control expression of the nucleotide sequence encoding the functional WUS/WOX polypeptide, or the nucleotide sequence encoding a Babyboom (BBM) polypeptide or an Ovule Development Protein 2 (ODP2) polypeptide, or the combination of a nucleotide sequence encoding a functional WUS/WOX polypeptide and a nucleotide sequence encoding a Babyboom (BBM) polypeptide or an Ovule Development Protein 2 (ODP2) polypeptide can be chosen from a variety of suitable site-specific recombinases. For example, in various aspects, the site-specific recombinase is FLP, FLPe, KD, Cre, SSV1, lambda Int, phi C31 Int, HK022, R, B2 (Nern et al., (2011) PNAS Vol. 108, No. 34 pp 14198-14203), B3 (Nern et al., (2011) PNAS Vol. 108, No. 34 pp 14198-14203), Gin, Tn1721, CinH, ParA, Tn5053, Bxb1, TP907-1, orU153. The site-specific recombinase can be a destabilized fusion polypeptide. The destabilized fusion polypeptide can be TETR(G17A)˜CRE or ESR(G17A)˜CRE.

[0047] In an aspect, the nucleotide sequence encoding a site-specific recombinase is operably linked to a constitutive promoter, an inducible promoter, a tissue-specific promoter, or a developmentally-regulated promoter. Suitable constitutive promoters, inducible promoters, tissue-specific promoters, and developmentally-regulated promoters include UBI, LLDAV, EVCV, DMMV, BSV(AY) PRO, CYMV PRO FL, UBIZM PRO, SI-UB3 PRO, SB-UBI PRO (ALT1), USB1ZM PRO, ZM-GOS2 PRO, ZM-H1B PRO (1.2 KB), IN2-2, NOS, the −135 version of 35S, ZM-ADF PRO (ALT2), AXIG1, DR5, XVE, GLB1, OLE, LTP2 (Kalla et al., 1994. Plant J. 6:849-860 and U.S. Pat. No. 5,525,716 incorporated herein by reference in its entirety), HSP17.7, HSP26, HSP18A, AT-HSP811, AT-HSP81IL, GM-HSP173B, promoters activated by tetracycline, ethametsulfuron or chlorsulfuron, PLTP, PLTP1, PLTP2, PLTP3, SDR, LGL, LEA-14A, or LEA-D34 (United States Patent Application publications 20170121722 and 20180371480 incorporated herein by reference in their entireties).

[0048] In an aspect, the chemically inducible promoter operably linked to the site-specific recombinase is XVE (Zuo et al. (2002) The Plant Journal 30(3):349-359). The chemically-inducible promoter can be repressed by the tetracycline repressor (TETR), the ethametsulfuron repressor (ESR), or the chlorsulfuron repressor (CR), and de-repression occurs upon addition of tetracycline-related or sulfonylurea ligands. The repressor can be TETR and the tetracycline-related ligand is doxycycline or anhydrotetracycline. (Gatz, C., Frohberg, C. and Wendenburg, R. (1992) Stringent repression and homogeneous de-repression by tetracycline of a modified CaMV 35S promoter in intact transgenic tobacco plants, Plant J. 2, 397-404). Alternatively, the repressor can be ESR and the sulfonylurea ligand is ethametsulfuron, chlorsulfuron, metsulfuron-methyl, sulfometuron methyl, chlorimuron ethyl, nicosulfuron, primisulfuron, tribenuron, sulfosulfuron, trifloxysulfuron, foramsulfuron, iodosulfuron, prosulfuron, thifensulfuron, rimsulfuron, mesosulfuron, or halosulfuron (US20110287936 incorporated herein by reference in its entirety). An alternative method for inducible expression is use of the glucocorticoid system in which an encoded glucocorticoid repressor (Ouwerkerk et al. (2001) Planta 213:370-378) is fused to an encoded gene of interest (e.g., a morphogenic protein such as WUS2 or ODP2 protein).

[0049] In an aspect, when the morphogenic gene expression cassette or construct comprises site-specific recombinase excision sites, the nucleotide sequence encoding the functional WUS/WOX polypeptide, or the nucleotide sequence encoding a Babyboom (BBM) polypeptide or an Ovule Development Protein 2 (ODP2) polypeptide, or the combination of a nucleotide sequence encoding a functional WUS/WOX polypeptide and a nucleotide sequence encoding a Babyboom (BBM) polypeptide or an Ovule Development Protein 2 (ODP2) polypeptide can be operably linked to an auxin inducible promoter, a developmentally regulated promoter, a tissue-specific promoter, or a constitutive promoter. Exemplary auxin inducible promoters, developmentally regulated promoters, tissue-specific promoters, and constitutive promoters useful in this context include UBI, LLDAV, EVCV, DMMV, BSV(AY) PRO, CYMV PRO FL, UBIZM PRO, SI-UB3 PRO, SB-UBI PRO (ALT1), USB1ZM PRO, ZM-GOS2 PRO, ZM-H1B PRO (1.2 KB), IN2-2, NOS, the −135 version of 35S, ZM-ADF PRO (ALT2), AXIG1 (U.S. Pat. No. 6,838,593 incorporated herein by reference in its entirety), DR5, XVE, GLB1, OLE, LTP2, HSP17.7, HSP26, HSP18A, AT-HSP811 (Takahashi, T, et al., (1992) Plant Physiol. 99 (2): 383-390), AT-HSP811L (Takahashi, T, et al., (1992) Plant Physiol. 99 (2): 383-390), GM-HSP173B (Schöffl, F., et al. (1984) EMBO J. 3(11): 2491-2497), promoters activated by tetracycline, ethamethsulfuron or chlorsulfuron, PLTP, PLTP1, PLTP2, PLTP3, SDR, LGL, LEA-14A, LEA-D34 (United States Patent Application publications 20170121722 and 20180371480 incorporated herein by reference in their entireties), and any of the promoters disclosed herein.

[0050] When using a morphogenic gene cassette and a trait gene cassette (heterologous polynucleotide) to produce transgenic plants it is desirable to have the ability to segregate the morphogenic gene locus away from the trait gene (heterologous polynucleotide) locus in co-transformed plants to provide transgenic plants containing only the trait gene (heterologous polynucleotide). This can be accomplished using an Agrobacterium tumefaciens two T-DNA binary system, with two variations on this general theme (see Miller et al., 2002). For example, in the first, a two T-DNA vector, where expression cassettes for morphogenic genes and herbicide selection (i.e. HRA) are contained within a first T-DNA and the trait gene cassette (heterologous polynucleotide) is contained within a second T-DNA, where both T-DNA's reside on a single binary vector. When a plant cell is transformed by an Agrobacterium containing the two T-DNA plasmid a high percentage of transformed cells contain both T-DNA's that have integrated into different genomic locations (for example, onto different chromosomes). In the second method, for example, two Agrobacterium strains, each containing one of the two T-DNA's (either the morphogenic gene T-DNA or the trait gene (heterologous polynucleotide) T-DNA), are mixed together in a ratio, and the mixture is used for transformation. After transformation using this mixed Agrobacterium method, it is observed at a high frequency that recovered transgenic events contain both T-DNA's, often at separate genomic locations. For both co-transformation methods, it is observed that in a large proportion of the produced transgenic events, the two T-DNA loci segregate independently and progeny T1 plants can be readily identified in which the T-DNA loci have segregated away from each other, resulting in the recovery of progeny seed that contain the trait genes (heterologous polynucleotides) with no morphogenic genes/herbicide genes. See, Miller et al. Transgenic Res 11(4):381-96.

[0051] The methods provided herein rely upon the use of bacteria-mediated and/or biolistic-mediated gene transfer, in addition to eletroporation, PEG transfection, or RNP (ribonucleoprotein) delivery to produce regenerable plant cells having an incorporated nucleotide sequence of interest. Bacterial strains useful in the methods of the disclosure include, but are not limited to, a disarmed Agrobacterium, an Ochrobactrum bacteria or a Rhizobiaceae bacteria. Disarmed Agrobacteria useful in the present methods include, but are not limited to, AGL-1, EHA105, GV3101, LBA4404, LBA4404 THY− (see U.S. Pat. No. 8,334,429 incorporated herein by reference in its entirety) and LBA4404 TD THY− in which both copies of the Tn904 transposon removed have been removed from LBA4404 THY− (see PCT/US20/24993 filed Mar. 26, 2020 which claims the benefit of U.S. Provisional Patent Application No. 62/825,054 filed on Mar. 28, 2019, all of which is hereby incorporated herein in its entirety by reference). Agrobacterium strain LBA4404 TD THY− is A. tumefaciens LBA4404 THY− strain deposited with the ATCC, assigned Accession Number PTA-10531 wherein a functional Tn904 transposon is not present or both copies of the Tn904 transposon have been deleted. Ochrobactrum bacterial strains useful in the present methods include, but are not limited to, those disclosed in U.S. Pat. Pub. No. US20180216123 incorporated herein by reference in its entirety. Rhizobiaceae bacterial strains useful in the present methods include, but are not limited to, those disclosed in U.S. Pat. No. 9,365,859 incorporated herein by reference in its entirety.

[0052] Also embodied is a plant with the described expression cassette stably incorporated into the genome of the plant, a seed of the plant, wherein the seed comprises the expression cassette. Further embodied is a plant wherein a gene or gene product of a heterologous polynucleotide or a polynucleotide of interest that confers a nutritional enhancement, increased yield, abiotic stress tolerance, drought tolerance, cold tolerance, herbicide tolerance, pest resistance, pathogen resistance, insect resistance, nitrogen use efficiency (NUE), disease resistance, or an ability to alter a metabolic pathway. A plant wherein expression of a heterologous polynucleotide or a polynucleotide of interest alters the phenotype of said plant is also embodied.

[0053] The disclosure encompasses isolated or substantially purified nucleic acid compositions. An “isolated” or “purified” nucleic acid molecule or biologically active portion thereof is substantially free of other cellular material or culture medium when produced by recombinant techniques or substantially free of chemical precursors or other chemicals when chemically synthesized. An “isolated” nucleic acid is substantially free of sequences (including protein encoding sequences) that naturally flank the nucleic acid (i.e., sequences located at the 5′ and 3′ ends of the nucleic acid) in the genomic DNA of the organism from which the nucleic acid is derived. For example, in various aspects, the isolated nucleic acid molecule can contain less than about 5 kb, 4 kb, 3 kb, 2 kb, 1 kb, 0.5 kb or 0.1 kb of nucleotide sequences that naturally flank the nucleic acid molecule in genomic DNA of the cell from which the nucleic acid is derived.

[0054] As used herein, the term “fragment” refers to a portion of the nucleic acid sequence. Fragments of sequences useful in the methods of the present disclosure retain the biological activity of the nucleic acid sequence. Alternatively, fragments of a nucleotide sequence that are useful as hybridization probes may not necessarily retain biological activity. Fragments of a nucleotide sequence disclosed herein may range from at least about 20, 25, 50, 75, 100, 125, 150, 175, 200, 225, 250, 275, 300, 325, 350, 375, 400, 425, 450, 475, 500, 525, 550, 575, 600, 625, 650, 675, 700, 725, 750, 775, 800, 825, 850, 875, 900, 925, 950, 975, 1000, 1025, 1050, 1075, 1100, 1125, 1150, 1175, 1200, 1225, 1250, 1275, 1300, 1325, 1350, 1375, 1400, 1425, 1450, 1475, 1500, 1525, 1550, 1575, 1600, 1625, 1650, 1675, 1700, 1725, 1750, 1775, 1800, 1825, 1850, 1875, or 1900 nucleotides, and up to the full length of the subject sequence. A biologically active portion of a nucleotide sequence can be prepared by isolating a portion of the sequence and assessing the activity of the portion.

[0055] Fragments and variants of nucleotide sequences and the proteins encoded thereby useful in the methods of the present disclosure are also encompassed. As used herein, the term “fragment” refers to a portion of a nucleotide sequence and hence the protein encoded thereby or a portion of an amino acid sequence. Fragments of a nucleotide sequence may encode protein fragments that retain the biological activity of the native protein. Alternatively, fragments of a nucleotide sequence useful as hybridization probes generally do not encode fragment proteins retaining biological activity. Thus, fragments of a nucleotide sequence may range from at least about 20 nucleotides, about 50 nucleotides, about 100 nucleotides, and up to the full-length nucleotide sequence encoding the proteins useful in the methods of the present disclosure.

[0056] As used herein, the term “variants” is means sequences having substantial similarity with a promoter sequence disclosed herein. A variant comprises a deletion and/or addition of one or more nucleotides at one or more internal sites within the native polynucleotide and/or a substitution of one or more nucleotides at one or more sites in the native polynucleotide. As used herein, a “native” nucleotide sequence comprises a naturally occurring nucleotide sequence. For nucleotide sequences, naturally occurring variants can be identified with the use of well-known molecular biology techniques, such as, for example, with polymerase chain reaction (PCR) and hybridization techniques as outlined herein.

[0057] Variant nucleotide sequences also include synthetically derived nucleotide sequences, such as those generated, for example, by using site-directed mutagenesis. Generally, variants of a nucleotide sequence disclosed herein will have at least 40%, 50%, 60%, 65%, 70%, 75%, 80%, 85%, 90%, 91%, 92%, 93%, 94%, to 95%, 96%, 97%, 98%, 99% r more sequence identity to that nucleotide sequence as determined by sequence alignment programs described elsewhere herein using default parameters. Biologically active variants of a nucleotide sequence disclosed herein are also encompassed. Biological activity may be measured by using techniques such as Northern blot analysis, reporter activity measurements taken from transcriptional fusions, and the like. See, for example, Sambrook, et al., (1989) Molecular Cloning: A Laboratory Manual (2d ed., Cold Spring Harbor Laboratory Press, Cold Spring Harbor, N.Y.), hereinafter “Sambrook,” herein incorporated by reference in its entirety. Alternatively, levels of a reporter gene such as green fluorescent protein (GFP) or yellow fluorescent protein (YFP) or the like produced under the control of a promoter operably linked to a nucleotide fragment or variant can be measured. See, for example, Matz et al. (1999) Nature Biotechnology 17:969-973; U.S. Pat. No. 6,072,050, herein incorporated by reference in its entirety; Nagai, et al., (2002) Nature Biotechnology 20(1):87-90. Variant nucleotide sequences also encompass sequences derived from a mutagenic and recombinogenic procedure such as DNA shuffling. With such a procedure, one or more different nucleotide sequences can be manipulated to create a new nucleotide sequence. In this manner, libraries of recombinant polynucleotides are generated from a population of related sequence polynucleotides comprising sequence regions that have substantial sequence identity and can be homologously recombined in vitro or in vivo. Strategies for such DNA shuffling are known in the art. See, for example, Stemmer, (1994) Proc. Natl. Acad. Sci. USA 91:10747-10751; Stemmer, (1994) Nature 370:389 391; Crameri, et al., (1997) Nature Biotech. 15:436-438; Moore, et al., (1997) J. Mol. Biol. 272:336-347; Zhang, et al., (1997) Proc. Natl. Acad. Sci. USA 94:4504-4509; Crameri, et al., (1998) Nature 391:288-291 and U.S. Pat. Nos. 5,605,793 and 5,837,458, herein incorporated by reference in their entirety.

[0058] Methods for mutagenesis and nucleotide sequence alterations are well known in the art. See, for example, Kunkel, (1985) Proc. Natl. Acad. Sci. USA 82:488-492; Kunkel, et al., (1987) Methods in Enzymol. 154:367-382; U.S. Pat. No. 4,873,192; Walker and Gaastra, eds. (1983) Techniques in Molecular Biology (MacMillan Publishing Company, New York) and the references cited therein, herein incorporated by reference in their entirety. Guidance as to appropriate amino acid substitutions that do not affect biological activity of the protein of interest may be found in the model of Dayhoff et al. (1978) Atlas of Protein Sequence and Structure (Natl. Biomed. Res. Found., Washington, D.C.), herein incorporated by reference. Conservative substitutions, such as exchanging one amino acid with another having similar properties, may be optimal.

[0059] The nucleotide sequences of the present disclosure can be used to isolate corresponding sequences from other organisms, particularly other plants, more particularly other monocots or dicots. In this manner, methods such as PCR, hybridization and the like can be used to identify such sequences based on their sequence homology to the sequences set forth herein. Sequences isolated based on their sequence identity to the entire sequences set forth herein or to fragments thereof are encompassed by the present disclosure.

[0060] In a PCR approach, oligonucleotide primers can be designed for use in PCR reactions to amplify corresponding DNA sequences from cDNA or genomic DNA extracted from any plant of interest. Methods for designing PCR primers and PCR cloning are generally known in the art and are disclosed in, Sambrook, supra. See also, Innis, et al., eds. (1990) PCR Protocols: A Guide to Methods and Applications (Academic Press, New York); Innis and Gelfand, eds. (1995) PCR Strategies (Academic Press, New York); and Innis and Gelfand, eds. (1999) PCR Methods Manual (Academic Press, New York), herein incorporated by reference in their entirety. Known methods of PCR include, but are not limited to, methods using paired primers, nested primers, single specific primers, degenerate primers, gene-specific primers, vector-specific primers, partially-mismatched primers and the like.

[0061] In hybridization techniques, all or part of a known nucleotide sequence is used as a probe that selectively hybridizes to other corresponding nucleotide sequences present in a population of cloned genomic DNA fragments or cDNA fragments (i.e., genomic or cDNA libraries) from a chosen organism. The hybridization probes may be genomic DNA fragments, cDNA fragments, RNA fragments, or other oligonucleotides and may be labeled with a detectable group such as 32P or any other detectable marker. Thus, for example, probes for hybridization can be made by labeling synthetic oligonucleotides based on the sequences of the present disclosure. Methods for preparation of probes for hybridization and for construction of genomic libraries are generally known in the art and are disclosed in Sambrook, supra.

[0062] In general, sequences that have activity and hybridize to the sequences disclosed herein will be at least 40% to 50% homologous, about 60%, 70%, 80%, 85%, 90%, 95% to 98% homologous or more with the disclosed sequences. That is, the sequence similarity of sequences may range, sharing at least about 40% to 50%, about 60% to 70%, and about 80%, 85%, 90%, 95% to 98% sequence similarity.

[0063] Methods of alignment of sequences for comparison are well known in the art. Thus, the determination of percent sequence identity between any two sequences can be accomplished using a mathematical algorithm. Non-limiting examples of such mathematical algorithms are the algorithm of Myers and Miller, (1988) CABIOS 4:11-17; the algorithm of Smith, et al., (1981) Adv. Appl. Math. 2:482; the algorithm of Needleman and Wunsch, (1970) J. Mol. Biol. 48:443-453; the algorithm of Pearson and Lipman, (1988) Proc. Natl. Acad. Sci. 85:2444-2448; the algorithm of Karlin and Altschul, (1990) Proc. Natl. Acad. Sci. USA 872:264, modified as in Karlin and Altschul, (1993) Proc. Natl. Acad. Sci. USA 90:5873-5877, herein incorporated by reference in their entirety. Computer implementations of these mathematical algorithms are well known in the art and can be utilized for comparison of sequences to determine sequence identity.

[0064] As used herein, “sequence identity” or “identity” in the context of two nucleic acid or polypeptide sequences refers to the residues in the two sequences that are the same when aligned for maximum correspondence over a specified comparison window. When percentage of sequence identity is used in reference to proteins it is recognized that residue positions which are not identical often differ by conservative amino acid substitutions, where amino acid residues are substituted for other amino acid residues with similar chemical properties (e.g., charge or hydrophobicity) and therefore do not change the functional properties of the molecule. When sequences differ in conservative substitutions, the percent sequence identity may be adjusted upwards to correct for the conservative nature of the substitution. Sequences that differ by such conservative substitutions are said to have “sequence similarity” or “similarity”. Means for making this adjustment are well known to those of skill in the art. Typically, this involves scoring a conservative substitution as a partial rather than a full mismatch, thereby increasing the percentage sequence identity. Thus, for example, where an identical amino acid is given a score of one and a non-conservative substitution is given a score of zero, a conservative substitution is given a score between zero and one. The scoring of conservative substitutions is calculated, e.g., as implemented in the program PC/GENE (Intelligenetics, Mountain View, Calif.).

[0065] As used herein, “percentage of sequence identity” means the value determined by comparing two optimally aligned sequences over a comparison window, wherein the portion of the polynucleotide sequence in the comparison window may comprise additions or deletions (i.e., gaps) as compared to the reference sequence (which does not comprise additions or deletions) for optimal alignment of the two sequences. The percentage is calculated by determining the number of positions at which the identical nucleic acid base or amino acid residue occurs in both sequences to yield the number of matched positions, dividing the number of matched positions by the total number of positions in the window of comparison, and multiplying the result by 100 to yield the percentage of sequence identity.

[0066] The term “substantial identity” of polynucleotide sequences means that a polynucleotide comprises a sequence that has at least 70% sequence identity, optimally at least 80%, more optimally at least 90% and most optimally at least 95%, compared to a reference sequence using an alignment program using standard parameters. One of skill in the art will recognize that these values can be appropriately adjusted to determine corresponding identity of proteins encoded by two nucleotide sequences by considering codon degeneracy, amino acid similarity, reading frame positioning and the like. Substantial identity of amino acid sequences for these purposes normally means sequence identity of at least 60%, 70%, 80%, 90% and at least 95%.

[0067] Another indication that nucleotide sequences are substantially identical is if two molecules hybridize to each other under stringent conditions. Generally, stringent conditions are selected to be about 5° C. lower than the Tm for the specific sequence at a defined ionic strength and pH. However, stringent conditions encompass temperatures in the range of about 1° C. to about 20° C. lower than the Tm, depending upon the desired degree of stringency as otherwise qualified herein. Nucleic acids that do not hybridize to each other under stringent conditions are still substantially identical if the polypeptides they encode are substantially identical. This may occur, e.g., when a copy of a nucleic acid is created using the maximum codon degeneracy permitted by the genetic code. One indication that two nucleic acid sequences are substantially identical is when the polypeptide encoded by the first nucleic acid is immunologically cross reactive with the polypeptide encoded by the second nucleic acid.

[0068] The methods, sequences, and genes disclosed herein are useful for genetic engineering of plants, e.g. to produce a transformed or transgenic plant, to express a phenotype of interest. As used herein, the terms “transformed plant” and “transgenic plant” refer to a plant that comprises within its genome a heterologous polynucleotide. Generally, the heterologous polynucleotide is stably integrated within the genome of a transgenic or transformed plant such that the polynucleotide is passed on to successive generations. The heterologous polynucleotide may be integrated into the genome alone or as part of a recombinant DNA construct. It is to be understood that as used herein the term “transgenic” includes any cell, cell line, callus, tissue, plant part or plant the genotype of which has been altered by the presence of a heterologous nucleic acid including those transgenics initially so altered as well as those created by sexual crosses or asexual propagation from the initial transgenic.

[0069] A transgenic “event” is produced by transformation of plant cells with a heterologous DNA construct, including a nucleic acid expression cassette that comprises a gene of interest, the regeneration of a population of plants resulting from the insertion of the transferred gene into the genome of the plant and selection of a plant characterized by insertion into a particular genome location. An event is characterized phenotypically by the expression of the inserted gene. At the genetic level, an event is part of the genetic makeup of a plant. The term “event” also refers to progeny produced by a sexual cross between the transformant and another plant wherein the progeny include the heterologous DNA.

[0070] The term “plant” refers to whole plants, plant organs (e.g., leaves, stems, roots, etc.), plant tissues, plant cells, plant parts, seeds, propagules, embryos, and progeny of the same. Plant cells can be differentiated or undifferentiated (e.g. callus, undifferentiated callus, immature and mature embryos, immature zygotic embryo, immature cotyledon, embryonic axis, suspension culture cells, protoplasts, leaf, leaf cells, root cells, phloem cells and pollen). Plant cells include, without limitation, cells from seeds, suspension cultures, explants, immature embryos, embryos, zygotic embryos, somatic embryos, embryogenic callus, meristem, somatic meristems, meristematic regions, organogenic callus, callus tissue, protoplasts, embryos derived from mature ear-derived seed, leaves, leaf bases, leaves from mature plants, leaf tips, immature inflorescences, tassel, immature ear, silks, cotyledons, immature cotyledons, embryonic axes, cells from leaves, cells from stems, cells from roots, cells from shoots, roots, shoots, gametophytes, sporophytes, pollen, microspores, multicellular structures (MCS), regenerable plant structures (RPS), and embryo-like structures.

[0071] Plant parts include differentiated and undifferentiated tissues including, but not limited to the following: roots, stems, shoots, leaves, pollen, seeds, tumor tissue and various forms of cells and culture (e.g., single cells, protoplasts, embryos and callus tissue). The plant tissue may be in a plant or in a plant organ, tissue or cell culture.

[0072] Grain is intended to mean the mature seed produced by commercial growers for purposes other than growing or reproducing the species. Progeny, variants and mutants of the regenerated plants are also included within the scope of the disclosure, provided these progeny, variants and mutants comprise the introduced polynucleotides.

[0073] The present disclosure also includes plants obtained by any of the methods disclosed herein. The present disclosure also includes seeds from a plant obtained by any of the methods disclosed herein.

[0074] In a further aspect, the leaf explant used in the disclosed methods can be derived from any plant, including higher plants of the Angiospermae class. Plants of the subclasses of the Monocotyledonae are suitable. Suitable species may come from the family Alliaceae, Alstroemeriaceae, Amaryllidaceae, Arecaceae, Bromeliaceae, Colchicaceae, Dioscoreaceae, Melanthiaceae, Musaceae, and Poaceae.

[0075] Suitable species from which the leaf explant used in the disclosed methods can be derived include members of the genus, Allium, Alstroemeria, Ananas, Andropogon, Arundo, Colchicum, Cynodon, Dioscorea, Elaeis, Erianthus, Festuca, Galanthus, Hordeum, Lolium, Miscanthus, Musa, Oryza, Panicum, Pennisetum, Phalaris, Phleum, Poa, Saccharum, Secale, Sorghum, Spartina, Triticosecale, Triticum, Uniola, Veratrum, and Zea.

[0076] In a further aspect, the leaf explant used in the disclosed methods can be derived from a plant that is important or interesting for agriculture, horticulture, biomass for the production of liquid fuel molecules and other chemicals, and/or forestry. Non-limiting examples include, for instance, Panicum virgatum (switchgrass), Sorghum bicolor (sorghum, sudangrass), Miscanthus giganteus (miscanthus), Saccharum sp. (energycane), Zea mays (corn), Triticum aestivum (wheat), Oryza sativa (rice), Pennisetum glaucum (pearl millet), Panicum spp., Sorghum spp., Miscanthus spp., Saccharum spp., Erianthus spp., Andropogon gerardii (big bluestem), Pennisetum purpureum (elephant grass), Phalaris arundinacea (reed canarygrass), Cynodon dactylon (bermudagrass), Festuca arundinacea (tall fescue), Spartina pectinata (prairie cord-grass), Arundo donax (giant reed), Secale cereale (rye), Triticosecale spp. (triticum-wheat X rye), Bamboo, Elaeis guineensis (palm), Musa paradisiaca (banana), Ananas comosus (pineapple), Allium cepa (onion), Colchicum autumnale, Veratrum californica., Dioscorea spp., Galanthus wornorii, Alstroemeria spp., Uniola paniculata (oats), bentgrass (Agrostis spp.), Hordeum vulgare (barley), Poa pratensis (bluegrass), Lolium spp. (ryegrass), and Phleumpratense (timothy). Of interest are plants grown for energy production, so called energy crops, such as cellulose-based energy crops like Panicum virgatum (switchgrass), Sorghum bicolor (sorghum, sudangrass), Miscanthus giganteus (miscanthus), Saccharum sp. (energycane), Andropogon gerardii (big bluestem), Pennisetum purpureum (elephant grass), Phalaris arundinacea (reed canarygrass), Cynodon dactylon (bermudagrass), Festuca arundinacea (tall fescue), Spartina pectinata (prairie cord-grass), Arundo donax (giant reed), Secale cereale (rye), Triticosecale spp. (triticum—wheat X rye), and Bamboo; and starch-based energy crops like Zea mays (corn); and sucrose-based energy crops like Saccharum sp. (sugarcane); and biodiesel-producing energy crops like Elaeis guineensis (palm).

[0077] In a further aspect, the leaf explant used in the disclosed methods can be derived from any plant found within the monocot families listed in Table 1 along with representative genera and/or species.

TABLE 1

| Family Names | Order | Representative Genera/Species |
|---|---|---|
| Agavaceae | Asparagales | Agave: A. cantala (Maguey, fiber crop); Yucca |
| Alliaceae | Asparagales | Thirteen genera e.g. Allium: A. cepa (Onion, |
| | | spice crop); Ipheion, Leucocoryne, Tulbaghia |
| Amaryllidaceae | Asparagales | Fifty-nine genera e.g. Amaryllis: A. |
| | | belladona (Belladona lily, ornamental |
| | | crop); Crinum, Galanthus, Hippeastrum, Leucojum, |
| | | Lycoris, Narcissus |
| Araceae | Alismatales | Over one hundred genera e.g. Colocasia: C. |
| | | esculenta (Taro or Gabi), Alocasia, Xanthosoma |
| | | (food crops, root and tuber crops), Aglaonema, |
| | | Anthurium, Caladium, Dieffenbachia, Monstera, |
| | | Philodendron, Spathiphylum, Syngonium, |
| | | Syngonium, Zantedeschia (ornamental crops), |
| | | Lemna, Pistia, Wolfia |
| Arecaceae or | Arecales | Areca: A. catechu (Betel |
| Palmae | | nut); Arenga, Cocos, Elaeis, Metroxylon, |
| | | Phoenix, Washingtonia, Lodoicea |
| | | maldivica (biggest seed), Rhapia spp. (largest |
| | | leaves), Calamus (rattan) |
| Asparagaceae | Asparagales | Asparagus: A. officinalis (Vegetable Asparagus) |
| Asphodelaceae | Asparagales | Fifteen genera e.g. Aloe: A. vera (Aloe or |
| | | sabila); Asphodelus, Bulbine, Gasteria, Haworthia, |
| | | Kniphofia |
| Bromeliaceae | Poales | Ananas: A. comosus (Pineapple, fruit and fiber |
| | | crop); Aechmea, Neoregalia, Puya, Tillandsia |
| Cannaceae | Zingiberales | One genus i.e, Canna: Canna spp. |
| Colchicaceae | Liliales | Colchicum: C. autumnale (Autumn |
| | | Crocus); Burchardia |
| Commelinaceae | Commelinales | Commelina: C. diffusa (Climbing |
| | | dayflower); Rhoeo, Cyanotis, Tradescantia, |
| | | Zebrina |
| Costaceae | Zingiberales | Costus: C. speciosus (Common spiral ginger) |
| Cyclanthacea | Pandanales | Carludovica palmata (fiber) |
| Cyperaceae | Poales | One hundred four genera e.g. Cyperus: C. |
| | | alternifolius, Carex, Eleocharis, Scirpus |
| Dioscoreaceae | Dioscoreales | Four genera e.g. Dioscorea: D. alata (Yam, |
| | | tuber crop); Stenomeris, Tacca, Trichopus |
| Eriocaulaceae | Poales | Ten genera e.g. Eriocaulon (pipewort), |
| | | Leiothrix, Paepalanthus, Syngonanthus |
| Heliconiaceae | Zingiberales | Heliconia: H. humilis (ornamental crop) |
| Iridaceae | Asparagales | Seventy genera e.g. Iris: I. |
| | | reticulata (Reticulated Iris, ornamental |
| | | crop); Crocus, Dietes, Freesia, Gladiolus |
| Juncaceae | Poales | Seven genera e.g. Juncus: J. effusus (Soft |
| | | rush); Distichia |
| Liliaceae | Liliales | Sixteen generae.g. Lilium: L. longiflorum (White |
| | | Trumpet Lily, ornamental |
| | | crop); Tulipa, Calochortus, Erythronium, |
| | | Fritillaria, Medeola |
| Marantaceae | Zingiberales | Maranta: M. arundinacea (Arrow root, root |
| | | crop); Calathea, Thalia |
| Musaceae | Zingiberales | Three genera e.g. Musa: Musa spp. (Banana, |
| | | fruit crop; Abaca, fiber crop); Ensete, Musella |
| Orchidaceae | Asparagales | Seven to eight hundred genera |
| | | e.g. Cattleya, Cymbidium, Dendrobium, |
| | | Phalaenopsis, Vanda: V. sanderiana (waling-waling |
| | | orchid, ornamental crop), Vanilla |
| Pandanaceae | Pandanales | Three genera e.g. Pandanus: P. tectorius (Screw |
| | | Pine, fiber crop); Freycinetia |
| Poaceae or | Poales | Six hundred sixty-eight genera e.g. Avena, |
| Gramineae | | Hordeum, Sorghum, Oryza, Triticum, Zea |
| | | (cereals); Bambusa, Dendrocalamus (bamboos); |
| | | Saccharum: S. officinarum (sugarcane); |
| | | Cymbopogon (lemon grass, spice, essential-oil); |
| | | Brachiaria, Cynodon, Panicum, Pennisetum |
| | | (forage crops); Axonopus, Paspalum, Zoysia |
| | | (turfgrasses) |
| Pontederiaceae | Commelinales | Pontederia: P. cordata (Pickerel |
| | | weed); Eichhornia, Heteranthera, Monochoria |
| Smilacaceae | Liliales | Smilax: S. bracteata (Sarsaparilla) |
| Strelitziaceae | Zingiberales | Three genera e.g. Strelitzia: S. reginae (Bird of |
| | | Paradise, ornamental |
| | | crop); Phenakospermum, Ravanela |
| Typhaceae | Poales | One genus: Typha: T. angustifolia (Cattail, |
| | | aquatic ornamental crop and food crop) |
| Xyridaceae | Poales | Five genera e.g. Xyris: X. pauciflora (grass-like |
| | | weed), Abolboda, Achlyphila, Aratitiyopea, |
| | | Orectanth |
| Zingiberaceae | Zingiberales | Zingiber: Z. officinalis (Ginger, spice |
| | | crop), Alpinia, Curcuma, Elettaria, Hedychium |
| Zosteraceae | Alismatales | Zostera marina (eelgrass), Phyllospadix |
| | | serrulatus (surfgrass) |

[0078] In yet a further aspect, leaf explants from the Poaceae family, including leaf explants from the sub-families Chloridoideae, Danthonioideae, Micrairoideae, Arundinoideae, Panicoideae, Anistidoideae. Oryzoideae, Bambusoideae, Pooideae, Puelioideae, Pharoideae, and Anomochlooideae are useful in the methods of the present disclosure. Poaceae (also refered to historically as the Gramineae) is a large family of monocotyledonous flowering plants known as grasses. It includes the cereal grasses, bamboos and the grasses of natural grassland and species cultivated in lawns and pasture. Examples of species within the Poaceae useful in the methods of the present disclosure include, but are not limited to bamboo (Phyllostachys edulis), barley (Hordeum vulgare), bentgrass (Agrostis sp.), creeping bent (Agrostis stolonifera), bluegrass (Poa sp.), fescue (Festuca sp.), green bristlegrass (Setaria viridis), reed canarygrass (Phalaris arundinacea), guinea grass (Megathyrsus maximus), golden bamboo (Phyllostachys aurea), elephant grass (Arundo donax), desert grass (Stipagrostis plumosa), inland sea oats (Chasmanthium latifolium), silver grass (Miscanthus sinensis), foxtail millet (Setaria italica), finger millet (Eleusine coracana), little millet (Panicum sumatrance), kodo millet (Paspalum scrobiculatum), barnyard millet (Echinochloa frumentacea) and proso millet (Panicum miliaceum), orchard grass (Dactylis glomerata), switchgrass (Panicum virgatum), pearl millet (Pennisetum glaucum), purple false brome (Brachypodium distachyon), rice (Oryza sativa; both Japonica and Indica varieties), rye (Secale cereale), ryegrass (Lolium perenne), sorghum (Sorghum bicolor), Saint Augustine grass (Stenotaphrum secundatum), sugarcane (Saccharum officinarum), teff (Eragrostis tef), fonio (Digitaria exilis), timothy (Phleum pratense), triticale (Triticosecale sp.), wheat (Triticum aestivum), durum wheat (Triticum durum), emmer wheat (Triticum dicoccum), einkorn wheat (Triticum monococcum), spelt wheat (Triticum spelta), goatgrass (Aegilops spp), wheatgrass (Agropyron cristatum), oats (Avena sativa), corn (Zea mays), teosinte (Zea mays spp. mexicana or spp. parviglumis), and perennial teosinte (Zea diploperennis).

[0079] In specific aspects, leaf explants useful in the methods of the present disclosure include, but are not limited to leaf explants of bamboo (Phyllostachys edulis), barley (Hordeum vulgare), bentgrass (Agrostis sp.), creeping bent (Agrostis stolonifera), bluegrass (Poa sp.), fescue (Festuca sp.), green bristlegrass (Setaria viridis), reed canarygrass (Phalaris arundinacea), guinea grass (Megathyrsus maximus), golden bamboo (Phyllostachys aurea), elephant grass (Arundo donax), desert grass (Stipagrostis plumosa), inland sea oats (Chasmanthium latifolium), silver grass (Miscanthus sinensis), foxtail millet (Setaria italica), finger millet (Eleusine coracana), little millet (Panicum sumatrance), kodo millet (Paspalum scrobiculatum), barnyard millet (Echinochloa frumentacea) and proso millet (Panicum miliaceum), orchard grass (Dactylis glomerata), switchgrass (Panicum virgatum), pearl millet (Pennisetum glaucum), purple false brome (Brachypodium distachyon), rice (Oryza sativa; both Japonica and Indica varieties), rye (Secale cereale), ryegrass (Lolium perenne), sorghum (Sorghum bicolor), Saint Augustine grass (Stenotaphrum secundatum), sugarcane (Saccharum officinarum), teff (Eragrostis tef), fonio (Digitaria exilis), timothy (Phleum pratense), triticale (Triticosecale sp.), wheat (Triticum aestivum), durum wheat (Triticum durum), emmer wheat (Triticum dicoccum), einkorn wheat (Triticum monococcum), spelt wheat (Triticum spelta), goatgrass (Aegilops spp), wheatgrass (Agropyron cristatum), oats (Avena sativa), corn (Zea mays), teosinte (Zea mays spp. mexicana or spp. parviglumis), and perennial teosinte (Zea diploperennis).

[0080] Heterologous coding sequences, heterologous polynucleotides, and polynucleotides of interest may be used in the methods of the disclosure for varying the phenotype of a plant. Various changes in phenotype are of interest including modifying expression of a gene in a plant, altering a plant's pathogen or insect defense mechanism, increasing a plant's tolerance to herbicides, altering plant development to respond to environmental stress, modulating the plant's response to salt, temperature (hot and cold), drought and the like. These results can be achieved by the expression of a heterologous nucleotide sequence of interest comprising an appropriate gene product. In specific aspects, the heterologous nucleotide sequence of interest is an endogenous plant sequence whose expression level is increased in the plant or plant part. Results can be achieved by providing for altered expression of one or more endogenous gene products, particularly hormones, receptors, signaling molecules, enzymes, transporters or cofactors or by affecting nutrient uptake in the plant. These changes result in a change in phenotype of the transformed plant.

[0081] General categories of heterologous polynucleotides or nucleotide sequences of interest for use in the methods of the present disclosure include, for example, those genes involved in information, such as zinc fingers, those involved in communication, such as kinases and those involved in housekeeping, such as heat shock proteins. More specific categories of transgenes (heterologous polynucleotides or nucleotide sequences of interest), for example, include genes encoding important traits for agronomics, insect resistance, disease resistance, herbicide resistance, environmental stress resistance (altered tolerance to cold, salt, drought, etc.) and grain characteristics. Still other categories of transgenes include genes for inducing expression of exogenous products such as enzymes, cofactors, and hormones from plants and other eukaryotes as well as prokaryotic organisms. It is recognized that any gene or polynucleotide of interest can be operably linked to a promoter and expressed in a plant using the methods disclosed herein.

[0082] Many agronomic traits can affect “yield”, including without limitation, plant height, pod number, pod position on the plant, number of internodes, incidence of pod shatter, grain size, efficiency of nodulation and nitrogen fixation, efficiency of nutrient assimilation, resistance to biotic and abiotic stress, carbon assimilation, plant architecture, resistance to lodging, percent seed germination, seedling vigor, and juvenile traits. Other traits that can affect yield include, efficiency of germination (including germination in stressed conditions), growth rate (including growth rate in stressed conditions), ear number, seed number per ear, seed size, composition of seed (starch, oil, protein) and characteristics of seed fill. Also of interest is the generation of transgenic plants that demonstrate desirable phenotypic properties that may or may not confer an increase in overall plant yield. Such properties include enhanced plant morphology, plant physiology or improved components of the mature seed harvested from the transgenic plant.

[0083] “Increased yield” of a transgenic plant of the present disclosure may be evidenced and measured in a number of ways, including test weight, seed number per plant, seed weight, seed number per unit area (i.e. seeds, or weight of seeds, per acre), bushels per acre, tons per acre, kilo per hectare. For example, maize yield may be measured as production of shelled corn kernels per unit of production area, e.g. in bushels per acre or metric tons per hectare, often reported on a moisture adjusted basis, e.g., at 15.5% moisture. Increased yield may result from improved utilization of key biochemical compounds, such as nitrogen, phosphorous and carbohydrate, or from improved tolerance to environmental stresses, such as cold, heat, drought, salt, and attack by pests or pathogens. Trait-enhancing recombinant DNA may also be used to provide transgenic plants having improved growth and development, and ultimately increased yield, as the result of modified expression of plant growth regulators or modification of cell cycle or photosynthesis pathways.

[0084] An “enhanced trait” as used herein describing the aspects of the present disclosure includes improved or enhanced water use efficiency or drought tolerance, osmotic stress tolerance, high salinity stress tolerance, heat stress tolerance, enhanced cold tolerance, including cold germination tolerance, increased yield, improved seed quality, enhanced nitrogen use efficiency, early plant growth and development, late plant growth and development, enhanced seed protein, and enhanced seed oil production.

[0085] Multiple genes of interest (heterologous polynucleotides or nucleotide sequences of interest) can be used in the methods of the disclosure and expressed in a plant, for example insect resistance traits herbicide resistance, fungal resistance, virus resistance, stress tolerance, disease resistance, male sterility, stalk strength, and the like) or output traits (e.g., increased yield, modified starches, improved oil profile, balanced amino acids, high lysine or methionine, increased digestibility, improved fiber quality, drought resistance, nutritional enhancement, and the like).

[0086] Such genes (heterologous polynucleotides or nucleotide sequences of interest) include, for example, Bacillus thuringiensis toxic protein genes, U.S. Pat. Nos. 5,366,892; 5,747,450; 5,736,514; 5,723,756; 5,593,881 and Geiser, et al., (1986) Gene 48:109, the disclosures of which are herein incorporated by reference in their entirety. Genes (heterologous polynucleotides or nucleotide sequences of interest) encoding disease resistance traits can also be used in the methods of the disclosure including, for example, detoxification genes, such as those which detoxify fumonisin (U.S. Pat. No. 5,792,931); avirulence (avr) and disease resistance (R) genes (Jones, et al., (1994) Science 266:789; Martin, et al., (1993) Science 262:1432; and Mindrinos, et al., (1994) Cell 78:1089), herein incorporated by reference in their entirety.

[0087] Herbicide resistance traits (heterologous polynucleotides or nucleotide sequences of interest) can be used in the methods of the disclosure including genes coding for resistance to herbicides that act to inhibit the action of acetolactate synthase (ALS), in particular the sulfonylurea-type herbicides (e.g., the acetolactate synthase (ALS) gene containing mutations leading to such resistance, in particular the S4 and/or Hra mutations), genes coding for resistance to herbicides that act to inhibit action of glutamine synthase, such as phosphinothricin or basta (e.g., the bar gene), genes coding for resistance to glyphosate (e.g., the EPSPS gene and the GAT gene; see, for example, US Patent Application Publication Number 2004/0082770 and WO 03/092360, herein incorporated by reference in their entirety) or other such genes known in the art. The bar gene encodes resistance to the herbicide basta, the nptII gene encodes resistance to the antibiotics kanamycin and geneticin and the ALS-gene mutants encode resistance to the herbicide chlorsulfuron any and all of which can be operably linked to a promoter and used in the methods of the disclosure.

[0088] Glyphosate resistance is imparted by mutant 5-enolpyruvl-3-phosphikimate synthase (EPSPS) and aroA genes which can be operably linked to a promoter and used in the methods of the disclosure. See, for example, U.S. Pat. No. 4,940,835 to Shah, et al., which discloses the nucleotide sequence of a form of EPSPS which can confer glyphosate resistance. U.S. Pat. No. 5,627,061 to Barry, et al., also describes genes encoding EPSPS enzymes which can be operably linked to a promoter and used in the methods of the disclosure. See also, U.S. Pat. Nos. 6,248,876 B1; 6,040,497; 5,804,425; 5,633,435; 5,145,783; 4,971,908; 5,312,910; 5,188,642; 4,940,835; 5,866,775; 6,225,114 B1; 6,130,366; 5,310,667; 4,535,060; 4,769,061; 5,633,448; 5,510,471; Re. 36,449; RE 37,287 E and 5,491,288 and international publications WO 97/04103; WO 97/04114; WO 00/66746; WO 01/66704; WO 00/66747 and WO 00/66748, which are incorporated herein by reference in their entirety. Glyphosate resistance is also imparted to plants that express a gene that encodes a glyphosate oxido-reductase enzyme as described more fully in U.S. Pat. Nos. 5,776,760 and 5,463,175, which are incorporated herein by reference in their entirety. Glyphosate resistance can also be imparted to plants by the over expression of genes encoding glyphosate N-acetyltransferase. See, for example, U.S. patent application Ser. Nos. 11/405,845 and 10/427,692, herein incorporated by reference in their entirety.

[0089] Sterility genes (heterologous polynucleotides or nucleotide sequences of interest) can be used in the methods of the disclosure to provide an alternative to physical detasseling. Examples of genes used in such ways include male tissue-preferred genes and genes with male sterility phenotypes such as QM, described in U.S. Pat. No. 5,583,210, herein incorporated by reference in its entirety. Other genes which can be operably linked to a promoter and used in the methods of the disclosure include kinases and those encoding compounds toxic to either male or female gametophytic development.

[0090] Commercial traits can also be produced using the methods of the disclosure that could increase for example, starch for ethanol production, or provide expression of proteins. Another important commercial use of transformed plants is the production of polymers and bioplastics such as described in U.S. Pat. No. 5,602,321, herein incorporated by reference in its entirety. Genes such as O-Ketothiolase, PHBase (polyhydroxybutyrate synthase), and acetoacetyl-CoA reductase which can be operably linked to a promoter and used in the methods of the disclosure (see, Schubert, et al., (1988) J. Bacteriol. 170:5837-5847, herein incorporated by reference in its entirety) facilitate expression of polyhydroxyalkanoates (PHAs).

[0091] Numerous trait genes (heterologous polynucleotides or nucleotide sequences of interest) are known in the art and can be used in the methods disclosed herein. By way of illustration, without intending to be limiting, trait genes (heterologous polynucleotides) that confer resistance to insects or diseases, trait genes (heterologous polynucleotides) that confer resistance to a herbicide, trait genes (heterologous polynucleotides) that confer or contribute to an altered grain characteristic, such as altered fatty acids, altered phosphorus content, altered carbohydrates or carbohydrate composition, altered antioxidant content or composition, or altered essential seed amino acids content or composition are examples of the types of trait genes (heterologous polynucleotides) which can be operably linked to a promoter for expression in plants transformed by the methods disclosed herein. Additional genes known in the art may be included in the expression cassettes useful in the methods disclosed herein. Non-limiting examples include genes that create a site for site specific DNA integration, genes that affect abiotic stress resistance (including but not limited to flowering, ear and seed development, enhancement of nitrogen utilization efficiency, altered nitrogen responsiveness, drought resistance or tolerance, cold resistance or tolerance, and salt resistance or tolerance) and increased yield under stress, or other genes and transcription factors that affect plant growth and agronomic traits such as yield, flowering, plant growth and/or plant structure.

[0092] The methods of the disclosure can be used to transform a plant with a heterologous nucleotide sequence that is an antisense sequence for a targeted gene. As used herein, “antisense orientation” includes reference to a polynucleotide sequence that is operably linked to a promoter in an orientation where the antisense strand is transcribed. The antisense strand is sufficiently complementary to an endogenous transcription product such that translation of the endogenous transcription product is often inhibited. “Operably linked” refers to the association of two or more nucleic acid fragments on a single nucleic acid fragment so that the function of one is affected by the other. For example, a promoter is operably linked with a coding sequence when it is capable of affecting the expression of that coding sequence (i.e., that the coding sequence is under the transcriptional control of the promoter). Coding sequences can be operably linked to regulatory sequences in sense or antisense orientation.

[0093] The terminology “antisense DNA nucleotide sequence” is intended to mean a sequence that is in inverse orientation to the 5′-to-3′ normal orientation of that nucleotide sequence. When delivered into a plant cell, expression of the antisense DNA sequence prevents normal expression of the DNA nucleotide sequence for the targeted gene. The antisense nucleotide sequence encodes an RNA transcript that is complementary to and capable of hybridizing to the endogenous messenger RNA (mRNA) produced by transcription of the DNA nucleotide sequence for the targeted gene. In this case, production of the native protein encoded by the targeted gene is inhibited to achieve a desired phenotypic response. Modifications of the antisense sequences may be made as long as the sequences hybridize to and interfere with expression of the corresponding mRNA. In this manner, antisense constructions having 70%, 80%, 85% sequence identity to the corresponding antisense sequences may be used. Furthermore, portions of the antisense nucleotides may be used to disrupt the expression of the target gene. Generally, sequences of at least 50 nucleotides, 100 nucleotides, 200 nucleotides or greater may be used. Thus, the promoter sequences disclosed herein may be operably linked to antisense DNA sequences to reduce or inhibit expression of a native protein in the plant.

[0094] “RNAi” refers to a series of related techniques to reduce the expression of genes (see, for example, U.S. Pat. No. 6,506,559, herein incorporated by reference in its entirety). Older techniques referred to by other names are now thought to rely on the same mechanism but are given different names in the literature. These include “antisense inhibition,” the production of antisense RNA transcripts capable of suppressing the expression of the target protein and “co-suppression” or “sense-suppression,” which refer to the production of sense RNA transcripts capable of suppressing the expression of identical or substantially similar foreign or endogenous genes (U.S. Pat. No. 5,231,020, incorporated herein by reference in its entirety). Such techniques rely on the use of constructs resulting in the accumulation of double stranded RNA with one strand complementary to the target gene to be silenced. The methods of the disclosure may be used to express constructs that will result in RNA interference including microRNAs and siRNAs.

[0095] As used herein, the terms “promoter” or “transcriptional initiation region” mean a regulatory region of DNA usually comprising a TATA box or a DNA sequence capable of directing RNA polymerase II to initiate RNA synthesis at the appropriate transcription initiation site for a particular coding sequence. A promoter may additionally comprise other recognition sequences generally positioned upstream or 5′ to the TATA box or the DNA sequence capable of directing RNA polymerase II to initiate RNA synthesis, referred to as upstream promoter elements, which influence the transcription initiation rate. It is recognized that having identified the nucleotide sequences for the promoter regions disclosed herein, it is within the state of the art to isolate and identify further promoters in the 5′ untranslated region upstream from the particular promoter regions identified herein. Additionally, chimeric promoters may be provided. Such chimeras include portions of the promoter sequence fused to fragments and/or variants of heterologous transcriptional regulatory regions. Thus, the promoter regions disclosed herein can comprise upstream promoters such as, those responsible for tissue and temporal expression of the coding sequence, enhancers and the like.

[0096] As used herein, the term “regulatory element” also refers to a sequence of DNA, usually, but not always, upstream (5′) to the coding sequence of a structural gene, which includes sequences which control the expression of the coding region by providing the recognition for RNA polymerase and/or other factors required for transcription to start at a particular site. An example of a regulatory element that provides for the recognition for RNA polymerase or other transcriptional factors to ensure initiation at a particular site is a promoter element. A promoter element comprises a core promoter element, responsible for the initiation of transcription, as well as other regulatory elements that modify gene expression. It is to be understood that nucleotide sequences, located within introns or 3′ of the coding region sequence may also contribute to the regulation of expression of a coding region of interest. Examples of suitable introns include, but are not limited to, the maize IVS6 intron, or the maize actin intron. A regulatory element may also include those elements located downstream (3′) to the site of transcription initiation, or within transcribed regions, or both. In the context of the present disclosure a post-transcriptional regulatory element may include elements that are active following transcription initiation, for example translational and transcriptional enhancers, translational and transcriptional repressors and mRNA stability determinants.

[0097] A “heterologous nucleotide sequence”, “heterologous polynucleotide of interest”, or “heterologous polynucleotide” as used throughout the disclosure, is a sequence that is not naturally occurring with or operably linked to a promoter sequence. While this nucleotide sequence is heterologous to the promoter sequence, it may be homologous or native or heterologous or foreign to the plant host. Likewise, the promoter sequence may be homologous or native or heterologous or foreign to the plant host and/or the polynucleotide of interest.

[0098] It is recognized that to increase transcription levels, enhancers may be. Enhancers are nucleotide sequences that act to increase the expression of a promoter region. Enhancers are known in the art and include the SV40 enhancer region, the 35S enhancer element and the like. Some enhancers are also known to alter normal promoter expression patterns, for example, by causing a promoter to be expressed constitutively when without the enhancer, the same promoter is expressed only in one specific tissue or a few specific tissues.

[0099] Modifications of promoter sequences can provide for a range of expression of a heterologous nucleotide sequence. Thus, they may be modified to be weak promoters or strong promoters. Generally, a “weak promoter” means a promoter that drives expression of a coding sequence at a low level. A “low level” of expression is intended to mean expression at levels of about 1/10,000 transcripts to about 1/100,000 transcripts to about 1/500,000 transcripts. Conversely, a strong promoter drives expression of a coding sequence at a high level, or at about 1/10 transcripts to about 1/100 transcripts to about 1/1,000 transcripts.

[0100] The transformation methods disclosed herein are useful in the genetic manipulation of any plant, thereby resulting in a change in phenotype of the transformed plant. Changes in phenotype can be accomplished by T-DNA transfer, particle bombardment, electroporation, PEG transfection, or RNP (ribonucleoprotein) delivery.

[0101] The term “operably linked” means that the transcription or translation of a heterologous nucleotide sequence is under the influence of a promoter sequence. In this manner, the nucleotide sequences for the promoters may be provided in expression cassettes along with heterologous nucleotide sequences of interest for expression in the plant of interest, more particularly for expression in the reproductive tissue of the plant.

[0102] In one aspect of the disclosure, expression cassettes comprise a transcriptional initiation region comprising a promoter nucleotide sequence or variants or fragments thereof, operably linked to a morphogenic gene and/or a heterologous nucleotide sequence. Such an expression cassette can be provided with a plurality of restriction sites for insertion of the nucleotide sequence to be under the transcriptional regulation of the regulatory regions. The expression cassette may additionally contain selectable marker genes as well as 3′ termination regions.

[0103] The expression cassette can include, in the 5′-3′ direction of transcription, a transcriptional initiation region (i.e., a promoter, or variant or fragment thereof), a translational initiation region, a heterologous nucleotide sequence of interest, a translational termination region and optionally, a transcriptional termination region functional in the host organism. The regulatory regions (i.e., promoters, transcriptional regulatory regions, and translational termination regions) and/or the polynucleotide of the aspects may be native/analogous to the host cell or to each other. Alternatively, the regulatory regions and/or the polynucleotide of the aspects may be heterologous to the host cell or to each other. As used herein, “heterologous” in reference to a sequence is a sequence that originates from a foreign species or, if from the same species, is substantially modified from its native form in composition and/or genomic locus by deliberate human intervention. For example, a promoter operably linked to a heterologous polynucleotide is from a species different from the species from which the polynucleotide was derived or, if from the same/analogous species, one or both are substantially modified from their original form and/or genomic locus or the promoter is not the native promoter for the operably linked polynucleotide.

[0104] The termination region may be native with the transcriptional initiation region, may be native with the operably linked DNA sequence of interest, may be native with the plant host, or may be derived from another source (i.e., foreign or heterologous to the promoter, the DNA sequence being expressed, the plant host, or any combination thereof). Convenient termination regions are available from the Ti-plasmid of A. tumefaciens, such as the octopine synthase and nopaline synthase termination regions. See also, Guerineau, et al., (1991) Mol. Gen. Genet. 262:141-144; Proudfoot, (1991) Cell 64:671-674; Sanfacon, et al., (1991) Genes Dev. 5:141-149; Mogen, et al., (1990) Plant Cell 2:1261-1272; Munroe, et al., (1990) Gene 91:151-158; Ballas, et al., (1989) Nucleic Acids Res. 17:7891-7903; and Joshi, et al., (1987) Nucleic Acid Res. 15:9627-9639, herein incorporated by reference in their entirety.

[0105] The expression cassette useful in the methods of the disclosure may also contain at least one additional nucleotide sequence for a gene, heterologous nucleotide sequence, heterologous polynucleotide of interest, or heterologous polynucleotide to be co-transformed into the organism. Alternatively, the additional nucleotide sequence(s) can be provided on another expression cassette.

[0106] Where appropriate, the nucleotide sequences may be optimized for increased expression in the transformed plant. That is, these nucleotide sequences can be synthesized using plant preferred codons for improved expression. See, for example, Campbell and Gowri, (1990) Plant Physiol. 92:1-11, herein incorporated by reference in its entirety, for a discussion of host-preferred codon usage. Methods are available in the art for synthesizing plant-preferred genes. See, for example, U.S. Pat. Nos. 5,380,831, 5,436,391 and Murray, et al., (1989) Nucleic Acids Res. 17:477-498, herein incorporated by reference in their entirety.

[0107] Additional sequence modifications are known to enhance gene expression in a cellular host. These include elimination of sequences encoding spurious polyadenylation signals, exon-intron splice site signals, transposon-like repeats and other such well-characterized sequences that may be deleterious to gene expression. The G-C content of the heterologous nucleotide sequence may be adjusted to levels average for a given cellular host, as calculated by reference to known genes expressed in the host cell. When possible, the sequence is modified to avoid predicted hairpin secondary mRNA structures.

[0108] The expression cassettes may additionally contain 5′ leader sequences. Such leader sequences can act to enhance translation. Translation leaders are known in the art and include, without limitation: picornavirus leaders, for example, EMCV leader (Encephalomyocarditis 5′ noncoding region) (Elroy-Stein, et al., (1989) Proc. Nat. Acad. Sci. USA 86:6126-6130); potyvirus leaders, for example, TEV leader (Tobacco Etch Virus) (Allison, et al., (1986) Virology 154:9-20); MDMV leader (Maize Dwarf Mosaic Virus); human immunoglobulin heavy-chain binding protein (BiP) (Macejak, et al., (1991) Nature 353:90-94); untranslated leader from the coat protein mRNA of alfalfa mosaic virus (AMV RNA 4) (Jobling, et al., (1987) Nature 325:622-625); tobacco mosaic virus leader (TMV) (Gallie, et al., (1989) Molecular Biology ofRRNA, pages 237-256) and maize chlorotic mottle virus leader (MCMV) (Lommel, et al., (1991) Virology 81:382-385), herein incorporated by reference in their entirety. See, also, Della-Cioppa, et al., (1987) Plant Physiology 84:965-968, herein incorporated by reference in its entirety. Methods known to enhance mRNA stability can also be utilized, for example, introns, such as the maize Ubiquitin intron (Christensen and Quail, (1996) Transgenic Res. 5:213-218; Christensen, et al., (1992) Plant Molecular Biology 18:675-689) or the maize AdhI intron (Kyozuka, et al., (1991)Mol. Gen. Genet. 228:40-48; Kyozuka, et al., (1990) Maydica 35:353-357) and the like, herein incorporated by reference in their entirety.

[0109] The DNA expression cassettes or constructs useful in the methods of the disclosure can also include further enhancers, either translation or transcription enhancers, as may be required. These enhancer regions are well known to persons skilled in the art and can include the ATG initiation codon and adjacent sequences. The initiation codon must be in phase with the reading frame of the coding sequence to ensure translation of the entire sequence. The translation control signals and initiation codons can be from a variety of origins, both natural and synthetic. Translational initiation regions may be provided from the source of the transcriptional initiation region, or from the structural gene. The sequence can also be derived from the regulatory element selected to express the gene and can be specifically modified to increase translation of the mRNA. It is recognized that to increase transcription levels enhancers may be utilized in combination with the promoter regions of the aspects. Enhancers are known in the art and include the SV40 enhancer region, the 35S enhancer element, and the like.

[0110] In preparing the expression cassette, the various DNA fragments may be manipulated, to provide for the DNA sequences in the proper orientation and, as appropriate, in the proper reading frame. Toward this end, adapters or linkers may be employed to join the DNA fragments or other manipulations may be involved to provide for convenient restriction sites, removal of superfluous DNA, removal of restriction sites or the like. For this purpose, in vitro mutagenesis, primer repair, restriction, annealing, resubstitutions, for example, transitions and transversions, may be involved.

[0111] Reporter genes or selectable marker genes may also be included in the expression cassettes useful in the methods of the present disclosure. Examples of suitable reporter genes known in the art can be found in, for example, Jefferson, et al., (1991) in Plant Molecular Biology Manual, ed. Gelvin, et al., (Kluwer Academic Publishers), pp. 1-33; DeWet, et al., (1987) Mol. Cell. Biol. 7:725-737; Goff, et al., (1990) EMBO J. 9:2517-2522; Kain, et al., (1995) Bio Techniques 19:650-655 and Chiu, et al., (1996) Current Biology 6:325-330, herein incorporated by reference in their entirety.

[0112] Selectable marker genes for selection of transformed cells or tissues can include genes that confer antibiotic resistance or resistance to herbicides. Examples of suitable selectable marker genes include, but are not limited to, genes encoding resistance to chloramphenicol (Herrera Estrella, et al., (1983) EMBO J. 2:987-992); methotrexate (Herrera Estrella, et al., (1983) Nature 303:209-213; Meijer, et al., (1991) Plant Mol. Biol. 16:807-820); hygromycin (Waldron, et al., (1985) Plant Mol. Biol. 5:103-108 and Zhijian, et al., (1995) Plant Science 108:219-227); streptomycin (Jones, et al., (1987) Mol. Gen. Genet. 210:86-91); spectinomycin (Bretagne-Sagnard, et al., (1996) Transgenic Res. 5:131-137); bleomycin (Hille, et al., (1990) Plant Mol. Biol. 7:171-176); sulfonamide (Guerineau, et al., (1990) Plant Mol. Biol. 15:127-36); bromoxynil (Stalker, et al., (1988) Science 242:419-423); glyphosate (Shaw, et al., (1986) Science 233:478-481 and U.S. patent application Ser. Nos. 10/004,357 and 10/427,692); phosphinothricin (DeBlock, et al., (1987) EMBO J. 6:2513-2518), herein incorporated by reference in their entirety.

[0113] Other genes that could serve utility in the recovery of transgenic events would include, but are not limited to, examples such as GUS (beta-glucuronidase; Jefferson, (1987) Plant Mol. Biol. Rep. 5:387), GFP (green fluorescence protein; Chalfie, et al., (1994) Science 263:802), luciferase (Riggs, et al., (1987) Nucleic Acids Res. 15(19):8115 and Luehrsen, et al., (1992) Methods Enzymol. 216:397-414) and the maize genes encoding for anthocyanin production (Ludwig, et al., (1990) Science 247:449), herein incorporated by reference in their entirety.

[0114] As used herein, “vector” refers to a DNA molecule such as a plasmid, cosmid or bacterial phage for introducing a nucleotide construct, for example, an expression cassette or construct, into a host cell. Cloning vectors typically contain one or a small number of restriction endonuclease recognition sites at which foreign DNA sequences can be inserted in a determinable fashion without loss of essential biological function of the vector, as well as a marker gene that is suitable for use in the identification and selection of cells transformed with the cloning vector. Marker genes typically include genes that provide tetracycline resistance, hygromycin resistance or ampicillin resistance.

[0115] The methods of the disclosure involve introducing a polypeptide or polynucleotide into a plant. As used herein, “introducing” means presenting to the plant the polynucleotide or polypeptide in such a manner that the sequence gains access to the interior of a cell of the plant. The methods of the disclosure do not depend on a particular method for introducing a sequence into a plant, only that the polynucleotide or polypeptides gains access to the interior of at least one cell of the plant. Methods for introducing polynucleotide or polypeptides into plants are known in the art including, but not limited to, stable transformation methods, transient transformation methods and virus-mediated methods.

[0116] A “stable transformation” is a transformation in which the nucleotide construct introduced into a plant integrates into the genome of the plant and is capable of being inherited by the progeny thereof “Transient transformation” means that a polynucleotide is introduced into the plant and does not integrate into the genome of the plant or a polypeptide is introduced into a plant.

[0117] Transformation protocols as well as protocols for introducing nucleotide sequences into plants may vary depending on the type of plant or plant cell, i.e., monocot or dicot, targeted for transformation. Suitable methods of introducing nucleotide sequences into plant cells and subsequent insertion into the plant genome include microinjection (Crossway, et al., (1986) Biotechniques 4:320-334), electroporation (Riggs, et al., (1986) Proc. Natl. Acad. Sci. USA 83:5602-5606), Agrobacterium-mediated transformation (Townsend, et al., U.S. Pat. No. 5,563,055 and Zhao, et al., U.S. Pat. No. 5,981,840), direct gene transfer (Paszkowski, et al., (1984) EMBO J. 3:2717-2722) and ballistic particle acceleration (see, for example, U.S. Pat. Nos. 4,945,050; 5,879,918; 5,886,244; 5,932,782; Tomes, et al., (1995) in Plant Cell, Tissue, and Organ Culture: Fundamental Methods, ed. Gamborg and Phillips (Springer-Verlag, Berlin); McCabe, et al., (1988) Biotechnology 6:923-926) and Lec1 transformation (WO 00/28058). Also see, Weissinger, et al., (1988) Ann. Rev. Genet. 22:421-477; Sanford, et al., (1987) Particulate Science and Technology 5:27-37 (onion); Christou, et al., (1988) Plant Physiol. 87:671-674 (soybean); McCabe, et al., (1988) Bio/Technology 6:923-926 (soybean); Finer and McMullen, (1991) In Vitro Cell Dev. Biol. 27P:175-182 (soybean); Singh, et al., (1998) Theor. Appl. Genet. 96:319-324 (soybean); Datta, et al., (1990) Biotechnology 8:736-740 (rice); Klein, et al., (1988) Proc. Natl. Acad. Sci. USA 85:4305-4309 (maize); Klein, et al., (1988) Biotechnology 6:559-563 (maize); U.S. Pat. Nos. 5,240,855; 5,322,783 and 5,324,646; Klein, et al., (1988) Plant Physiol. 91:440-444 (maize); Fromm, et al., (1990) Biotechnology 8:833-839 (maize); Hooykaas-Van Slogteren, et al., (1984) Nature (London) 311:763-764; U.S. Pat. No. 5,736,369 (cereals); Bytebier, et al., (1987) Proc. Natl. Acad. Sci. USA 84:5345-5349 (Liliaceae); De Wet, et al., (1985) in The Experimental Manipulation of Ovule Tissues, ed. Chapman, et al., (Longman, New York), pp. 197-209 (pollen); Kaeppler, et al., (1990) Plant Cell Reports 9:415-418 and Kaeppler, et al., (1992) Theor. Appl. Genet. 84:560-566 (whisker-mediated transformation); D'Halluin, et al., (1992) Plant Cell 4:1495-1505 (electroporation); Li, et al., (1993) Plant Cell Reports 12:250-255 and Christou and Ford, (1995) Annals of Botany 75:407-413 (rice); Osjoda, et al., (1996) Nature Biotechnology 14:745-750 (maize via Agrobacterium tumefaciens), all of which are herein incorporated by reference in their entirety. Methods and compositions for rapid plant transformation of immature embryos are also found in US 2017/0121722, herein incorporated in its entirety by reference. Vectors useful in plant transformation are found in US 2019/0078106, herein incorporated by reference in its entirety.

[0118] In specific aspects, the DNA expression cassettes or constructs can be provided to a plant using a variety of transient transformation methods. Such transient transformation methods include, but are not limited to, viral vector systems and the precipitation of the polynucleotide in a manner that precludes subsequent release of the DNA. Thus, transcription from the particle-bound DNA can occur, but the frequency with which it is released to become integrated into the genome is greatly reduced. Such methods include the use of particles coated with polyethylenimine (PEI; Sigma #P3143).

[0119] In other aspects, the polynucleotide may be introduced into plants by contacting plants with a virus or viral nucleic acids. Generally, such methods involve incorporating a nucleotide construct within a viral DNA or RNA molecule. Methods for introducing polynucleotides into plants and expressing a protein encoded therein, involving viral DNA or RNA molecules, are known in the art. See, for example, U.S. Pat. Nos. 5,889,191, 5,889,190, 5,866,785, 5,589,367, 5,316,931 and Porta, et al., (1996) Molecular Biotechnology 5:209-221, herein incorporated by reference in their entirety.

[0120] The cells that have been transformed may be grown into plants in accordance with conventional ways. See, for example, McCormick, et al., (1986) Plant Cell Reports 5:81-84, herein incorporated by reference in its entirety. These plants may then be grown, and either pollinated with the same transformed strain or different strains, and the resulting progeny having expression of the desired phenotypic characteristic identified. Two or more generations may be grown to ensure that expression of the desired phenotypic characteristic is stably maintained and inherited and then seeds harvested to ensure expression of the desired phenotypic characteristic has been achieved. In this manner, the present disclosure provides transformed seed (also referred to as “transgenic seed”) having a nucleotide construct, for example, an expression cassette, stably incorporated into its genome.

[0121] There are a variety of methods for the regeneration of plants from plant tissue. The particular method of regeneration will depend on the starting plant tissue and the particular plant species to be regenerated. The regeneration, development and cultivation of plants from single plant protoplast transformants or from various transformed explants is well known in the art (Weissbach and Weissbach, (1988) In: Methods for Plant Molecular Biology, (Eds.), Academic Press, Inc., San Diego, Calif, herein incorporated by reference in its entirety). This regeneration and growth process typically includes the steps of selection of transformed cells, culturing those individualized cells through the usual stages of embryonic development through the rooted plantlet stage. Transgenic embryos and seeds are similarly regenerated. The resulting transgenic rooted shoots are thereafter planted in an appropriate plant growth medium such as soil. Preferably, the regenerated plants are self-pollinated to provide homozygous transgenic plants. Otherwise, pollen obtained from the regenerated plants is crossed to seed-grown plants of agronomically important lines. Conversely, pollen from plants of these important lines is used to pollinate regenerated plants. A transgenic plant of the aspects containing a desired polynucleotide is cultivated using methods well known to one skilled in the art.

[0122] Methods are known in the art for the targeted insertion of a polynucleotide at a specific location in the plant genome. The insertion of the polynucleotide at a desired genomic location is achieved using a site-specific recombination system. See, for example, U.S. Pat. No. 9,222,098 B2, U.S. Pat. No. 7,223,601 B2, U.S. Pat. No. 7,179,599 B2, and U.S. Pat. No. 6,911,575 B1, all of which are herein incorporated by reference in their entirety. Briefly, a polynucleotide of interest, flanked by two non-identical recombination sites, can be contained in a T-DNA transfer cassette. The T-DNA transfer cassette is introduced into a plant having stably incorporated into its genome a target site which is flanked by two non-identical recombination sites that correspond to the sites of the transfer cassette. Alternatives to T-DNA transfer include but are not limited to, particle bombardment, electroporation, PEG transfection, or RNP (ribonucleoprotein) delivery. An appropriate recombinase is provided, and the transfer cassette is integrated at the target site. The polynucleotide of interest is thereby integrated at a specific chromosomal position in the plant genome.

[0123] In an aspect, the disclosed methods can be used to introduce into leaf explants with increased efficiency and speed polynucleotides useful to target a specific site for modification in the genome of a plant. Site specific modifications that can be introduced with the disclosed methods include those produced using any method for introducing site specific modification, including, but not limited to, through the use of gene repair oligonucleotides (e.g. US Publication 2013/0019349), or through the use of double-stranded break technologies such as TALENs, meganucleases, zinc finger nucleases, CRISPR-Cas, and the like. For example, the disclosed methods can be used to introduce a CRISPR-Cas system into a plant cell or plant, for the purpose of genome modification of a target sequence in the genome of a plant or plant cell, for selecting plants, for deleting a base or a sequence, for gene editing, and for inserting a polynucleotide of interest into the genome of a plant or plant cell. Thus, the disclosed methods can be used together with a CRISPR-Cas system to provide for an effective system for modifying or altering target sites and nucleotides of interest within the genome of a plant, plant cell or seed. The Cas endonuclease gene is a plant optimized Cas9 endonuclease, wherein the plant optimized Cas9 endonuclease is capable of binding to and creating a double strand break in a genomic target sequence the plant genome.

[0124] The Cas endonuclease is guided by the guide nucleotide to recognize and optionally introduce a double strand break at a specific target site into the genome of a cell. The CRISPR-Cas system provides for an effective system for modifying target sites within the genome of a plant, plant cell or seed. Further provided are methods and compositions employing a guide polynucleotide/Cas endonuclease system to provide an effective system for modifying target sites within the genome of a cell and for editing a nucleotide sequence in the genome of a cell. Once a genomic target site is identified, a variety of methods can be employed to further modify the target sites such that they contain a variety of polynucleotides of interest. The disclosed compositions and methods can be used to introduce a CRISPR-Cas system for editing a nucleotide sequence in the genome of a cell. The nucleotide sequence to be edited (the nucleotide sequence of interest) can be located within or outside a target site that is recognized by a Cas endonuclease.

[0125] CRISPR loci (Clustered Regularly Interspaced Short Palindromic Repeats) (also known as SPIDRs-SPacer Interspersed Direct Repeats) constitute a family of recently described DNA loci. CRISPR loci consist of short and highly conserved DNA repeats (typically 24 to 40 bp, repeated from 1 to 140 times—also referred to as CRISPR-repeats) which are partially palindromic. The repeated sequences (usually specific to a species) are interspaced by variable sequences of constant length (typically 20 to 58 by depending on the CRISPR locus (WO2007/025097 published Mar. 1, 2007).

[0126] Cas gene includes a gene that is generally coupled, associated or close to or in the vicinity of flanking CRISPR loci. The terms “Cas gene” and “CRISPR-associated (Cas) gene” are used interchangeably herein.

[0127] In another aspect, the Cas endonuclease gene is operably linked to a SV40 nuclear targeting signal upstream of the Cas codon region and a bipartite VirD2 nuclear localization signal (Tinland et al. (1992) Proc. Natl. Acad. Sci. USA 89:7442-6) downstream of the Cas codon region.

[0128] As related to the Cas endonuclease, the terms “functional fragment,” “fragment that is functionally equivalent,” and “functionally equivalent fragment” are used interchangeably herein. These terms refer to a portion or subsequence of the Cas endonuclease sequence in which the ability to create a double-strand break is retained.

[0129] As related to the Cas endonuclease, the terms “functional variant,” “variant that is functionally equivalent” and “functionally equivalent variant” are used interchangeably herein. These terms refer to a variant of the Cas endonuclease in which the ability to create a double-strand break is retained. Fragments and variants can be obtained via methods such as site-directed mutagenesis and synthetic construction.

[0130] In an aspect, the Cas endonuclease gene is a plant codon optimized Streptococcus pyogenes Cas9 gene that can recognize any genomic sequence of the form N(12-30)NGG which can in principle be targeted.

[0131] Endonucleases are enzymes that cleave the phosphodiester bond within a polynucleotide chain and include restriction endonucleases that cleave DNA at specific sites without damaging the bases. Restriction endonucleases include Type I, Type II, Type III, and Type IV endonucleases, which further include subtypes. In the Type I and Type III systems, both the methylase and restriction activities are contained in a single complex. Endonucleases also include meganucleases, also known as homing endonucleases (HEases), which like restriction endonucleases, bind and cut at a specific recognition site, however the recognition sites for meganucleases are typically longer, about 18 bp or more (Patent application PCT/US 12/30061 filed on Mar. 22, 2012). Meganucleases have been classified into four families based on conserved sequence motifs. These motifs participate in the coordination of metal ions and hydrolysis of phosphodiester bonds. Meganucleases are notable for their long recognition sites, and for tolerating some sequence polymorphisms in their DNA substrates. The naming convention for meganuclease is similar to the convention for other restriction endonuclease. Meganucleases are also characterized by prefix F-, I-, or PI-for enzymes encoded by free-standing ORFs, introns, and inteins, respectively. One step in the recombination process involves polynucleotide cleavage at or near the recognition site. This cleaving activity can be used to produce a double-strand break. For reviews of site-specific recombinases and their recognition sites, see, Sauer (1994) Curr Op Biotechnol 5:521-7; and Sadowski (1993) FASEB 7:760-7. In some examples the recombinase is from the Integrase or Resolvase families. TAL effector nucleases are a new class of sequence-specific nucleases that can be used to make double-strand breaks at specific target sequences in the genome of a plant or other organism. (Miller, et al. (2011) Nature Biotechnology 29:143-148). Zinc finger nucleases (ZFNs) are engineered double-strand break inducing agents comprised of a zinc finger DNA binding domain and a double-strand-break-inducing agent domain. Recognition site specificity is conferred by the zinc finger domain, which typically comprising two, three, or four zinc fingers, for example having a C2H2 structure, however other zinc finger structures are known and have been engineered. Zinc finger domains are amenable for designing polypeptides which specifically bind a selected polynucleotide recognition sequence. ZFNs include an engineered DNA-binding zinc finger domain linked to a nonspecific endonuclease domain, for example nuclease domain from a Type Ms endonuclease such as Fok1. Additional functionalities can be fused to the zinc-finger binding domain, including transcriptional activator domains, transcription repressor domains, and methylases. In some examples, dimerization of nuclease domain is required for cleavage activity. Each zinc finger recognizes three consecutive base pairs in the target DNA. For example, a 3-finger domain recognized a sequence of 9 contiguous nucleotides, with a dimerization requirement of the nuclease, two sets of zinc finger triplets are used to bind an 18-nucleotide recognition sequence.

[0132] A “Dead-CAS9” (dCAS9) as used herein, is used to supply a transcriptional repressor domain. The dCAS9 has been mutated so that can no longer cut DNA. The dCAS9 can still bind when guided to a sequence by the gRNA and can also be fused to repressor elements. The dCAS9 fused to the repressor element, as described herein, is abbreviated to dCAS9˜REP, where the repressor element (REP) can be any of the known repressor motifs that have been characterized in plants. An expressed guide RNA (gRNA) binds to the dCAS9˜REP protein and targets the binding of the dCAS9-REP fusion protein to a specific predetermined nucleotide sequence within a promoter (a promoter within the T-DNA). For example, if this is expressed beyond-the border using a ZM-UBI PRO::dCAS9˜REP::PINII TERM cassette along with a U6-POL PRO::gRNA::U6 TERM cassette and the gRNA is designed to guide the dCAS9-REP protein to bind the SB-UBI promoter in the expression cassette SB-UBI PRO::moPAT::PINII TERM within the T-DNA, any event that has integrated the beyond-the-border sequence would be bialaphos sensitive. Transgenic events that integrate only the T-DNA would express moPAT and be bialaphos resistant. The advantage of using a dCAS9 protein fused to a repressor (as opposed to a TETR or ESR) is the ability to target these repressors to any promoter within the T-DNA. TETR and ESR are restricted to cognate operator binding sequences. Alternatively, a synthetic Zinc-Finger Nuclease fused to a repressor domain can be used in place of the gRNA and dCAS9˜REP (Urritia et al., 2003, Genome Biol. 4:231) as described above.

[0133] The type II CRISPR/Cas system from bacteria employs a crRNA and tracrRNA to guide the Cas endonuclease to its DNA target. The crRNA (CRISPR RNA) contains the region complementary to one strand of the double strand DNA target and base pairs with the tracrRNA (trans-activating CRISPR RNA) forming a RNA duplex that directs the Cas endonuclease to cleave the DNA target. As used herein, the term “guide nucleotide” relates to a synthetic fusion of two RNA molecules, a crRNA (CRISPR RNA) comprising a variable targeting domain, and a tracrRNA. In an aspect, the guide nucleotide comprises a variable targeting domain of 12 to 30 nucleotide sequences and a RNA fragment that can interact with a Cas endonuclease.

[0134] As used herein, the term “guide polynucleotide” relates to a polynucleotide sequence that can form a complex with a Cas endonuclease and enables the Cas endonuclease to recognize and optionally cleave a DNA target site. The guide polynucleotide can be a single molecule or a double molecule. The guide polynucleotide sequence can be a RNA sequence, a DNA sequence, or a combination thereof (a RNA-DNA combination sequence). Optionally, the guide polynucleotide can comprise at least one nucleotide, phosphodiester bond or linkage modification such as, but not limited, to Locked Nucleic Acid (LNA), 5-methyl dC, 2,6-Diaminopurine, 2′-Fluoro A, 2′-Fluoro U, 2′-O-Methyl RNA, phosphorothioate bond, linkage to a cholesterol molecule, linkage to a polyethylene glycol molecule, linkage to a spacer 18 (hexaethylene glycol chain) molecule, or 5′ to 3′ covalent linkage resulting in circularization. A guide polynucleotide that solely comprises ribonucleic acids is also referred to as a “guide nucleotide”.

[0135] Nucleotide sequence modification of the guide polynucleotide, VT domain and/or CER domain can be selected from, but not limited to, the group consisting of a 5′ cap, a 3′ polyadenylated tail, a riboswitch sequence, a stability control sequence, a sequence that forms a dsRNA duplex, a modification or sequence that targets the guide poly nucleotide to a subcellular location, a modification or sequence that provides for tracking, a modification or sequence that provides a binding site for proteins, a Locked Nucleic Acid (LNA), a 5-methyl dC nucleotide, a 2,6-Diaminopurine nucleotide, a 2′-Fluoro A nucleotide, a 2′-Fluoro U nucleotide; a 2′-O-Methyl RNA nucleotide, a phosphorothioate bond, linkage to a cholesterol molecule, linkage to a polyethylene glycol molecule, linkage to a spacer 18 molecule, a 5′ to 3′ covalent linkage, or any combination thereof. These modifications can result in at least one additional beneficial feature, wherein the additional beneficial feature is selected from the group of a modified or regulated stability, a subcellular targeting, tracking, a fluorescent label, a binding site for a protein or protein complex, modified binding affinity to complementary target sequence, modified resistance to cellular degradation, and increased cellular permeability.

[0136] In an aspect, the guide nucleotide and Cas endonuclease are capable of forming a complex that enables the Cas endonuclease to introduce a double strand break at a DNA target site.

[0137] In an aspect of the methods of the disclosure the variable target domain is 12, 13, 14, 15, 16, 17, 18, 19, 20, 21, 22, 23, 24, 25, 26, 27, 28, 29 or 30 nucleotides in length.

[0138] In an aspect of the methods of the disclosure, the guide nucleotide comprises a cRNA (or cRNA fragment) and a tracrRNA (or tracrRNA fragment) of the type II CRISPR/Cas system that can form a complex with a type II Cas endonuclease, wherein the guide nucleotide Cas endonuclease complex can direct the Cas endonuclease to a plant genomic target site, enabling the Cas endonuclease to introduce a double strand break into the genomic target site. The guide nucleotide can be introduced into a plant or plant cell directly using any method known in the art such as, but not limited to, particle bombardment or topical applications.

[0139] In an aspect, the guide nucleotide can be introduced indirectly by introducing a recombinant DNA molecule comprising the corresponding guide DNA sequence operably linked to a plant specific promoter that is capable of transcribing the guide nucleotide in the plant cell. The term “corresponding guide DNA” includes a DNA molecule that is identical to the RNA molecule but has a “T” substituted for each “U” of the RNA molecule.

[0140] In an aspect, the guide nucleotide is introduced via particle bombardment or using the disclosed methods and compositions for Agrobacterium transformation of a recombinant DNA construct comprising the corresponding guide DNA operably linked to a plant U6 polymerase III promoter.

[0141] In an aspect, the RNA that guides the RNA Cas9 endonuclease complex, is a duplexed RNA comprising a duplex crRNA-tracrRNA. One advantage of using a guide nucleotide versus a duplexed crRNA-tracrRNA is that only one expression cassette needs to be made to express the fused guide nucleotide.

[0142] The terms “target site,” “target sequence,” “target DNA,” “target locus,” “genomic target site,” “genomic target sequence,” and “genomic target locus” are used interchangeably herein and refer to a polynucleotide sequence in the genome (including choloroplastic and mitochondrial DNA) of a plant cell at which a double-strand break is induced in the plant cell genome by a Cas endonuclease. The target site can be an endogenous site in the plant genome, or alternatively, the target site can be heterologous to the plant and thereby not be naturally occurring in the genome, or the target site can be found in a heterologous genomic location compared to where it occurs in nature.

[0143] As used herein, terms “endogenous target sequence” and “native target sequence” are used interchangeably herein to refer to a target sequence that is endogenous or native to the genome of a plant and is at the endogenous or native position of that target sequence in the genome of the plant. In an aspect, the target site can be similar to a DNA recognition site or target site that is specifically recognized and/or bound by a double-strand break inducing agent such as a LIG3-4 endonuclease (US patent publication 2009/0133152 A1 (published May 21, 2009) or a MS26++ meganuclease (U.S. patent application Ser. No. 13/526,912 filed Jun. 19, 2012).

[0144] An “artificial target site” or “artificial target sequence” are used interchangeably herein and refer to a target sequence that has been introduced into the genome of a plant. Such an artificial target sequence can be identical in sequence to an endogenous or native target sequence in the genome of a plant but be located in a different position (i.e., a non-endogenous or non-native position) in the genome of a plant.

[0145] An “altered target site,” “altered target sequence” “modified target site,” and “modified target sequence” are used interchangeably herein and refer to a target sequence as disclosed herein that comprises at least one alteration when compared to non-altered target sequence. Such “alterations” include, for example: (i) replacement of at least one nucleotide, (ii) a deletion of at least one nucleotide, (iii) an insertion of at least one nucleotide, or (iv) any combination of (i)-(iii).

[0146] In an aspect, the disclosed methods can be used to introduce into plants polynucleotides useful for gene suppression of a target gene in a plant. Reduction of the activity of specific genes (also known as gene silencing, or gene suppression) is desirable for several aspects of genetic engineering in plants. Many techniques for gene silencing are well known to one of skill in the art, including but not limited to antisense technology.

[0147] In an aspect, the disclosed methods can be used to introduce into plants polynucleotides useful for the targeted integration of nucleotide sequences into a plant. For example, the disclosed methods can be used to introduce T-DNA expression cassettes comprising nucleotide sequences of interest flanked by non-identical recombination sites are used to transform a plant comprising a target site. In an aspect, the target site contains at least a set of non-identical recombination sites corresponding to those on the T-DNA expression cassette. The exchange of the nucleotide sequences flanked by the recombination sites is affected by a recombinase. Thus, the disclosed methods can be used for the introduction of T-DNA expression cassettes for targeted integration of nucleotide sequences, wherein the T-DNA expression cassettes which are flanked by non-identical recombination sites recognized by a recombinase that recognizes and implements recombination at the nonidentical recombination sites. Accordingly, the disclosed methods and composition can be used to improve efficiency and speed of development of plants containing non-identical recombination sites.

[0148] Thus, the disclosed methods can further comprise methods for the directional, targeted integration of exogenous nucleotides into a transformed plant. In an aspect, the disclosed methods use novel recombination sites in a gene targeting system which facilitates directional targeting of desired genes and nucleotide sequences into corresponding recombination sites previously introduced into the target plant genome.

[0149] In an aspect, a nucleotide sequence flanked by two non-identical recombination sites is introduced into one or more cells of an explant derived from the target organism's genome establishing a target site for insertion of nucleotide sequences of interest. Once a stable plant or cultured tissue is established a second construct, or nucleotide sequence of interest, flanked by corresponding recombination sites as those flanking the target site, is introduced into the stably transformed plant or tissues in the presence of a recombinase protein. This process results in exchange of the nucleotide sequences between the non-identical recombination sites of the target site and the T-DNA expression cassette.

[0150] It is recognized that the transformed plant prepared in this manner may comprise multiple target sites; i. e., sets of non-identical recombination sites. In this manner, multiple manipulations of the target site in the transformed plant are available. By target site in the transformed plant is intended a DNA sequence that has been inserted into the transformed plant's genome and comprises non-identical recombination sites.

[0151] Examples of recombination sites for use in the disclosed method are known. The two-micron plasmid found in most naturally occurring strains of Saccharomyces cerevisiae, encodes a site-specific recombinase that promotes an inversion of the DNA between two inverted repeats. This inversion plays a central role in plasmid copy-number amplification.

[0152] The protein, designated FLP protein, catalyzes site-specific recombination events. The minimal recombination site (FRT) has been defined and contains two inverted 13-base pair (bp) repeats surrounding an asymmetric 8-bp spacer. The FLP protein cleaves the site at the junctions of the repeats and the spacer and is covalently linked to the DNA via a 3′phosphate. Site specific recombinases like FLP cleave and religate DNA at specific target sequences, resulting in a precisely defined recombination between two identical sites. To function, the system needs the recombination sites and the recombinase. No auxiliary factors are needed. Thus, the entire system can be inserted into and function in plant cells. The yeast FLP\FRT site specific recombination system has been shown to function in plants. To date, the system has been utilized for excision of unwanted DNA. See, Lyznik et at. (1993) Nucleic Acid Res. 21: 969-975. In contrast, the present disclosure utilizes non-identical FRTs for the exchange, targeting, arrangement, insertion and control of expression of nucleotide sequences in the plant genome.

[0153] In an aspect, a transformed organism of interest, such as an explant from a plant, containing a target site integrated into its genome is needed. The target site is characterized by being flanked by non-identical recombination sites. A targeting cassette is additionally required containing a nucleotide sequence flanked by corresponding non-identical recombination sites as those sites contained in the target site of the transformed organism. A recombinase which recognizes the non-identical recombination sites and catalyzes site-specific recombination is required.

[0154] It is recognized that the recombinase can be provided by any means known in the art. That is, it can be provided in the organism or plant cell by transforming the organism with an expression cassette capable of expressing the recombinase in the organism, by transient expression, or by providing messenger RNA (mRNA) for the recombinase or the recombinase protein.

[0155] By “non-identical recombination sites” it is intended that the flanking recombination sites are not identical in sequence and will not recombine or recombination between the sites will be minimal. That is, one flanking recombination site may be a FRT site where the second recombination site may be a mutated FRT site. The non-identical recombination sites used in the methods of the present disclosure prevent or greatly suppress recombination between the two flanking recombination sites and excision of the nucleotide sequence contained therein. Accordingly, it is recognized that any suitable non-identical recombination sites may be utilized in the present disclosure, including FRT and mutant FRT sites, FRT and lox sites, lox and mutant lox sites, as well as other recombination sites known in the art.

[0156] By suitable non-identical recombination site implies that in the presence of active recombinase, excision of sequences between two non-identical recombination sites occurs, if at all, with an efficiency considerably lower than the recombinationally-mediated exchange targeting arrangement of nucleotide sequences into the plant genome. Thus, suitable non-identical sites for use in the present disclosure include those sites where the efficiency of recombination between the sites is low; for example, where the efficiency is less than about 30 to about 50%, preferably less than about 10 to about 30%, more preferably less than about 5 to about 10%.

[0157] As noted above, the recombination sites in the targeting cassette correspond to those in the target site of the transformed plant. That is, if the target site of the transformed plant contains flanking non-identical recombination sites of FRT and a mutant FRT, the targeting cassette will contain the same FRT and mutant FRT non-identical recombination sites.

[0158] It is furthermore recognized that the recombinase, which is used in the disclosed methods, will depend upon the recombination sites in the target site of the transformed plant and the targeting cassette. That is, if FRT sites are utilized, the FLP recombinase will be needed. In the same manner, where lox sites are utilized, the Cre recombinase is required. If the non-identical recombination sites comprise both a FRT and a lox site, both the FLP and Cre recombinase will be required in the plant cell.

[0159] The FLP recombinase is a protein which catalyzes a site-specific reaction that is involved in amplifying the copy number of the two-micron plasmid of S. cerevisiae during DNA replication. FLP protein has been cloned and expressed. See, for example, Cox (1993) Proc. Natl. Acad. Sci. U.S.A 80: 4223-4227. The FLP recombinase for use in the present disclosure may be that derived from the genus Saccharomyces. It may be preferable to synthesize the recombinase using plant preferred codons for optimum expression in a plant of interest. See, for example, U.S. application Ser. No. 08/972,258 filed Nov. 18, 1997, entitled “Novel Nucleic Acid Sequence Encoding FLP Recombinase,” herein incorporated by reference.

[0160] The bacteriophage recombinase Cre catalyzes site-specific recombination between two lox sites. The Cre recombinase is known in the art. See, for example, Guo et al. (1997) Nature 389: 40-46; Abremski et al. (1984) J. Biol. Chem. 259: 1509-1514; Chen et al. (1996) Somat. Cell Mol. Genet. 22: 477-488; and Shaikh et al. (1977) J. Biol. Chem. 272: 5695-5702. All of which are herein incorporated by reference. Such Cre sequence may also be synthesized using plant preferred codons.

[0161] Where appropriate, the nucleotide sequences to be inserted in the plant genome may be optimized for increased expression in the transformed plant. Where mammalian, yeast, or bacterial genes are used in the present disclosure, they can be synthesized using plant preferred codons for improved expression. It is recognized that for expression in monocots, dicot genes can also be synthesized using monocot preferred codons. Methods are available in the art for synthesizing plant preferred genes. See, for example, U.S. Pat. Nos. 5,380,831, 5,436,391, and Murray et al. (1989) Nucleic Acids Res. 17: 477-498, herein incorporated by reference. The plant preferred codons may be determined from the codons utilized more frequently in the proteins expressed in the plant of interest. It is recognized that monocot or dicot preferred sequences may be constructed as well as plant preferred sequences for particular plant species. See, for example, EPA 0359472; EPA 0385962; WO 91/16432; Perlak et al. (1991) Proc. Natl. Acad. Sci. USA, 88: 3324-3328; and Murray et al. (1989) Nucleic Acids Research, 17: 477-498. U.S. Pat. Nos. 5,380,831; 5,436,391; and the like, herein incorporated by reference. It is further recognized that all or any part of the gene sequence may be optimized or synthetic. That is, fully optimized or partially optimized sequences may also be used.

[0162] Additional sequence modifications are known to enhance gene expression in a cellular host and can be used in the present disclosure. These include elimination of sequences encoding spurious polyadenylation signals, exon-intron splice site signals, transposon-like repeats, and other such well-characterized sequences, which may be deleterious to gene expression. The G-C content of the sequence may be adjusted to levels average for a given cellular host, as calculated by reference to known genes expressed in the host cell. When possible, the sequence is modified to avoid predicted hairpin secondary RNA structures. The present disclosure also encompasses novel FLP recombination target sites (FRT). The FRT has been identified as a minimal sequence comprising two 13 base pair repeats, separated by an eight (8) base spacer. The nucleotides in the spacer region can be replaced with a combination of nucleotides, so long as the two 13-base repeats are separated by eight nucleotides. It appears that the actual nucleotide sequence of the spacer is not critical; however, for the practice of the present disclosure, some substitutions of nucleotides in the space region may work better than others. The eight-base pair spacer is involved in DNA-DNA pairing during strand exchange. The asymmetry of the region determines the direction of site alignment in the recombination event, which will subsequently lead to either inversion or excision. As indicated above, most of the spacer can be mutated without a loss of function. See, for example, Schlake and Bode (1994) Biochemistry 33: 12746-12751, herein incorporated by reference.

[0163] Novel FRT mutant sites can be used in the practice of the disclosed methods. Such mutant sites may be constructed by PCR-based mutagenesis. Although mutant FRT sites are known (see SEQ ID Nos 2, 3, 4 and 5 of WO1999/025821), it is recognized that other mutant FRT sites may be used in the practice of the present disclosure. The present disclosure is not restricted to the use of a particular FRT or recombination site, but rather that non-identical recombination sites or FRT sites can be utilized for targeted insertion and expression of nucleotide sequences in a plant genome. Thus, other mutant FRT sites can be constructed and utilized based upon the present disclosure.

[0164] As discussed above, bringing genomic DNA containing a target site with non-identical recombination sites together with a vector containing a T-DNA expression cassette with corresponding non-identical recombination sites, in the presence of the recombinase, results in recombination. The nucleotide sequence of the T-DNA expression cassette located between the flanking recombination sites is exchanged with the nucleotide sequence of the target site located between the flanking recombination sites. In this manner, nucleotide sequences of interest may be precisely incorporated into the genome of the host.

[0165] It is recognized that many variations of the present disclosure can be practiced. For example, target sites can be constructed having multiple non-identical recombination sites. Thus, multiple genes or nucleotide sequences can be stacked or ordered at precise locations in the plant genome. Likewise, once a target site has been established within the genome, additional recombination sites may be introduced by incorporating such sites within the nucleotide sequence of the T-DNA expression cassette and the transfer of the sites to the target sequence. Thus, once a target site has been established, it is possible to subsequently add sites, or alter sites through recombination.

[0166] Another variation includes providing a promoter or transcription initiation region operably linked with the target site in an organism. Preferably, the promoter will be 5′ to the first recombination site. By transforming the organism with a T-DNA expression cassette comprising a coding region, expression of the coding region will occur upon integration of the T-DNA expression cassette into the target site. This aspect provides for a method to select transformed cells, particularly plant cells, by providing a selectable marker sequence as the coding sequence.

[0167] Other advantages of the present system include the ability to reduce the complexity of integration of transgenes or transferred DNA in an organism by utilizing T-DNA expression cassettes as discussed above and selecting organisms with simple integration patterns. In the same manner, preferred sites within the genome can be identified by comparing several transformation events. A preferred site within the genome includes one that does not disrupt expression of essential sequences and provides for adequate expression of the transgene sequence.

[0168] The disclosed methods also provide for means to combine multiple expression cassettes at one location within the genome. Recombination sites may be added or deleted at target sites within the genome.

[0169] Any means known in the art for bringing the three components of the system together may be used in the present disclosure. For example, a plant can be stably transformed to harbor the target site in its genome. The recombinase may be transiently expressed or provided. Alternatively, a nucleotide sequence capable of expressing the recombinase may be stably integrated into the genome of the plant. In the presence of the corresponding target site and the recombinase, the T-DNA expression cassette, flanked by corresponding non-identical recombination sites, is inserted into the transformed plant's genome.

[0170] Alternatively, the components of the system may be brought together by sexually crossing transformed plants. In this aspect, a transformed plant, parent one, containing a target site integrated in its genome can be sexually crossed with a second plant, parent two, that has been genetically transformed with a T-DNA expression cassette containing flanking non-identical recombination sites, which correspond to those in plant one. Either plant one or plant two contains within its genome a nucleotide sequence expressing recombinase. The recombinase may be under the control of a constitutive or inducible promoter. In this manner, expression of recombinase and subsequent activity at the recombination sites can be controlled.

[0171] The disclosed methods are useful in targeting the integration of transferred nucleotide sequences to a specific chromosomal site. The nucleotide sequence may encode any nucleotide sequence of interest. Particular genes of interest include those which provide a readily analyzable functional feature to the host cell and/or organism, such as marker genes, as well as other genes that alter the phenotype of the recipient cells, and the like. Thus, genes effecting plant growth, height, susceptibility to disease, insects, nutritional value, and the like may be utilized in the present disclosure. The nucleotide sequence also may encode an ‘antisense’ sequence to turn off or modify gene expression.

[0172] It is recognized that the nucleotide sequences will be utilized in a functional expression unit or T-DNA expression cassette. By functional expression unit or T-DNA expression cassette is intended, the nucleotide sequence of interest with a functional promoter, and in most instances a termination region. There are various ways to achieve the functional expression unit within the practice of the present disclosure. In one aspect of the present disclosure, the nucleic acid of interest is transferred or inserted into the genome as a functional expression unit.

[0173] Alternatively, the nucleotide sequence may be inserted into a site within the genome which is 3′ to a promoter region. In this latter instance, the insertion of the coding sequence 3′ to the promoter region is such that a functional expression unit is achieved upon integration. The T-DNA expression cassette will comprise a transcriptional initiation region, or promoter, operably linked to the nucleic acid encoding the peptide of interest. Such an expression cassette is provided with a plurality of restriction sites for insertion of the gene or genes of interest to be under the transcriptional regulation of the regulatory regions.

[0174] The following examples are offered by way of illustration and not by way of limitation.

### EXAMPLES

[0175] The aspects of the disclosure are further defined in the following Examples, in which parts and percentages are by weight and degrees are Celsius, unless otherwise stated. These Examples, while indicating aspects of the disclosure, are given by way of illustration only. From the above discussion and these Examples, one skilled in the art can ascertain the essential characteristics of the aspects of the disclosure, and without departing from the spirit and scope thereof, can make various changes and modifications of them to adapt to various usages and conditions. Thus, various modifications in addition to those shown and described herein will be apparent to those skilled in the art from the foregoing description. Such modifications are also intended to fall within the scope of the appended claims.

### Example 1: Sequences

[0176] Sequences useful in the methods of the disclosure are presented in Table 2.

TABLE 2

| | Polynucleotide | | |
|---|---|---|---|
| SEQ | (DNA) or | | |
| ID | Polypeptide | | |
| NO: | (PRT) | NAME | DESCRIPTION |
| 1 | DNA | PHP35648 | RB + UBI1ZM PRO::UBI1ZM |
| | | | 5UTR::UBI1ZM |
| | | | INTRON1::LOXP::AM- |
| | | | CYAN1::PINII TERM + RAB17 |
| | | | PRO::MO-CRE-EXON1::ST-LS1 |
| | | | INTRON1::MO-CRE |
| | | | EXON2::PINII TERM + GZ-W64A |
| | | | TERM + NOS PRO::ZM- |
| | | | WUS2::PINII TERM + CAMV35S |
| | | | ENH::UBI1ZM PRO |
| | | | PRO::UBI1ZM 5UTR::UBI1ZM |
| | | | INTRON1::ZM-ODP2::PINII |
| | | | TERM + LOXP::ZS-YELLOW1 |
| | | | N1::PINII TERM + UBI1ZM |
| | | | PRO::UBI1ZM 5UTR::UBI1ZM |
| | | | INTRON1::MO-PAT::PINII TERM + |
| | | | LB |
| 2 | DNA | PHP46332 | RB + UBI1ZM 5UTR::UBI1ZM |
| | | | INTRONI::LOXP::AM- |
| | | | CYAN1::PINII TERM + RAB17 |
| | | | PRO::MO-CRE-EXON1::ST-LS1 |
| | | | INTRON1::MO-CRE |
| | | | EXON2::PINII TERM + NOS |
| | | | PRO::ZM-WUS2::PINII TERM + |
| | | | UBI1ZM PRO PRO::UBI1ZM |
| | | | 5UTR::UBI1ZM INTRONI::ZM- |
| | | | ODP2::PINII TERM + LOXP::ZS- |
| | | | YELLOW1 N1::PINII TERM + |
| | | | UBI1ZM PRO::UBI1ZM |
| | | | 5UTR::UBI1ZM INTRON1::MO- |
| | | | PAT::PINII TERM + LB |
| 3 | DNA | PHP5096 | UBI1ZM 5UTR::UBI1ZM |
| | | | INTRON1::LOXP::FLPM::PINII |
| | | | TERM |
| 4 | DNA | PHP71539 | VIRB1 + VIRB2 + VIRB3 + VIRB4 + |
| | | | VIRB5 + VIRB6 + VIRB7 + |
| | | | VIRB8 + VIRB9 + VIRB10 + |
| | | | VIRB11 + VIRG + VIRC2 + |
| | | | VIRC1 + VIRD1 + VIRD2 + |
| | | | VIRD3 + VIRD4 + VIRD5 + |
| | | | VIRE1 + VIRE2 + VIRE3 + GENT + |
| | | | COLE1 ORI + PVS1 ORI |
| 5 | DNA | PHP81855 | RB + LOXP + 8xDR5 |
| | | | ENH::CAMV35S PRO::TOP3::ZM- |
| | | | WUS2::PINII TERM + PLTP |
| | | | PRO::TOP::ZM-ODP2::OS-T28 |
| | | | TERM + RAB17 PRO::MO-CRE- |
| | | | EXON1::ST-LS1 INTRON1::MO- |
| | | | CRE EXON2::PINII + LOXP + |
| | | | UBI1ZM 5UTR::UBI1ZM |
| | | | INTRON1::FRT1::NPTII::PINII |
| | | | TERM + UBI1ZM PRO::UBI1ZM |
| | | | 5UTR::UBI1ZM INTRON1::MO- |
| | | | PAT::PINII TERM + FRT6 + LB |
| 6 | DNA | PHP81856 | RB + LOXP + ZM-AXIG1 |
| | | | PRO::TOP::ZM-WUS2::IN2-1 |
| | | | TERM + PLTP PRO::TOP::ZM- |
| | | | ODP2::OS-T28 TERM + RAB17 |
| | | | PRO::MO-CRE-EXON1::ST-LS1 |
| | | | INTRON1::MO-CRE |
| | | | EXON2::PINII + LOXP + UBI1ZM |
| | | | 5UTR::UBI1ZM |
| | | | INTRON1::FRT1::NPTII::PINII |
| | | | TERM + UBI1ZM PRO::UBI1ZM |
| | | | 5UTR::UBI1ZM INTRON1::MO- |
| | | | PAT::PINII TERM + FRT6 + LB |
| 7 | DNA | PHP81857 | RB + LOXP + NOS |
| | | | PRO::2xTOP::ZM-WUS2::IN2-1 |
| | | | TERM + PLTP PRO::TOP::ZM- |
| | | | ODP2::OS-T28 TERM + RAB17 |
| | | | PRO::MO-CRE-EXON1::ST-LS1 |
| | | | INTRON1::MO-CRE |
| | | | EXON2::PINII + LOXP + UBI1ZM |
| | | | 5UTR::UBI1ZM |
| | | | INTRON1::FRT1::NPTII::PINII |
| | | | TERM + UBI1ZM PRO::UBI1ZM |
| | | | 5UTR::UBI1ZM INTRON1::AM- |
| | | | CYAN1::PINII TERM + FRT6 + |
| | | | LB |
| 8 | DNA | PHP81858 | RB + LOXP + NOS PRO::ZM- |
| | | | WUS2::IN2-1 TERM + PLTP |
| | | | PRO::TOP::ZM-ODP2::OS-T28 |
| | | | TERM + RAB17 PRO::MO-CRE- |
| | | | EXON1::ST-LS1 INTRON1::MO- |
| | | | CRE EXON2::PINII + LOXP + |
| | | | UBI1ZM PRO::UBI1ZM |
| | | | 5UTR::UBI1ZM |
| | | | INTRON1::FRT1::NPTII::PINII |
| | | | TERM + UBI1ZM PRO::UBI1ZM |
| | | | 5UTR::UBI1ZM INTRON1::AM- |
| | | | CYAN1::PINII TERM + FRT6 + |
| | | | LB |
| 9 | DNA | PHP83475 | RB + LOXP + PLTP PRO::ZM- |
| | | | WUS2::IN2-1 TERM + AT-5-IV-2 |
| | | | INS + ZM-HSP17.7 PRO::MO- |
| | | | CRE-EXON1::ST-LS1 |
| | | | INTRON1::MO-CRE |
| | | | EXON2::PINII + UBI1ZM |
| | | | PRO::UBI1ZM 5UTR::UBI1ZM |
| | | | INTRON1::DS-RED2::PINII |
| | | | TERM + LOXP + SB-ALS |
| | | | PRO::ZM-ALS (HRA)::PINII |
| | | | TERM + LB |
| 10 | DNA | PHP83621 | RB + LOXP + PLTP PRO::ZM- |
| | | | WUS2::IN2-1 TERM + AT-5-IV-2 |
| | | | INS + PLTP PRO::TOP::ZM- |
| | | | ODP2::OS-T28 TERM + GLB1 |
| | | | PRO::MO-CRE-EXON1::ST-LS1 |
| | | | INTRON1::MO-CRE |
| | | | EXON2::PINII + LOXP + SB-ALS |
| | | | PRO::ZM-ALS (HRA)::PINII |
| | | | TERM + LB |
| 11 | DNA | PHP83652 | RB + LOXP + ZM-AXIG1 |
| | | | PRO::ZM-WUS2::IN2-1 TERM + |
| | | | AT-5-IV-2 INS + PLTP |
| | | | PRO::TOP::ZM-ODP2::OS-T28 |
| | | | TERM::PINII TERM::CZ19B1 |
| | | | TERM + ZM-HSP18A PRO::MO- |
| | | | CRE-EXON1::ST-LS1 |
| | | | INTRON1::MO-CRE |
| | | | EXON2::PINII + SB-UBI PRO:: |
| | | | SB-UBI INTRON1::ZS- |
| | | | GREEN1::OS-UBI TERM + LOXP + |
| | | | SB-ALS PRO::ZM-ALS |
| | | | (HRA)::PINII TERM + LB |
| 12 | DNA | PHP89030 | ZM-PLTP PRO::ZM-ODP2::OS- |
| | | | T28 TERM + FMV ENH + PCSV |
| | | | ENH |
| 13 | DNA | PHP89179 | ZM-PLTP PRO::ZM-WUS2::IN2-1 |
| | | | TERM + PSW1 + GZ-W64A |
| | | | TERM + FL2 TERM |
| 14 | DNA | PHP90842 | RB + UBI1ZMPRO::UBI1ZM |
| | | | 5UTR::UBI1ZM |
| | | | INTRON1::FLPM-EXON1::ST- |
| | | | LS1 INTRON2::FLPM- |
| | | | EXON2::PINII TERM::AT-T9 |
| | | | TERM + FRT1::PMI::PINII |
| | | | TERM::CZ19B1 TERM + OS- |
| | | | ACTIN PRO::OS-ACTIN |
| | | | INTRON1::ZM-WUS2::ZM-IN2-1 |
| | | | TERM + UBI1ZMPRO::UBI1ZM |
| | | | 5UTR::UBI1ZM INTRON1::ZM- |
| | | | ODP2::OS-T28 TERM::GZ-W64A |
| | | | TERM::FL2 TERM + ZM- |
| | | | HSP17.7 PRO::MO-CRE- |
| | | | EXON1::ST-LS1 INTRON1::MO- |
| | | | CRE EXON2::SB-CPI8 TERM + |
| | | | LOXP + SB-UBI PRO::SB-UBI |
| | | | INTRON1::DS-RED2::SB-ACTIN |
| | | | TERM + FRT6 + LB |
| 15 | DNA | PHP92365 | RB + LOXP + PLTP PRO::ZM- |
| | | | WUS2::IN2-1 TERM + |
| | | | UBI1ZMPRO::UBI1ZM |
| | | | 5UTR::UBI1ZM INTRON1::ZM- |
| | | | LEC1::OS-UBI TERM + LOXP + |
| | | | SI-UBI3 PRO::SI-UBI3 |
| | | | INTRON1::ZS-GREEN1::PINII |
| | | | TERM + SB-ALS PRO::ZM-ALS |
| | | | (HRA)::SB-PEPC1 TERM + LB |
| 16 | DNA | PHP92765 | RB + LOXP + PLTP PRO::ZM- |
| | | | WUS2::IN2-1 TERM + ZM-PLTP2 |
| | | | PRO::ZM-MPKL-A::ZM MIRNA |
| | | | PRECURSOR 396H::ZM-PKL-A |
| | | | STAR SEQ::SB-GKAF TERM + |
| | | | ZM-HSP17.7 PRO::MO-CRE- |
| | | | EXON1::ST-LS1 INTRON1::MO- |
| | | | CRE EXON2::PINII + LOXP + LB |
| 17 | DNA | PHP92928 | RB + FMV ENH::PCSV |
| | | | ENH::MMV ENH::PLTP |
| | | | PRO::ZM-WUS2::IN2-1 TERM + |
| | | | UBI1ZMPRO::UBI1ZM |
| | | | 5UTR::UBI1ZM INTRON1::ZM- |
| | | | LEC1::OS-T28 TERM + SI-UBI3 |
| | | | PRO::SI-UBI3 INTRON1::ZS- |
| | | | GREEN1::PINII TERM + SB-ALS |
| | | | PRO::ZM-ALS (HRA)::SB-PEPC1 |
| | | | TERM + LB |
| 18 | DNA | PHP93271 | RB + PLTP PRO::ZM-WUS2::IN2- |
| | | | 1 TERM + UBI1ZMPRO::UBI1ZM |
| | | | 5UTR::UBI1ZM INTRON1::REP A |
| | | | (WDV)::OS-T28 TERM + SB-UBI |
| | | | PRO::SB-UBI INTRON1::ZS- |
| | | | GREEN1::OS-UBI TERM + SB- |
| | | | ALS PRO::ZM-ALS (HRA)::SB- |
| | | | PEPC1 TERM + LB |
| 19 | DNA | PHP93559 | RB + LOXP + ZM-HSP17.7 |
| | | | PRO::MO-CRE-EXON1::ST-LS1 |
| | | | INTRON1::MO-CRE |
| | | | EXON2::PINII TERM + NOS |
| | | | PRO::ZM-WUS2::IN2-1 TERM + |
| | | | UBI1ZM PRO::UBI1ZM |
| | | | 5UTR::UBI1ZM INTRON1::ZM- |
| | | | ODP2::ZM-UBI TERM + LOXP + |
| | | | SB-UBI PRO::SB-UBI |
| | | | INTRON1::ZS-GREEN1::OS-UBI |
| | | | TERM + SB-UBI PRO::SB-UBI |
| | | | INTRON1::PMI::SB-UBI TERM + |
| | | | LB |
| 20 | DNA | PHP93613 | RB + LOXP + ZM-HSP17.7 |
| | | | PRO::MO-CRE-EXON1::ST-LS1 |
| | | | INTRON1::MO-CRE |
| | | | EXON2::PINII TERM + OS- |
| | | | ACTIN PRO::OS-ACTIN |
| | | | INTRON1::ZM-WUS2::IN2-1 |
| | | | TERM + UBI1ZM PRO::UBI1ZM |
| | | | 5UTR::UBI1ZM INTRON1::ZM- |
| | | | LEC1::OS-T28 TERM + LOXP + |
| | | | SB-UBI PRO::SB-UBI |
| | | | INTRON1::ZS-GREEN1::OS-UBI |
| | | | TERM + SI-ALS PRO::SI-ALS |
| | | | 5UTR::ZM-ALS (HRA)::SB-UBI |
| | | | TERM + LB |
| 21 | DNA | PHP93696 | RB + LOXP + ZM-HSP17.7 |
| | | | PRO::MO-CRE-EXON1::ST-LS1 |
| | | | INTRON1::MO-CRE |
| | | | EXON2::PINII TERM + 2xOC- |
| | | | EME1::UBI1ZM PRO::UBI1ZM |
| | | | 5UTR::UBI1ZM |
| | | | INTRON1::LOXP::2xOC- |
| | | | EME1::ZM-CAB PRO::ZM- |
| | | | WUS2::IN2-1 TERM + LOXP::ZM- |
| | | | LEC1::OS-T28 TERM + SB-UBI |
| | | | PRO::SB-UBI INTRON1::ZS- |
| | | | GREEN1::OS-UBI TERM + SI- |
| | | | ALS PRO::SI-ALS 5UTR::ZM- |
| | | | ALS (HRA)::SB-UBI TERM + LB |
| 22 | DNA | PHP93738 | RB + LOXP + ZM-HSP17.7 |
| | | | PRO::MO-CRE-EXON1::ST-LS1 |
| | | | INTRON1::MO-CRE |
| | | | EXON2::PINII TERM + OS- |
| | | | ACTIN PRO::OS-ACTIN |
| | | | INTRON1::ZM-WUS2::ZM-IN2-1 |
| | | | TERM + UBI1ZMPRO::UBI1ZM |
| | | | 5UTR::UBI1ZM INTRON1::ZM- |
| | | | ODP2::OS-T28 TERM + LOXP + |
| | | | SB-UBI PRO::SB-UBI |
| | | | INTRON1::ZS-GREEN1::OS-UBI |
| | | | TERM + SI-ALS PRO::SI-ALS |
| | | | 5UTR::ZM-ALS (HRA)::SB-UBI |
| | | | TERM + LB |
| 23 | DNA | PHP93739 | RB + LOXP + ZM-HSP17.7 |
| | | | PRO::MO-CRE-EXON1::ST-LS1 |
| | | | INTRON1::MO-CRE |
| | | | EXON2::PINII TERM + NOS |
| | | | PRO::ZM-WUS2::ZM-IN2-1 |
| | | | TERM + UBI1ZMPRO::UBI1ZM |
| | | | 5UTR::UBI1ZM INTRON1::ZM- |
| | | | ODP2::ZM-UBI TERM + LOXP + |
| | | | SB-UBI PRO::SB-UBI |
| | | | INTRON1::ZS-GREEN1::OS-UBI |
| | | | TERM + SI-ALS PRO::SI-ALS |
| | | | 5UTR::ZM-ALS (HRA)::SB-UBI |
| | | | TERM + LB |
| 24 | DNA | PHP93743 | RB + LOXP + ZM-HSP17.7 |
| | | | PRO::MO-CRE-EXON1::ST-LS1 |
| | | | INTRON1::MO-CRE |
| | | | EXON2::PINII TERM + SCBV |
| | | | PRO::SCBV 5UTR::ZM- |
| | | | WUS2::ZM-IN2-1 TERM + |
| | | | UBI1ZMPRO::UBI1ZM |
| | | | 5UTR::UBI1ZM INTRON1::REP A |
| | | | (WDV)::OS-T28 TERM + LOXP + |
| | | | SB-UBI PRO::SB-UBI |
| | | | INTRON1::ZS-GREEN1::OS-UBI |
| | | | TERM + SI-ALS PRO::SI-ALS |
| | | | 5UTR:ZM-ALS (HRA)::SB-UBI |
| | | | TERM + LB |
| 25 | DNA | PHP93766 | RB + LOXP + ZM-HSP17.7 |
| | | | PRO::MO-CRE-EXON1::ST-LS1 |
| | | | INTRON1::MO-CRE |
| | | | EXON2::PINII TERM + NOS |
| | | | PRO::ZM-WUS2::ZM-IN2-1 |
| | | | TERM + UBI1ZMPRO::UBI1ZM |
| | | | 5UTR::UBI1ZM INTRON1::ZM- |
| | | | LEC1::OS-T28 TERM + LOXP + |
| | | | SB-UBI PRO::SB-UBI |
| | | | INTRON1::ZS-GREEN1::OS-UBI |
| | | | TERM + SI-ALS PRO::SI-ALS |
| | | | 5UTR::ZM-ALS (HRA)::SB-UBI |
| | | | TERM + LB |
| 26 | DNA | PHP93925 | RB + UBI1ZMPRO::UBI1ZM |
| | | | 5UTR::UBI1ZM INTRON1::ZM- |
| | | | WUS2::ZM-IN2-1 TERM + FMV |
| | | | ENH:PCSV ENH:MMV ENH::SB- |
| | | | UBI PRO::SB-UBI1 INTRON1:: |
| | | | ZM-ODP2::ZM-UBI TERM + SB- |
| | | | UBI PRO::SB-UBI INTRON1::ZS- |
| | | | GREEN1::OS-UBI TERM + SI- |
| | | | ALS PRO::SI-ALS 5UTR::ZM- |
| | | | ALS (HRA)::SB-UBI TERM + LB |
| 27 | DNA | PHP93926 | RB + LOXP + ZM-HSP17.7 |
| | | | PRO::MO-CRE-EXON1::ST-LS1 |
| | | | INTRON1::MO-CRE |
| | | | EXON2::PINII TERM + NOS |
| | | | PRO::ZM-WUS2::ZM-IN2-1 |
| | | | TERM + UBI1ZMPRO::UBI1ZM |
| | | | 5UTR::UBI1ZM INTRON1::ZM- |
| | | | ODP2::OS-T28 TERM + LOXP + |
| | | | SB-UBI PRO::SB-UBI |
| | | | INTRON1::ZS-GREEN1::OS-UBI |
| | | | TERM + SI-ALS PRO::SI-ALS |
| | | | 5UTR::ZM-ALS (HRA)::SB-UBI |
| | | | TERM + LB |
| 28 | DNA | PHP93932 | RB + LOXP + FMV ENH::PCSV |
| | | | ENH::MMV ENH::ZM- |
| | | | EXP11232.1 PRO::ZM- |
| | | | WUS2::IN2-1 TERM + ZM- |
| | | | EXP13262.2 PRO::ZM-MPKL- |
| | | | A::ZM MIRNA PRECURSOR |
| | | | 396H::ZM-PKL-A STAR |
| | | | SEQ::ZM-EXP23070.1 TERM + |
| | | | LOXP + SB-UBI PRO::SB-UBI |
| | | | INTRON1::ZS-GREEN1::OS-UBI |
| | | | TERM + SI-ALS PRO::SI-ALS |
| | | | 5UTR::ZM-ALS (HRA)::SB-UBI |
| | | | TERM + LB |
| 29 | DNA | PHP93933 | RB + NOS PRO::ZM-WUS2::IN2-1 |
| | | | TERM + FMV ENH::PCSV |
| | | | ENH::MMV ENH::UBI1ZM |
| | | | PRO::UBI1ZM 5UTR::UBI1ZM |
| | | | INTRON1::ZM-ODP2::OS-T28 |
| | | | TERM + SB-UBI PRO::SB-UBI |
| | | | INTRON1::ZS-GREEN1::OS-UBI |
| | | | TERM + SB-ALS PRO::ZM-ALS |
| | | | (HRA)::SB-PEPC1 TERM + LB |
| 30 | DNA | PHP94331 | RB + LOXP + ZM-HSP17.7 |
| | | | PRO::MO-CRE-EXON1::ST-LS1 |
| | | | INTRON1::MO-CRE |
| | | | EXON2::PINII TERM + NOS |
| | | | PRO::ZM-WUS2::ZM-IN2-1 |
| | | | TERM + UBI1ZMPRO::UBI1ZM |
| | | | 5UTR::UBI1ZM INTRON1::ZM- |
| | | | ODP2::ZM-UBI TERM + ZM-CAB |
| | | | PRO::ZM-CAB 5UTR::ZM-MPKL- |
| | | | A::ZM MIRNA PRECURSOR |
| | | | 396H::ZM-PKL-A STAR |
| | | | SEQ::ZM-EXP23070.1 TERM + |
| | | | LOXP + SB-UBI PRO::SB-UBI |
| | | | INTRON1::ZS-GREEN1::OS-UBI |
| | | | TERM + SI-ALS PRO::SI-ALS |
| | | | 5UTR::ZM-ALS (HRA)::SB-UBI |
| | | | TERM + LB |
| 31 | DNA | PHP94332 | RB + LOXP + ZM-HSP17.7 |
| | | | PRO::MO-CRE-EXON1::ST-LS1 |
| | | | INTRON1::MO-CRE |
| | | | EXON2::PINII TERM + NOS |
| | | | PRO::ZM-WUS2::ZM-IN2-1 |
| | | | TERM + UBI1ZMPRO::UBI1ZM |
| | | | 5UTR::UBI1ZM INTRON1::ZM- |
| | | | ODP2::ZM-UBI TERM + |
| | | | UBI1ZMPRO::UBI1ZM |
| | | | 5UTR::UBI1ZM INTRON1::ZM- |
| | | | MPKL-A::ZM MIRNA |
| | | | PRECURSOR 396H::ZM-PKL-A |
| | | | STAR SEQ::ZM-EXP23070.1 |
| | | | TERM + LOXP + SB-UBI |
| | | | PRO::SB-UBI INTRON1::ZS- |
| | | | GREEN1::OS-UBI TERM + SI- |
| | | | ALS PRO::SI-ALS 5UTR::ZM- |
| | | | ALS (HRA)::SB-UBI TERM + LB |
| 32 | DNA | PHP94636 | RB + LOXP + 8xDR5 |
| | | | ENH::CAMV35S PRO::TOP3::ZM- |
| | | | WUS2::PINII TERM + ZM-PLTP |
| | | | PRO::TOP::ZM-ODP2::OS-T28 |
| | | | TERM + RAB17 PRO::MO-CRE- |
| | | | EXON1::ST-LS1 INTRON1::MO- |
| | | | CRE EXON2::PINII + LOXP + |
| | | | UBI1ZM 5UTR::UBI1ZM |
| | | | INTRON1::FRT1::NPTII: PINII |
| | | | TERM + UBI1ZM PRO::UBI1ZM |
| | | | 5UTR::UBI1ZM INTRON1::AM- |
| | | | CYAN1::PINII TERM + FRT6 + |
| | | | LB |
| 33 | DNA | PHP94682 | RB + LOXP + ZM-HSP17.7 |
| | | | PRO::MO-CRE-EXON1::ST-LS1 |
| | | | INTRON1::MO-CRE |
| | | | EXON2::PINII TERM + SCBV |
| | | | PRO::SCBV 5UTR::ZM- |
| | | | WUS2::ZM-IN2-1 TERM + |
| | | | UBI1ZMPRO::UBI1ZM |
| | | | 5UTR::UBI1ZM INTRON1::ZM- |
| | | | LEC1::OS-T28 TERM + LOXP + |
| | | | SB-UBI PRO::SB-UBI |
| | | | INTRON1::ZS-GREEN1::OS-UBI |
| | | | TERM + SI-ALS PRO::SI-ALS |
| | | | 5UTR::ZM-ALS (HRA)::SB-UBI |
| | | | TERM + LB |
| 34 | DNA | PHP94684 | RB + LOXP + ZM-HSP17.7 |
| | | | PRO::MO-CRE-EXON1::ST-LS1 |
| | | | INTRON1::MO-CRE |
| | | | EXON2::PINII TERM + IN2-1 |
| | | | TERM::ZM-WUS2::ZM-UBI1 |
| | | | INTRON1 (B104)::ZM-UBI1 5UTR |
| | | | (B104)::ZM-UBI1 MINPRO (B104) + |
| | | | UBI1ZMPRO::UBI1ZM |
| | | | 5UTR::UBI1ZM INTRON1::ZM- |
| | | | ODP2::ZM-UBI TERM + LOXP + |
| | | | SB-UBI PRO::SB-UBI |
| | | | INTRON1::ZS-GREEN1::OS-T28 |
| | | | TERM + SI-ALS PRO::SI-ALS |
| | | | 5UTR: ZM-ALS (HRA)::SB-UBI |
| | | | TERM + LB |
| 35 | DNA | PHP94685 | RB + LOXP + IN2-1 TERM::ZM- |
| | | | WUS2::ZM-UBI1 INTRON1 |
| | | | (B104)::ZM-UBI1 5UTR |
| | | | (B104)::ZM-UBI1 MINPRO |
| | | | (B104)::MMV ENH::PCSV |
| | | | ENH::FMV |
| | | | ENH::UBI1ZMPRO::UBI1ZM |
| | | | 5UTR::UBI1ZM INTRON1::ZM- |
| | | | ODP2::ZM-UBI TERM + LOXP + |
| | | | SB-UBI PRO::SB-UBI |
| | | | INTRON1::ZS-GREEN1::OS-T28 |
| | | | TERM + SI-ALS PRO::SI-ALS |
| | | | 5UTR::ZM-ALS (HRA)::SB-UBI |
| | | | TERM + LB |
| 36 | DNA | PHP94715 | RB + LOXP + 8xDR5 |
| | | | ENH::CAMV35S PRO::ZM- |
| | | | WUS2::PINII TERM + UBI1ZM |
| | | | PRO::UBI1ZM 5UTR::UBI1ZM |
| | | | INTRON1::ZM-ODP2::PINII |
| | | | TERM + RAB17 PRO::MO-CRE- |
| | | | EXON1::ST-LS1 INTRON1::MO- |
| | | | CRE EXON2::PINII + LOXP + |
| | | | UBI1ZM PRO::UBI1ZM |
| | | | 5UTR::UBI1ZM |
| | | | INTRON1::FRT1::NPTII::PINII |
| | | | TERM + UBI1ZM PRO::UBI1ZM |
| | | | 5UTR::UBI1ZM INTRON1::AM- |
| | | | CYAN1::PINII TERM + FRT6 + |
| | | | LB |
| 37 | DNA | PHP95067 | RB + LOXP + NOS PRO::ZM- |
| | | | WUS2::PINII TERM + UBI1ZM |
| | | | PRO::UBI1ZM 5UTR::UBI1ZM |
| | | | INTRON1::ZM-CUC1-2::SB- |
| | | | GKAF TERM + ZM-HSP17.7 |
| | | | PRO::MO-CRE-EXON1::ST-LS1 |
| | | | INTRON1::MO-CRE |
| | | | EXON2::PINII TERM::OS-UBI |
| | | | TERM + LOXP + SI-UBI3 |
| | | | PRO::SI-UBI3 INTRON1::ZS- |
| | | | GREEN1::PINII TERM + SB-ALS |
| | | | PRO::ZM-ALS (HRA)::SB-PEPC1 |
| | | | TERM + LB |
| 38 | DNA | PHP95068 | RB + LOXP + NOS PRO::ZM- |
| | | | WUS2::PINII TERM + UBI1ZM |
| | | | PRO::UBI1ZM 5UTR::UBI1ZM |
| | | | INTRON1::ZM-CUC2::SB-GKAF |
| | | | TERM + ZM-HSP17.7 PRO::MO- |
| | | | CRE-EXON1::ST-LS1 |
| | | | INTRON1::MO-CRE |
| | | | EXON2::PINII TERM::OS-UBI |
| | | | TERM + LOXP + SI-UBI3 |
| | | | PRO::SI-UBI3 INTRON1::ZS- |
| | | | GREEN1::PINII TERM + SB-ALS |
| | | | PRO::ZM-ALS (HRA)::SB-PEPC1 |
| | | | TERM + LB |
| 39 | DNA | PHP95069 | RB + LOXP + NOS PRO::ZM- |
| | | | WUS2::PINII TERM + UBI1ZM |
| | | | PRO::UBI1ZM 5UTR::UBI1ZM |
| | | | INTRON1::ZM-CUC3-2::SB- |
| | | | GKAF TERM + ZM-HSP17.7 |
| | | | PRO::MO-CRE-EXON1::ST-LS1 |
| | | | INTRON1::MO-CRE |
| | | | EXON2::PINII TERM::OS-UBI |
| | | | TERM + LOXP + SI-UBI3 |
| | | | PRO::SI-UBI3 INTRON1::ZS- |
| | | | GREEN1::PINII TERM + SB-ALS |
| | | | PRO::ZM-ALS (HRA)::SB-PEPC1 |
| | | | TERM + LB |
| 40 | DNA | PHP95070 | RB + LOXP + NOS PRO::ZM- |
| | | | WUS2::PINII TERM + UBI1ZM |
| | | | PRO::UBI1ZM 5UTR::UBI1ZM |
| | | | INTRON1::ZM-GPCNAC-1::SB- |
| | | | GKAF TERM + ZM-HSP17.7 |
| | | | PRO::MO-CRE-EXON1::ST-LS1 |
| | | | INTRON1::MO-CRE |
| | | | EXON2::PINII TERM::OS-UBI |
| | | | TERM + LOXP + SI-UBI3 |
| | | | PRO::SI-UBI3 INTRON1::ZS- |
| | | | GREEN1::PINII TERM + SB-ALS |
| | | | PRO::ZM-ALS (HRA)::SB-PEPC1 |
| | | | TERM + LB |
| 41 | DNA | PHP95071 | RB + LOXP + NOS PRO::ZM- |
| | | | WUS2::PINII TERM + UBI1ZM |
| | | | PRO::UBI1ZM 5UTR::UBI1ZM |
| | | | INTRON1::AT-RKD4::SB-GKAF |
| | | | TERM + ZM-HSP17.7 PRO::MO- |
| | | | CRE-EXON1::ST-LS1 |
| | | | INTRON1::MO-CRE |
| | | | EXON2::PINII TERM::OS-UBI |
| | | | TERM + LOXP + SI-UBI3 |
| | | | PRO::SI-UBI3 INTRON1::ZS- |
| | | | GREEN1::PINII TERM + SB-ALS |
| | | | PRO::ZM-ALS (HRA)::SB-PEPC1 |
| | | | TERM + LB |
| 42 | DNA | PHP95072 | RB + LOXP + FT-MEM1::NOS |
| | | | PRO::ZM-WUS2::PINII TERM + |
| | | | UBI1ZM PRO::UBI1ZM |
| | | | 5UTR::UBI1ZM INTRON1::ZM- |
| | | | ODP2::PINII TERM + ZM- |
| | | | HSP17.7 PRO::MO-CRE- |
| | | | EXON1::ST-LS1 INTRON1::MO- |
| | | | CRE EXON2::PINII TERM::OS- |
| | | | UBI TERM + LOXP + SI-UBI3 |
| | | | PRO::SI-UBI3 INTRON1::ZS- |
| | | | GREEN1::PINII TERM + SB-ALS |
| | | | PRO::ZM-ALS (HRA)::SB-PEPC1 |
| | | | TERM + LB |
| 43 | DNA | PHP95073 | RB + LOXP + ZM-PEPC1 |
| | | | PRO::ZM-WUS2::PINII TERM + |
| | | | UBI1ZM PRO::UBI1ZM |
| | | | 5UTR::UBI1ZM INTRON1::ZM- |
| | | | ODP2::PINII TERM + ZM- |
| | | | HSP17.7 PRO::MO-CRE- |
| | | | EXON1::ST-LS1 INTRON1::MO- |
| | | | CRE EXON2::PINII TERM::OS- |
| | | | UBI TERM + LOXP + SI-UBI3 |
| | | | PRO::SI-UBI3 INTRON1::ZS- |
| | | | GREEN1::PINII TERM + SB-ALS |
| | | | PRO::ZM-ALS (HRA)::SB-PEPC1 |
| | | | TERM + LB |
| 44 | DNA | PHP95074 | RB + LOXP + ZM-DIURNAL 12 |
| | | | PRO::ZM-WUS2::PINII TERM + |
| | | | UBI1ZM PRO::UBI1ZM |
| | | | 5UTR::UBI1ZM INTRON1::ZM- |
| | | | ODP2::PINII TERM + ZM- |
| | | | HSP17.7 PRO::MO-CRE- |
| | | | EXON1::ST-LS1 INTRON1::MO- |
| | | | CRE EXON2::PINII TERM::OS- |
| | | | UBI TERM + LOXP + SI-UBI3 |
| | | | PRO::SI-UBI3 INTRON1::ZS- |
| | | | GREEN1::PINII TERM + SB-ALS |
| | | | PRO::ZM-ALS (HRA)::SB-PEPC1 |
| | | | TERM + LB |
| 45 | DNA | PHP95075 | RB + LOXP + NOS PRO::ZM- |
| | | | WUS2::PINII TERM + UBI1ZM |
| | | | PRO::UBI1ZM 5UTR::UBI1ZM |
| | | | INTRON1::AT-LEC2::SB-GKAF |
| | | | TERM + ZM-HSP17.7 PRO::MO- |
| | | | CRE-EXON1::ST-LS1 |
| | | | INTRON1::MO-CRE |
| | | | EXON2::PINII TERM::OS-UBI |
| | | | TERM + LOXP + SI-UBI3 |
| | | | PRO::SI-UBI3 INTRON1::ZS- |
| | | | GREEN1::PINII TERM + SB-ALS |
| | | | PRO::ZM-ALS (HRA)::SB-PEPC1 |
| | | | TERM + LB |
| 46 | DNA | PHP95205 | RB + LOXP + RUBISCO SSU |
| | | | PRO::ZM-WUS2::PINII TERM + |
| | | | UBI1ZM PRO::UBI1ZM |
| | | | 5UTR::UBI1ZM INTRON1::ZM- |
| | | | ODP2::PINII TERM + ZM- |
| | | | HSP17.7 PRO::MO-CRE- |
| | | | EXON1::ST-LS1 INTRON1::MO- |
| | | | CRE EXON2::PINII TERM::OS- |
| | | | UBI TERM + LOXP + SI-UBI3 |
| | | | PRO::SI-UBI3 INTRON1::ZS- |
| | | | GREEN1::PINII TERM + SB-ALS |
| | | | PRO::ZM-ALS (HRA)::SB-PEPC1 |
| | | | TERM + LB |
| 47 | DNA | PHP95385 | RB + LOXP + OS-ACTIN |
| | | | PRO::OS-ACTIN INTRON1::ZM- |
| | | | WUS2::ZM-IN2-1 TERM + |
| | | | UBI1ZMPRO::UBI1ZM |
| | | | 5UTR::UBI1ZM INTRON1::ZM- |
| | | | ODP2::OS-T28 TERM::GZ-W64A |
| | | | TERM::FL2 TERM + ZM-HSP17.7 |
| | | | PRO::MO-CRE-EXON1::ST-LS1 |
| | | | INTRON1::MO-CRE EXON2::SB- |
| | | | CPI8 TERM + LOXP + SB-UBI |
| | | | PRO::SB-UBI INTRON1::ZS- |
| | | | GREEN1::OS-UBI TERM + SI- |
| | | | ALS PRO::SI-ALS 5UTR::ZM- |
| | | | ALS (HRA)::SB-UBI TERM + LB |
| 48 | DNA | PHP95393 | RB + LOXP + CSVMV |
| | | | PRO::CSVMV 5UTR::ZM- |
| | | | WUS2::PINII TERM + UBI1ZM |
| | | | PRO::UBI1ZM 5UTR::UBI1ZM |
| | | | INTRON1::ZM-ODP2::PINII |
| | | | TERM + ZM-HSP17.7 PRO::MO- |
| | | | CRE-EXON1::ST-LS1 |
| | | | INTRON1::MO-CRE |
| | | | EXON2::PINII TERM::OS-UBI |
| | | | TERM + LOXP + SI-UBI3 |
| | | | PRO::SI-UBI3 INTRON1::ZS- |
| | | | GREEN1::PINII TERM + SB-ALS |
| | | | PRO::ZM-ALS (HRA)::SB-PEPC1 |
| | | | TERM + LB |
| 49 | DNA | PHP95394 | RB + LOXP + ZMEXP13262.1 |
| | | | PRO::ZM-WUS2::PINII TERM + |
| | | | UBI1ZM PRO::UBI1ZM |
| | | | 5UTR::UBI1ZM INTRON1::ZM- |
| | | | ODP2::PINII TERM + ZM- |
| | | | HSP17.7 PRO::MO-CRE- |
| | | | EXON1::ST-LS1 INTRON1::MO- |
| | | | CRE EXON2::PINII TERM::OS- |
| | | | UBI TERM + LOXP + SI-UBI3 |
| | | | PRO::SI-UBI3 INTRON1::ZS- |
| | | | GREEN1::PINII TERM + SB-ALS |
| | | | PRO::ZM-ALS (HRA)::SB-PEPC1 |
| | | | TERM + LB |
| 50 | DNA | PHP95499 | RB + LOXP + ZM-HSP17.7 |
| | | | PRO::MO-CRE-EXON1::ST-LS1 |
| | | | INTRON1::MO-CRE |
| | | | EXON2::PINII TERM + OS- |
| | | | ACTIN PRO::OS-ACTIN |
| | | | INTRON1::ZM-WUS2::ZM-IN2-1 |
| | | | TERM + UBI1ZMPRO::UBI1ZM |
| | | | 5UTR::UBI1ZM INTRON1::ZM- |
| | | | ODP2::OS-T28 TERM + LOXP + |
| | | | SB-UBI PRO::SB-UBI |
| | | | INTRON1::ZS-GREEN1::OS-UBI |
| | | | TERM + SI-ALS PRO::SI-ALS |
| | | | 5UTR::ZM-ALS (HRA)::SB-UBI |
| | | | TERM + LB |
| 51 | DNA | PHP95502 | RB + LOXP + ZM-HSP17.7 |
| | | | PRO::MO-CRE-EXON1::ST-LS1 |
| | | | INTRON1::MO-CRE |
| | | | EXON2::PINII TERM + AT-5-IV-2 |
| | | | INS + NOS PRO::ZM-WUS2::ZM- |
| | | | IN2-1 TERM + |
| | | | UBI1ZMPRO::UBI1ZM |
| | | | 5UTR::UBI1ZM INTRON1::ZM- |
| | | | ODP2::OS-T28 TERM + LOXP + |
| | | | SB-UBI PRO::SB-UBI |
| | | | INTRON1::ZS-GREEN1::OS-UBI |
| | | | TERM + SI-ALS PRO::SI-ALS |
| | | | 5UTR::ZM-ALS (HRA)::SB-UBI |
| | | | TERM + LB |
| 52 | DNA | PHP95503 | RB + LOXP + NOS PRO::ZM- |
| | | | WUS2::PINII TERM + UBI1ZM |
| | | | PRO (3X ZM-AS2 EME)::UBI1ZM |
| | | | 5UTR::UBI1ZM INTRON1::ZM- |
| | | | ODP2::OS-T28 TERM + AT-5-IV-2 |
| | | | INS + ZM-HSP17.7 PRO::MO- |
| | | | CRE-EXON1::ST-LS1 |
| | | | INTRON1::MO-CRE |
| | | | EXON2::PINII TERM + AT-5-IV-2 |
| | | | INS + LOXP + SB-UBI PRO::SB- |
| | | | UBI INTRON1::ZS-GREEN1::OS- |
| | | | UBI TERM + SB-ALS PRO::ZM- |
| | | | ALS (HRA)::SB-UBI TERM + LB |
| 53 | DNA | PHP95881 | RB + LOXP + NOS PRO::ZM- |
| | | | WUS2::PINII TERM + UBI1ZM |
| | | | PRO::UBI1ZM 5UTR::UBI1ZM |
| | | | INTRON1::ZM-ODP2::OS-T28 |
| | | | TERM + UBI1ZM PRO::UBI1ZM |
| | | | 5UTR::UBI1ZM INTRON1::AT- |
| | | | LEC2 (MO)::SB-GKAF TERM + |
| | | | ZM-HSP17.7 PRO::MO-CRE- |
| | | | EXON1::ST-LS1 INTRON1::MO- |
| | | | CRE EXON2::PINII TERM::OS- |
| | | | UBI TERM + LOXP + SI-UBI3 |
| | | | PRO::SI-UBI3 INTRON1::ZS- |
| | | | GREEN1::PINII TERM + SB-ALS |
| | | | PRO::ZM-ALS (HRA)::SB-PEPC1 |
| | | | TERM + LB |
| 54 | DNA | PHP95882 | RB + LOXP + NOS PRO::ZM- |
| | | | WUS2::PINII TERM + UBI1ZM |
| | | | PRO::UBI1ZM 5UTR::UBI1ZM |
| | | | INTRON1::ZM-ODP2::OS-T28 |
| | | | TERM + UBI1ZM PRO::UBI1ZM |
| | | | 5UTR::UBI1ZM INTRON1::ZM- |
| | | | LEC1::SB-GKAF TERM + ZM- |
| | | | HSP17.7 PRO::MO-CRE- |
| | | | EXON1::ST-LS1 INTRON1::MO- |
| | | | CRE EXON2::PINII TERM::OS- |
| | | | UBI TERM + LOXP + SI-UBI3 |
| | | | PRO::SI-UBI3 INTRON1::ZS- |
| | | | GREEN1::PINII TERM + SB-ALS |
| | | | PRO::ZM-ALS (HRA)::SB-PEPC1 |
| | | | TERM + LB |
| 55 | DNA | PHP95886 | RB + LOXP + NOS PRO::ZM- |
| | | | WUS2::PINII TERM + UBI1ZM |
| | | | PRO::UBI1ZM 5UTR::UBI1ZM |
| | | | INTRON1::ZM-ODP2::OS-T28 |
| | | | TERM + UBI1ZM PRO::UBI1ZM |
| | | | 5UTR::UBI1ZM INTRON1::AT- |
| | | | RKD4::SB-GKAF TERM + ZM- |
| | | | HSP17.7 PRO::MO-CRE- |
| | | | EXON1::ST-LS1 INTRON1::MO- |
| | | | CRE EXON2::PINII TERM::OS- |
| | | | UBI TERM + LOXP + SI-UBI3 |
| | | | PRO::SI-UBI3 INTRON1::ZS- |
| | | | GREEN1::PINII TERM + SB-ALS |
| | | | PRO::ZM-ALS (HRA)::SB-PEPC1 |
| | | | TERM + LB |
| 56 | DNA | PHP95892 | RB + LOXP + NOS PRO::ZM- |
| | | | WUS2::PINII TERM + UBI1ZM |
| | | | PRO::UBI1ZM 5UTR::UBI1ZM |
| | | | INTRON1::ZM-ODP2::OS-T28 |
| | | | TERM + UBI1ZM PRO::UBI1ZM |
| | | | 5UTR::UBI1ZM INTRON1::AT- |
| | | | RAP2.6L::SB-GKAF TERM + ZM- |
| | | | HSP17.7 PRO::MO-CRE- |
| | | | EXON1::ST-LS1 INTRON1::MO- |
| | | | CRE EXON2::PINII TERM::OS- |
| | | | UBI TERM + LOXP + SI-UBI3 |
| | | | PRO::SI-UBI3 INTRON1::ZS- |
| | | | GREEN1::PINII TERM + SB-ALS |
| | | | PRO::ZM-ALS (HRA)::SB-PEPC1 |
| | | | TERM + LB |
| 57 | DNA | PHP95893 | RB + LOXP + NOS PRO::ZM- |
| | | | WUS2::PINII TERM + UBI1ZM |
| | | | PRO::UBI1ZM 5UTR::UBI1ZM |
| | | | INTRON1::ZM-ODP2::OS-T28 |
| | | | TERM + UBI1ZM PRO::UBI1ZM |
| | | | 5UTR::UBI1ZM INTRON1::ZM- |
| | | | MIR156B::SB-GKAF TERM + |
| | | | ZM-HSP17.7 PRO::MO-CRE- |
| | | | EXON1::ST-LS1 INTRON1::MO- |
| | | | CRE EXON2::PINII TERM::OS- |
| | | | UBI TERM + LOXP + SI-UBI3 |
| | | | PRO::SI-UBI3 INTRON1::ZS- |
| | | | GREEN1::PINII TERM + SB-ALS |
| | | | PRO::ZM-ALS (HRA)::SB-PEPC1 |
| | | | TERM + LB |
| 58 | DNA | PHP95904 | RB + LOXP + NOS PRO::ZM- |
| | | | WUS2::PINII TERM + UBI1ZM |
| | | | PRO::UBI1ZM 5UTR::UBI1ZM |
| | | | INTRON1::ZM-ODP2::OS-T28 |
| | | | TERM + UBI1ZM PRO::UBI1ZM |
| | | | 5UTR::UBI1ZM INTRON1::ZM- |
| | | | RLD1::SB-GKAF TERM + ZM- |
| | | | HSP17.7 PRO::MO-CRE- |
| | | | EXON1::ST-LS1 INTRON1::MO- |
| | | | CRE EXON2::PINII TERM::OS- |
| | | | UBI TERM + LOXP + SI-UBI3 |
| | | | PRO::SI-UBI3 INTRON1::ZS- |
| | | | GREEN1::PINII TERM + SB-ALS |
| | | | PRO::ZM-ALS (HRA)::SB-PEPC1 |
| | | | TERM + LB |
| 59 | DNA | PHP95987 | RB + LOXP + SCBV PRO::SCVB |
| | | | 5UTR::ZM-WUS2::PINII TERM + |
| | | | UBI1ZM PRO::UBI1ZM |
| | | | 5UTR::UBI1ZM INTRON1::ZM- |
| | | | ODP2::PINII TERM + ZM- |
| | | | HSP17.7 PRO::MO-CRE- |
| | | | EXON1::ST-LS1 INTRON1::MO- |
| | | | CRE EXON2::PINII TERM::OS- |
| | | | UBI TERM + LOXP + SI-UBI3 |
| | | | PRO::SI-UBI3 INTRON1::ZS- |
| | | | GREEN1::PINII TERM + SB-ALS |
| | | | PRO::ZM-ALS (HRA)::SB-PEPC1 |
| | | | TERM + LB |
| 60 | DNA | PHP95989 | RB + LOXP + FT-PPCA1 |
| | | | PRO::NOS PRO::ZM-WUS2::PINII |
| | | | TERM + UBI1ZM PRO::UBI1ZM |
| | | | 5UTR::UBI1ZM INTRON1::ZM- |
| | | | ODP2::PINII TERM + ZM- |
| | | | HSP17.7 PRO::MO-CRE- |
| | | | EXON1::ST-LS1 INTRON1::MO- |
| | | | CRE EXON2::PINII TERM::OS- |
| | | | UBI TERM + LOXP + SI-UBI3 |
| | | | PRO::SI-UBI3 INTRON1::ZS- |
| | | | GREEN1::PINII TERM + SB-ALS |
| | | | PRO::ZM-ALS (HRA)::SB-PEPC1 |
| | | | TERM + LB |
| 61 | DNA | PHP95990 | RB + LOXP + NOS PRO::ZM- |
| | | | WUS2::PINII TERM + UBI1ZM |
| | | | PRO::UBI1ZM 5UTR::UBI1ZM |
| | | | INTRON1::AT-RAP2.6L |
| | | | (MO)::SB-GKAF TERM + ZM- |
| | | | HSP17.7 PRO::MO-CRE- |
| | | | EXON1::ST-LS1 INTRON1::MO- |
| | | | CRE EXON2::PINII TERM::OS- |
| | | | UBI TERM + LOXP + SI-UBI3 |
| | | | PRO::SI-UBI3 INTRON1::ZS- |
| | | | GREEN1::PINII TERM + SB-ALS |
| | | | PRO::ZM-ALS (HRA)::SB-PEPC1 |
| | | | TERM + LB |
| 62 | DNA | PHP96030 | RB + LOXP + NOS PRO::ZM- |
| | | | WUS2::PINII TERM + UBI1ZM |
| | | | PRO::UBI1ZM 5UTR::UBI1ZM |
| | | | INTRON1::RLD1::SB-GKAF |
| | | | TERM + ZM-HSP17.7 PRO::MO- |
| | | | CRE-EXON1::ST-LS1 |
| | | | INTRON1::MO-CRE |
| | | | EXON2::PINII TERM::OS-UBI |
| | | | TERM + LOXP + SI-UBI3 |
| | | | PRO::SI-UBI3 INTRON1::ZS- |
| | | | GREEN1::PINII TERM + SB-ALS |
| | | | PRO::ZM-ALS (HRA)::SB-PEPC1 |
| | | | TERM + LB |
| 63 | DNA | PHP96031 | RB + LOXP + ZM-GOS2 |
| | | | PRO::ZM-GOS2 5UTR1::ZM- |
| | | | GOS2 INTRON1::ZM-GOS2 |
| | | | 5UTR2::ZM-WUS2::PINII TERM + |
| | | | UBI1ZM PRO::UBI1ZM |
| | | | 5UTR::UBI1ZM INTRON1::ZM- |
| | | | ODP2::PINII TERM + ZM- |
| | | | HSP17.7 PRO::MO-CRE- |
| | | | EXON1::ST-LS1 INTRON1::MO- |
| | | | CRE EXON2::PINII TERM::OS- |
| | | | UBI TERM + LOXP + SI-UBI3 |
| | | | PRO::SI-UBI3 INTRON1::ZS- |
| | | | GREEN1::PINII TERM + SB-ALS |
| | | | PRO::ZM-ALS (HRA)::SB-PEPC1 |
| | | | TERM + LB |
| 64 | DNA | PHP96032 | RB + LOXP + ZM-DIURNAL 11 |
| | | | PRO::ZM-WUS2::PINII TERM + |
| | | | UBI1ZM PRO::UBI1ZM |
| | | | 5UTR::UBI1ZM INTRON1::ZM- |
| | | | ODP2::PINII TERM + ZM- |
| | | | HSP17.7 PRO::MO-CRE- |
| | | | EXON1::ST-LS1 INTRON1::MO- |
| | | | CRE EXON2::PINII TERM::OS- |
| | | | UBI TERM + LOXP + SI-UBI3 |
| | | | PRO::SI-UBI3 INTRON1::ZS- |
| | | | GREEN1::PINII TERM + SB-ALS |
| | | | PRO::ZM-ALS (HRA)::SB-PEPC1 |
| | | | TERM + LB |
| 65 | DNA | PHP96036 | RB + LOXP + NOS PRO::ZM- |
| | | | WUS2::PINII TERM + UBI1ZM |
| | | | PRO::UBI1ZM 5UTR::UBI1ZM |
| | | | INTRON1::ZM-KN1::PINII TERM + |
| | | | ZM-HSP17.7 PRO::MO-CRE- |
| | | | EXON1::ST-LS1 INTRON1::MO- |
| | | | CRE EXON2::PINII TERM::OS- |
| | | | UBI TERM + LOXP + SI-UBI3 |
| | | | PRO::SI-UBI3 INTRON1::ZS- |
| | | | GREEN1::PINII TERM + SB-ALS |
| | | | PRO::ZM-ALS (HRA)::SB-PEPC1 |
| | | | TERM + LB |
| 66 | DNA | PHP96037 | RB + LOXP + NOS PRO::ZM- |
| | | | WUS2::IN2-1 TERM + FMV |
| | | | ENH::PCSV ENH::MMV |
| | | | ENH::UBI1ZM PRO::UBI1ZM |
| | | | 5UTR::UBI1ZM INTRON1::ZM- |
| | | | ODP2::OS-T28 TERM + AT-5-IV-2 |
| | | | INS + ZM-HSP17.7 PRO::MO- |
| | | | CRE-EXON1::ST-LS1 |
| | | | INTRON1::MO-CRE |
| | | | EXON2::PINII TERM + AT-5-IV-2 |
| | | | INS + LOXP + SB-UBI PRO::SB- |
| | | | UBI INTRON1::ZS-GREEN1::OS- |
| | | | UBI TERM + SB-ALS PRO::ZM- |
| | | | ALS (HRA)::SB-PEPC1 TERM + |
| | | | LB |
| 67 | DNA | PHP96277 | RB + LOXP + OS-ACTIN |
| | | | PRO::OS-ACTIN INTRON1::ZM- |
| | | | WUS2::IN2-1 TERM + FMV |
| | | | ENH::PCSV ENH::MMV |
| | | | ENH::UBI1ZM PRO::UBI1ZM |
| | | | 5UTR::UBI1ZM INTRON1::ZM- |
| | | | ODP2::OS-T28 TERM + AT-5-IV-2 |
| | | | INS + ZM-HSP17.7 PRO::MO- |
| | | | CRE-EXON1::ST-LS1 |
| | | | INTRON1::MO-CRE |
| | | | EXON2::PINII TERM + AT-5-IV-2 |
| | | | INS + LOXP + SB-UBI PRO::SB- |
| | | | UBI INTRON1::ZS-GREEN1::OS- |
| | | | UBI TERM + SB-ALS PRO::ZM- |
| | | | ALS (HRA)::SB-PEPC1 TERM + |
| | | | LB |
| 68 | DNA | PHP96425 | RB + LOXP + NOS PRO::ZM- |
| | | | WUS2::IN2-1 TERM + FMV |
| | | | ENH::PCSV ENH::MMV |
| | | | ENH::UBI1ZM PRO::UBI1ZM |
| | | | 5UTR::UBI1ZM INTRON1::ZM- |
| | | | ODP2::OS-T28 TERM + AT-5-IV-7 |
| | | | INS + ZM-HSP17.7 PRO::MO- |
| | | | CRE-EXON1::ST-LS1 |
| | | | INTRON1::MO-CRE |
| | | | EXON2::PINII TERM + LOXP + |
| | | | SB-UBI PRO::SB-UBI |
| | | | INTRON1::ZS-GREEN1::OS-UBI |
| | | | TERM + SB-ALS PRO::ZM-ALS |
| | | | (HRA)::SB-PEPC1 TERM + LB |
| 69 | DNA | PHP96664 | RB + LOXP + ZM-HSP17.7 |
| | | | PRO::MO-CRE-EXON1::ST-LS1 |
| | | | INTRON1::MO-CRE |
| | | | EXON2::PINII TERM + NOS |
| | | | PRO::ZM-WUS2::IN2-1 TERM + |
| | | | UBI1ZM PRO::UBI1ZM |
| | | | 5UTR::UBI1ZM INTRON1::ZM- |
| | | | ODP2::OS-T28 TERM + SB-UBI |
| | | | PRO::SB-UBI INTRON1::ZS- |
| | | | GREEN1::OS-UBI TERM + SB- |
| | | | ALS PRO::ZM-ALS (HRA)::SB- |
| | | | PEPC1 TERM + LB |
| 70 | DNA | PHP96695 | RB + LOXP + NOS PRO::ZM- |
| | | | WUS2::IN2-1 TERM + UBI1ZM |
| | | | PRO (3X ZM-AS2 EME)::UBI1ZM |
| | | | INTRON1::ZM-ODP2::OS-T28 |
| | | | TERM + ZM-HSP17.7 PRO::MO- |
| | | | CRE-EXON1::ST-LS1 |
| | | | INTRON1::MO-CRE |
| | | | EXON2::PINII TERM + LOXP + |
| | | | SB-UBI PRO::SB-UBI |
| | | | INTRON1::ZS-GREEN1::OS-UBI |
| | | | TERM + SB-ALS PRO::ZM-ALS |
| | | | (HRA)::SB-UBI TERM + LB |
| | | | RB + LOXP + NOS PRO::ZM- |
| | | | WUS2::IN2-1 TERM + UBI1ZM |
| 71 | DNA | PHP96716 | PRO::UBI1ZM 5UTR::UBI1ZM |
| | | | INTRON1::ZM-ODP2::OS-T28 |
| | | | TERM + UBI1ZM PRO::UBI1ZM |
| | | | 5UTR::UBI1ZM INTRON1::ZM- |
| | | | KN1::PINII TERM + ZM-HSP17.7 |
| | | | PRO::MO-CRE-EXON1::ST-LS1 |
| | | | INTRON1::MO-CRE |
| | | | EXON2::PINII TERM::OS-UBI |
| | | | TERM + LOXP + SI-UBI3 |
| | | | PRO::SI-UBI3 INTRON1::ZS- |
| | | | GREEN1::PINII TERM + SB-ALS |
| | | | PRO:ZM-ALS (HRA)::SB-PEPC1 |
| | | | TERM + LB |
| 72 | DNA | PHP96730 | RB + LOXP + ZM-SWEET11 |
| | | | PRO::ZM-WUS2::IN2-1 TERM + |
| | | | UBI1ZM PRO::UBI1ZM |
| | | | 5UTR::UBI1ZM INTRON1::ZM- |
| | | | ODP2::PINII TERM + ZM- |
| | | | HSP17.7 PRO::MO-CRE- |
| | | | EXON1::ST-LS1 INTRON1::MO- |
| | | | CRE EXON2::PINII TERM::OS- |
| | | | UBI TERM + LOXP + SI-UBI3 |
| | | | PRO::SI-UBI3 INTRON1::ZS- |
| | | | GREEN1::PINII TERM + SB-ALS |
| | | | PRO::ZM-ALS (HRA)::SB-PEPC1 |
| | | | TERM + LB |
| 73 | DNA | PHP96731 | RB + LOXP + ZM-DIURNAL10 |
| | | | PRO::ZM-WUS2::IN2-1 TERM + |
| | | | UBI1ZM PRO::UBI1ZM |
| | | | 5UTR::UBI1ZM INTRON1::ZM- |
| | | | ODP2::PINII TERM + ZM- |
| | | | HSP17.7 PRO::MO-CRE- |
| | | | EXON1::ST-LS1 INTRON1::MO- |
| | | | CRE EXON2::PINII TERM::OS- |
| | | | UBI TERM + LOXP + SI-UBI3 |
| | | | PRO::SI-UBI3 INTRON1::ZS- |
| | | | GREEN1::PINII TERM + SB-ALS |
| | | | PRO::ZM-ALS (HRA)::SB-PEPC1 |
| | | | TERM + LB |
| 74 | DNA | PHP96751 | RB + LOXP + NOS PRO::ZM- |
| | | | WUS2::IN2-1 TERM + FMV |
| | | | ENH::PCSV ENH::MMV |
| | | | ENH::UBI1ZM PRO::UBI1ZM |
| | | | 5UTR::UBI1ZM INTRON1::ZM- |
| | | | ODP2::OS-T28 TERM + AT-5-IV-2 |
| | | | INS + ZM-HSP17.7 PRO::MO- |
| | | | CRE-EXON1::ST-LS1 |
| | | | INTRON1::MO-CRE |
| | | | EXON2::PINII TERM + LOXP + |
| | | | SB-UBI PRO::SB-UBI |
| | | | INTRON1::ZS-GREEN1::OS-UBI |
| | | | TERM + SB-ALS PRO::ZM-ALS |
| | | | (HRA)::SB-UBI TERM + LB |
| 75 | DNA | PHP96919 | RB + LOXP + NOS PRO (3X ZM- |
| | | | AS2 EME)::ZM-WUS2::IN2-1 |
| | | | TERM + UBI1ZM PRO::UBI1ZM |
| | | | 5UTR::UBI1ZM INTRON1::ZM- |
| | | | ODP2::OS-T28 TERM + ZM- |
| | | | HSP17.7 PRO::MO-CRE- |
| | | | EXON1::ST-LS1 INTRON1::MO- |
| | | | CRE EXON2::PINII TERM + |
| | | | LOXP + SB-UBI PRO::SB-UBI |
| | | | INTRON1::ZS-GREEN1::OS-UBI |
| | | | TERM + SB-ALS PRO::ZM-ALS |
| | | | (HRA)::SB-UBI TERM + LB |
| 76 | DNA | PHP96942 | RB + UBI1ZM PRO::UBI1ZM |
| | | | 5UTR::UBI1ZM |
| | | | INTRON1::FLPM-EXON1::ST- |
| | | | LS1 INTRON2::FLPM- |
| | | | EXON2::PINII TERM::AT-T9 |
| | | | TERM + FRT1::PMI::PINII |
| | | | TERM::CZ19B1 TERM + NOS |
| | | | PRO::ZM-WUS2::IN2-1 TERM + |
| | | | FMV ENH::PCSV ENH::MMV |
| | | | ENH::UBI1ZM PRO::UBI1ZM |
| | | | 5UTR::UBI1ZM INTRON1::ZM- |
| | | | ODP2::OS-T28 TERM + ZM- |
| | | | HSP17.7 PRO::MO-CRE- |
| | | | EXON1::ST-LS1 INTRON1::MO- |
| | | | CRE EXON2::SB-CPI8 TERM + |
| | | | LOXP + SB-UBI PRO::SB-UBI |
| | | | INTRON1::ZS-GREEN1::OS-UBI |
| | | | TERM + FRT6 + LB |
| 77 | DNA | PHP97334 | RB + LOXP + NOS PRO::ZM- |
| | | | WUS2::IN2-1 TERM + FMV |
| | | | ENH::PCSV ENH::MMV |
| | | | ENH::UBI1ZM PRO::UBI1ZM |
| | | | 5UTR::UBI1ZM INTRON1::ZM- |
| | | | ODP2::OS-T28 TERM + AT-5-IV-2 |
| | | | INS + ZM-HSP17.7 PRO::MO- |
| | | | CRE-EXON1::ST-LS1 |
| | | | INTRON1::MO-CRE |
| | | | EXON2::PINII TERM + AT-5-IV-2 |
| | | | INS + LOXP + SB-UBI PRO::SB- |
| | | | UBI INTRON1::ZS-GREEN1::OS- |
| | | | UBI TERM + SB-UBI1 PRO::SB- |
| | | | UBI1 INTRON1::NPTII::SB-UBI |
| | | | TERM + LB |
| 78 | DNA | PHP97335 | RB + LOXP + SB-UBII PRO::SB- |
| | | | UBI1 INTRON1::NPTII::SB-UBI |
| | | | TERM + NOS PRO::ZM- |
| | | | WUS2::IN2-1 TERM + FMV |
| | | | ENH::PCSV ENH::MMV |
| | | | ENH::UBI1ZM PRO::UBI1ZM |
| | | | 5UTR::UBI1ZM INTRON1::ZM- |
| | | | ODP2::OS-T28 TERM + AT-5-IV-2 |
| | | | INS + ZM-HSP17.7 PRO::MO- |
| | | | CRE-EXON1::ST-LS1 |
| | | | INTRON1::MO-CRE |
| | | | EXON2::PINII TERM + AT-5-IV-2 |
| | | | INS + LOXP + SB-UBI PRO::SB- |
| | | | UBI INTRON1::ZS-GREEN1::OS- |
| | | | UBI TERM + LB |
| 79 | DNA | PHP97417 | RB + LOXP + UBI1ZM |
| | | | PRO::UBI1ZM 5UTR::UBI1ZM |
| | | | INTRON1::ZM-WUS2::IN2-1 |
| | | | TERM + FMV ENH::PCSV |
| | | | ENH::MMV ENH::UBI1ZM |
| | | | PRO::UBI1ZM 5UTR::UBI1ZM |
| | | | INTRON1::ZM-ODP2::OS-T28 |
| | | | TERM + AT-5-IV-2 INS + ZM- |
| | | | HSP17.7 PRO::MO-CRE- |
| | | | EXON1::ST-LS1 INTRON1::MO- |
| | | | CRE EXON2::PINII TERM + AT- |
| | | | 5-IV-2 INS + LOXP + SB-UBI |
| | | | PRO::SB-UBI INTRON1::ZS- |
| | | | GREEN1::OS-UBI TERM + SI- |
| | | | ALS PRO::SI-ALS 5UTR::ZM- |
| | | | ALS (HRA)::SB-UBI TERM + LB |
| 80 | DNA | PHP97453 | RB + LOXP + UBI1ZM |
| | | | PRO::UBI1ZM 5UTR::ADH1 |
| | | | INTRON1::ZM-WUS2::IN2-1 |
| | | | TERM + UBI1ZM PRO::UBI1ZM |
| | | | 5UTR::UBI1ZM INTRON1::ZM- |
| | | | ODP2::OS-T28 TERM::CZ19B1 |
| | | | TERM + ZM-HSP17.7 PRO::MO- |
| | | | CRE-EXON1::ST-LS1 |
| | | | INTRON1::MO-CRE |
| | | | EXON2::PINII TERM + LOXP + |
| | | | SB-UBI PRO::SB-UBI |
| | | | INTRON1::ZS-GREEN1::OS-UBI |
| | | | TERM + SB-ALS PRO::ZM-ALS |
| | | | (HRA)::SB-UBI TERM + LB |
| 81 | DNA | PHP97458 | RB + LOXP + FT-MEM1::NOS |
| | | | PRO::ZM-WUS2::PINII TERM + |
| | | | UBI1ZM PRO (3X ZM-AS2 |
| | | | EME)::UBI1ZM INTRON1::ZM- |
| | | | ODP2::OS-T28 TERM::GZ-W64A |
| | | | TERM::FL2 TERM + ZM-HSP17.7 |
| | | | PRO::MO-CRE-EXON1::ST-LS1 |
| | | | INTRON1::MO-CRE |
| | | | EXON2::PINII TERM::OS-UBI |
| | | | TERM + LOXP + SI-UBI3 |
| | | | PRO::SI-UBI3 INTRON1::ZS- |
| | | | GREEN1::PINII TERM + SB-ALS |
| | | | PRO:ZM-ALS (HRA)::SB-PEPC1 |
| | | | TERM + LB |
| 82 | DNA | PHP97725 | RB + LOXP + AT-5-IV-2 INS + |
| | | | ZM-HSP17.7 PRO::MO-CRE- |
| | | | EXON1::ST-LS1 INTRON1::MO- |
| | | | CRE EXON2::PINII TERM + AT- |
| | | | 5-IV-2 INS + NOS PRO::ZM- |
| | | | WUS2::IN2-1 TERM + AT-5-IV-2 |
| | | | INS + FMV ENH::PCSV |
| | | | ENH::MMV ENH::UBI1ZM |
| | | | PRO::UBI1ZM 5UTR::UBI1ZM |
| | | | INTRON1::ZM-ODP2::OS-T28 |
| | | | TERM + LOXP + SB-UBI |
| | | | PRO::SB-UBI INTRON1::ZS- |
| | | | GREEN1::OS-UBI TERM + SI- |
| | | | ALS PRO::SI-ALS 5UTR::ZM- |
| | | | ALS (HRA)::SB-UBI TERM + LB |
| 83 | DNA | PHP97726 | RB + LOXP + AT-5-IV-2 INS + |
| | | | ZM-HSP17.7 PRO::MO-CRE- |
| | | | EXON1::ST-LS1 INTRON1::MO- |
| | | | CRE EXON2::PINII TERM + NOS |
| | | | PRO::ZM-WUS2::IN2-1 TERM + |
| | | | AT-5-IV-2 INS + FMV |
| | | | ENH::PCSV ENH::MMV |
| | | | ENH::UBI1ZM PRO::UBI1ZM |
| | | | 5UTR::UBI1ZM INTRON1::ZM- |
| | | | ODP2::OS-T28 TERM + LOXP + |
| | | | SB-UBI PRO::SB-UBI |
| | | | INTRON1::ZS-GREEN1::OS-UBI |
| | | | TERM + SI-ALS PRO::SI-ALS |
| | | | 5UTR::ZM-ALS (HRA)::SB-UBI |
| | | | TERM + LB |
| 84 | DNA | PHP97933 | RB + LOXP + NOS PRO::ZM- |
| | | | WUS2::IN2-1 TERM + FMV |
| | | | ENH::PCSV ENH::MMV |
| | | | ENH::UBI1ZM PRO::UBI1ZM |
| | | | 5UTR::UBI1ZM INTRON1::ZM- |
| | | | ODP2::OS-T28 TERM + AT-5-IV-2 |
| | | | INS + ZM-HSP17.7 PRO::MO- |
| | | | CRE-EXON1::ST-LS1 |
| | | | INTRON1::MO-CRE |
| | | | EXON2::PINII TERM + AT-5-IV-2 |
| | | | INS + UBI1ZM PRO::UBI1ZM |
| | | | 5UTR::UBI1ZM INTRON1::SV40 |
| | | | NLS::CAS9 EXON1 |
| | | | (SP)(MO)::ST-LS1 |
| | | | INTRON2::CAS9 EXON2 |
| | | | (SP)(MO)::VIRD2 NLS::PINII |
| | | | TERM + ZM-U6 POLIII CHR8 |
| | | | PRO::ZM-WXY-CR4::GUIDE |
| | | | RNA::ZM-U6 POLIII CHR8 TERM + |
| | | | ZM-U6 POLIII CHR8 PRO::ZM- |
| | | | WXY-CR4::GUIDE RNA::ZM-U6 |
| | | | POLIII CHR8 TERM + LOXP + |
| | | | FL2 TERM + UBI1ZM |
| | | | 5UTR::UBI1ZM |
| | | | INTRON1::NPTII::PINII TERM + |
| | | | SB-UBI PRO::SB-UBI |
| | | | INTRON1::ZS-GREEN1::OS-UBI |
| | | | TERM + LB |
| 85 | DNA | PHP98248 | RB + LOXP + NOS PRO::ZM- |
| | | | WUS2::IN2-1 TERM + UBI1ZM |
| | | | PRO::UBI1ZM 5UTR::UBI1ZM |
| | | | INTRON1::ZM-ODP2::OS-T28 |
| | | | TERM + UBI1ZM PRO::UBI1ZM |
| | | | 5UTR::UBI1ZM INTRON1::ZM- |
| | | | GRF5::SB-GKAF TERM + ZM- |
| | | | HSP17.7 PRO::MO-CRE- |
| | | | EXON1::ST-LS1 INTRON1::MO- |
| | | | CRE EXON2::PINII TERM::OS- |
| | | | UBI TERM + LOXP + SI-UBI3 |
| | | | PRO::SI-UBI3 INTRON1::ZS- |
| | | | GREEN1::PINII TERM + SB-ALS |
| | | | PRO::ZM-ALS (HRA)::SB-PEPC1 |
| | | | TERM + LB |
| 86 | DNA | PHP98283 | RB + LOXP + NOS PRO::ZM- |
| | | | WUS2::IN2-1 TERM + FMV |
| | | | ENH::PCSV ENH::MMV |
| | | | ENH::UBI1ZM PRO::UBI1ZM |
| | | | 5UTR::UBI1ZM INTRON1::ZM- |
| | | | ODP2::OS-T28 TERM + UBI1ZM |
| | | | PRO::UBI1ZM 5UTR::UBI1ZM |
| | | | INTRON1::ZM-GRF5::SB-GKAF |
| | | | TERM + ZM-HSP17.7 PRO::MO- |
| | | | CRE-EXON1::ST-LS1 |
| | | | INTRON1::MO-CRE |
| | | | EXON2::PINII TERM::OS-UBI |
| | | | TERM + LOXP + SI-UBI3 |
| | | | PRO::SI-UBI3 INTRON1::ZS- |
| | | | GREEN1::PINII TERM + SB-ALS |
| | | | PRO::ZM-ALS (HRA)::SB-PEPC1 |
| | | | TERM + LB |
| 87 | DNA | PHP98310 | RB + LOXP + NOS PRO::ZM- |
| | | | WUS2::IN2-1 TERM + UBI1ZM |
| | | | PRO::UBI1ZM 5UTR::UBI1ZM |
| | | | INTRON1::ZM-GRF5::SB-GKAF |
| | | | TERM + ZM-HSP17.7 PRO::MO- |
| | | | CRE-EXON1::ST-LS1 |
| | | | INTRON1::MO-CRE |
| | | | EXON2::PINII TERM::OS-UBI |
| | | | TERM + LOXP + SI-UBI3 |
| | | | PRO::SI-UBI3 INTRON1::ZS- |
| | | | GREEN1::PINII TERM + SB-ALS |
| | | | PRO::ZM-ALS (HRA)::SB-PEPC1 |
| | | | TERM + LB |
| 88 | DNA | PHP98392 | RB + UBI1ZM PRO::UBI1ZM |
| | | | 5UTR::UBI1ZM INTRON1::LOXP + |
| | | | NOS PRO::ZM-WUS2::IN2-1 |
| | | | TERM + FMV ENH::PCSV |
| | | | ENH::MMV ENH::UBI1ZM |
| | | | PRO::UBI1ZM 5UTR::UBI1ZM |
| | | | INTRON1::ZM-ODP2::OS-T28 |
| | | | TERM + ZM-HSP17.7 PRO::MO- |
| | | | CRE-EXON1::ST-LS1 |
| | | | INTRON1::MO-CRE |
| | | | EXON2::PINII TERM::OS-UBI |
| | | | TERM + LOXP::ZM-GRF5::SB- |
| | | | GKAF TERM + SB-UBI PRO::SB- |
| | | | UBI INTRON1::ZS-GREEN1::OS- |
| | | | UBI TERM + SI-ALS PRO::SI- |
| | | | ALS 5UTR::ZM-ALS (HRA)::SB- |
| | | | UBI TERM + LB |
| 89 | DNA | PHP98393 | RB + FMV ENH::PCSV |
| | | | ENH::MMV ENH::UBI1ZM |
| | | | PRO::UBI1ZM 5UTR::UBI1ZM |
| | | | INTRON1::LOXP::ZM-ODP2::OS- |
| | | | T28 TERM:TAV-T2A:ZM- |
| | | | WUS2::IN2-1 TERM + AT-5-IV-2 |
| | | | INS + ZM-HSP17.7 PRO::MO- |
| | | | CRE-EXON1::ST-LS1 |
| | | | INTRON1::MO-CRE |
| | | | EXON2::PINII TERM + AT-5-IV-2 |
| | | | INS + LOXP::ZM-GRF5::SB- |
| | | | GKAF TERM + SB-UBI PRO::SB- |
| | | | UBI INTRON1::ZS-GREEN1::OS- |
| | | | UBI TERM + SI-ALS PRO::SI- |
| | | | ALS 5UTR::ZM-ALS (HRA)::SB- |
| | | | UBI TERM + LB |
| 90 | DNA | PHP98407 | RB + LOXP + UBI1ZM |
| | | | PRO::UBI1ZM 5UTR::UBI1ZM |
| | | | INTRON1::ZM-GRF5::SB-GKAF |
| | | | TERM + ZM-HSP17.7 PRO::MO- |
| | | | CRE-EXON1::ST-LS1 |
| | | | INTRON1::MO-CRE |
| | | | EXON2::PINII TERM::OS-UBI |
| | | | TERM + LOXP:: + SI-UBI3 |
| | | | PRO::SI-UBI3 INTRON1::ZS- |
| | | | GREEN1::PINII TERM + SB-ALS |
| | | | PRO::ZM-ALS (HRA)::SB-PEPC1 |
| | | | TERM + LB |
| 91 | DNA | PHP98784 | RB + LOXP + NOS PRO::ZM- |
| | | | WUS2::IN2-1 TERM + FMV |
| | | | ENH::PCSV ENH::MMV |
| | | | ENH::UBI1ZM PRO::UBI1ZM |
| | | | 5UTR::UBI1ZM INTRON1::ZM- |
| | | | ODP2::OS-T28 TERM + AT-5-IV-2 |
| | | | INS + ZM-HSP17.7 PRO::MO- |
| | | | CRE-EXON1::ST-LS1 |
| | | | INTRON1::MO-CRE |
| | | | EXON2::PINII TERM + AT-5-IV-2 |
| | | | INS + LOXP + UBI1ZM |
| | | | PRO::UBI1ZM 5UTR::UBI1ZM |
| | | | INTRON1::SV40 NLS::CAS9 |
| | | | EXON1 (SP)(MO)::ST-LS1 |
| | | | INTRON2::CAS9 EXON2 |
| | | | (SP)(MO)::VIRD2 NLS::PINII |
| | | | TERM + ZM-U6 POLIII CHR8 |
| | | | PRO::ZM-WXY-CR4::GUIDE |
| | | | RNA::ZM-U6 POLIII CHR8 TERM + |
| | | | ZM-U6 POLIII CHR 8 PRO::ZM- |
| | | | WXY-CR4::GUIDE RNA::ZM-U6 |
| | | | POLIII CHR8 TERM + FL2 TERM + |
| | | | UBI1ZM 5UTR::UBI1ZM |
| | | | INTRON1::NPTII::PINII TERM + |
| | | | SB-UBI PRO::SB-UBI |
| | | | INTRON1::ZS-GREEN1::OS-UBI |
| | | | TERM + LB |
| 92 | DNA | PHP8418-0004 | FRT1::PMI::PINII TERM::CZ19B1 |
| | | | TERM + UBI1ZM PRO::UBI1ZM |
| | | | 5UTR::UBI1ZM INTRON1::DS- |
| | | | RED2::PINII TERM + FRT6 |
| 93 | DNA | PHP54733 | RB + LOXP + RAB17 PRO::MO- |
| | | | CRE-EXON1::ST-LS1 |
| | | | INTRON1::MO-CRE |
| | | | EXON2::PINII TERM + NOS |
| | | | PRO::ZM-WUS2::PINII TERM + |
| | | | UBI1ZM PRO PRO::UBI1ZM |
| | | | 5UTR::UBI1ZM INTRON1::ZM- |
| | | | ODP2::PINII TERM + LOXP + |
| | | | UBI1ZM PRO PRO::UBI1ZM |
| | | | 5UTR::UBI1ZM INTRON1::ZS- |
| | | | GREEN1::PINII TERM::SB- |
| | | | ACTIN TERM SB-UBI PRO::SB- |
| | | | INTRON1::PMI::SB-UBI TERM + |
| | | | FRT87 + LB |
| 94 | DNA | ATPeF1D PRO | Promoter and 5UTR sequence from |
| | | | Gene Model GRMZM2G171628 |
| 95 | DNA | EIF4a PRO | Promoter and 5UTR sequence from |
| | | | Gene Model GRMZM2G116034 |
| 96 | DNA | RRM PRO | Promoter and 5UTR sequence from |
| | | | Gene Model GRMZM2G102829 |
| 97 | DNA | EF1A PRO | Promoter and 5UTR sequence from |
| | | | Gene Model GRMZM2G343543 |
| 98 | DNA | RPL10A PRO | Promoter and 5UTR sequence from |
| | | | Gene Model GRMZM2G144387 |
| 99 | DNA | APX2 PRO | Promoter and 5UTR sequence from |
| | | | Gene Model GRMZM2G140667 |
| 100 | DNA | VDAC1a PRO | Promoter and 5UTR sequence from |
| | | | Gene Model GRMZM2G150616 |
| 101 | DNA | EF1A-Tu PRO | Promoter and 5UTR sequence from |
| | | | Gene Model GRMZM2G153541 |
| 102 | DNA | LEA-14 PRO | Promoter and 5UTR sequence from |
| | | | Gene Model GRMZM2G352415 |
| 103 | DNA | RP-S7 PRO | Promoter and 5UTR sequence from |
| | | | Gene Model GRMZM2G156673 |
| 104 | DNA | RP-L5 PRO | Promoter and 5UTR sequence from |
| | | | Gene Model GRMZM5G815894 |
| 105 | DNA | ENO2 PRO | Promoter and 5UTR sequence from |
| | | | Gene Model GRMZM2G048371 |
| 106 | DNA | RP-L28 PRO | Promoter and 5UTR sequence from |
| | | | Gene Model GRMZM2G088060 |
| 107 | DNA | OS-ACTIN | Promoter sequence from rice actin |
| | | PRO | |
| 108 | DNA | ZM-UBI2 PRO | Promoter and 5UTR sequence from |
| | | | GRMZM2G419891 |
| 109 | DNA | UBI1ZM PRO | Promoter and 5UTR sequence from |
| | | | UBI1ZM PRO |
| 110 | DNA | GRP1 PRO | Promoter and 5UTR sequence from |
| | | | Gene Model GRMZM2G080603 |
| 111 | DNA | RP-L1 PRO | Promoter and 5UTR sequence from |
| | | | Gene Model GRMZM2G144387 |
| 112 | DNA | DNAJ2 PRO | Promoter and 5UTR sequence from |
| | | | Gene Model GRMZM2G364069 |
| 113 | DNA | SAMDC2 | Promoter and 5UTR sequence from |
| | | | Gene Model GRMZM2G154397 |
| 114 | DNA | CPPIase PRO | Promoter and 5UTR sequence from |
| | | | Gene Model GRMZM2G326111 |
| 115 | DNA | ZM-GRF5 | Maize Growth Regulating Factor5 |
| | | | coding sequence |
| 116 | PRT | ZM-GRF5 | Maize Growth Regulating Factor5 |
| | | | encoded protein |
| 117 | DNA | ZM-GRF4 | Maize Growth Regulating Factor4 |
| | | | coding sequence |
| 118 | PRT | ZM-GRF4 | Maize Growth Regulating Factor4 |
| | | | encoded protein |
| 119 | DNA | ZM-GIF1 | Maize GRF-Interacting Factor1 |
| | | | coding sequence |
| 120 | PRT | ZM-GIF1 | Maize GRF-Interacting Factor1 |
| | | | encoded protein |
| 121 | DNA | GRF4~GIF1 | Fusion between GRF4 and GIF1 |
| | | | coding sequences |
| 122 | PRT | GRF4~GIF1 | Encoded protein for fusion between |
| | | | GRF4 and GIF1 gene |
| 123 | DNA | Corngrass1 | ZM-MIR156B, MicroRNA156b |
| | | (Cg1) | also known as Corngrass1 |
| 124 | DNA | ZM-STEMIN1 | Zea mays ortholog of |
| | | | Physcomitrella patens STEMIN1 |
| | | | gene |
| 125 | DNA | ZM- | Zea mays ortholog of the |
| | | REVOLUTA | Arabidopsis REVOLUTA gene |
| 126 | DNA | ZM-ESR1 | Zea mays ortholog of the AT-ESR1 |
| | | | gene |
| 127 | DNA | ZM-LAS1 | Zea mays ortholog of AT-LAS1 |
| | | | gene |
| 128 | DNA | ZM-CUC3 | Zea mays ortholog of the |
| | | | Arabidopsis AT-CUC3 gene |
| 129 | DNA | ZM- | Maize ortholog of the Arabidopsis |
| | | SuperShoot1 | SUPERSHOOT1 gene |
| 130 | DNA | ZM-MAX1 | Maize ortholog of the Arabidopsis |
| | | | MORE AXILLARY GROWTH1 |
| | | | gene |
| 131 | DNA | ZM-MAX4 | Maize ortholog of Arabidopsis |
| | | | MORE AXILLARY GROWTH4 |
| | | | gene |
| 132 | DNA | ZM-MIR-SPS1 | Micro-RNA sequence used to target |
| | | | the transcript of the SuperShoot1 |
| | | | gene |
| 133 | DNA | ZM-MIR- | Micro-RNA sequence used to target |
| | | MAX1 | the transcript of the Zm-MAX1 gene |
| 134 | DNA | ZM-MIR- | Micro-RNA sequence used to target |
| | | MAX4 | the transcript of the Zm-MAX4 gene |
| 135 | DNA | ZM-CUC1 | Zea mays ortholog of the |
| | | | Arabidopsis CUC1 gene |
| 136 | DNA | Plasmid C | Expression cassettes for Cas9 and |
| | | | gRNA for Targeted SDN2 |
| 137 | DNA | Plasmid B | Donor template sequence for |
| | | | Targeted SDN2 |
| 138 | DNA | Plasmid D | Expression cassette 3xENH::UBI |
| | | | PRO::ZM-ODP2::OS-T28 TERM |
| | | | for Targeted SDN2 |
| 139 | DNA | Plasmid E | Expression cassette OS-ACTIN |
| | | | PRO::ZM-WUS2::PINII TERM for |
| | | | Targeted SDN2 |
| 140 | DNA | GRF5~GIF1 | Fusion between GRF5 and GIF1 |
| | | | coding sequences (GRF5-GIF1) |
| | | | with intervening sequence encoding |
| | | | a flexible polylinker |
| 141 | PRT | GRF5~GIF1 | Encoded protein for fusion between |
| | | | GRF5 and GIF1 gene (GRF4-GIF1) |
| | | | with intervening sequence encoding |
| | | | a flexible polylinker |
| 142 | DNA | ZM-CUC2 | Zea mays ortholog of the |
| | | | Arabidopsis CUC2 gene |
| 143 | DNA | AT-WUS | Arabidopsis thaliana WUS coding |
| | | | sequence |
| 144 | PRT | AT-WUS | Arabidopsis thaliana WUS protein |
| | | | sequence |
| 145 | DNA | LJ-WUS | Lotus japonicus WUS coding |
| | | | sequence |
| 146 | PRT | LJ-WUS | Lotus japonicus WUS protein |
| | | | sequence |
| 147 | DNA | GM-WUS | Glycine max WUS coding sequence |
| 148 | PRT | GM-WUS | Glycine max WUS protein sequence |
| 149 | DNA | CS-WUS | Camelina sativa WUS coding |
| | | | sequence |
| 150 | PRT | CS-WUS | Camelina sativa WUS protein |
| | | | sequence |
| 151 | DNA | CR-WUS | Capsella rubella WUS coding |
| | | | sequence |
| 152 | PRT | CR-WUS | Capsella rubella WUS protein |
| | | | sequence |
| 153 | DNA | AA-WUS | Arabis alpina WUS coding |
| | | | sequence |
| 154 | PRT | AA-WUS | Arabis alpina WUS protein |
| | | | sequence |
| 155 | DNA | RS-WUS | Raphanus sativus WUS coding |
| | | | sequence |
| 156 | PRT | RS-WUS | Raphanus sativus WUS protein |
| | | | sequence |
| 157 | DNA | BN-WUS | Brassica napus WUS coding |
| | | | sequence |
| 158 | PRT | BN-WUS | Brassica napus WUS protein |
| | | | sequence |
| 159 | DNA | BO-WUS | Brassica oleracea var. oleracea |
| | | | WUS coding sequence |
| 160 | PRT | BO-WUS | Brassica oleracea var. oleracea |
| | | | WUS protein sequence |
| 161 | DNA | HA-WUS | Helianthus annuus WUS coding |
| | | | sequence |
| 162 | PRT | HA-WUS | Helianthus annuus WUS protein |
| | | | sequence |
| 163 | DNA | PT-WUS | Populus trichocarpa WUS coding |
| | | (POPTR-WUS) | sequence |
| 164 | PRT | PT-WUS | Populus trichocarpa WUS protein |
| | | (POPTR-WUS) | sequence |
| 165 | DNA | VV-WUS | Vitis vinifera WUS coding sequence |
| | | (VITVI-WUS) | |
| 166 | PRT | VV-WUS | Vitis vinifera WUS protein sequence |
| | | (VITVI-WUS) | |
| 167 | DNA | AT-WUS | Arabidopsis thaliana WUS coding |
| | | | sequence (soy optimized) |
| 168 | PRT | AT-WUS | Arabidopsis thaliana WUS protein |
| | | | sequence |
| 169 | DNA | LJ-WUS | Lotus japonicus WUS coding |
| | | | sequence (soy optimized) |
| 170 | PRT | LJ-WUS | Lotus japonicus WUS protein |
| | | | sequence |
| 171 | DNA | MT-WUS | Medicago truncatula WUS coding |
| | | | sequence (soy optimized) |
| 172 | PRT | MT-WUS | Medicago truncatula WUS protein |
| | | | sequence |
| 173 | DNA | PH-WUS | Petunia hybrida WUS coding |
| | | (PETHY-WUS) | sequence (soy optimized) |
| 174 | PRT | PH-WUS | Petunia hybrida WUS protein |
| | | (PETHY-WUS) | sequence |
| 175 | DNA | PV-WUS | Phaseolus vulgaris WUS coding |
| | | | sequence (soy optimized) |
| 176 | PRT | PV-WUS | Phaseolus vulgaris WUS protein |
| | | | sequence |
| 177 | DNA | ZM-WUS1 | Zea mays WUS1 coding sequence |
| 178 | PRT | ZM-WUS1 | Zea mays WUS1 protein sequence |
| 179 | DNA | ZM-WUS2 | Zea mays WUS2 coding sequence |
| 180 | PRT | ZM-WUS2 | Zea mays WUS2 protein sequence |
| 181 | DNA | ZM-WUS3 | Zea mays WUS3 coding sequence |
| 182 | PRT | ZM-WUS3 | Zea mays WUS3 protein sequence |
| 183 | DNA | ZM-WOX2A | Zea mays WOX2A coding sequence |
| 184 | PRT | ZM-WOX2A | Zea mays WOX2A protein sequence |
| 185 | DNA | ZM-WOX4 | Zea mays WOX4 coding sequence |
| 186 | PRT | ZM-WOX4 | Zea mays WOX4 protein sequence |
| 187 | DNA | ZM-WOX5A | Zea mays WOX5A coding sequence |
| 188 | PRT | ZM-WOX5A | Zea mays WOX5A protein sequence |
| 189 | DNA | ZM-WOX9 | Zea mays WOX9 coding sequence |
| 190 | PRT | ZM-WOX9 | Zea mays WOX9 protein sequence |
| 191 | DNA | GG-WUS | Gnetum gnemon WUS coding |
| | | (GNEGN- | sequence |
| | | WUS) | |
| 192 | PRT | GG- | Gnetum gnemon WUS protein |
| | | WUS(GNEGN- | sequence |
| | | WUS) | |
| 193 | DNA | MD-WUS | Malus domestica WUS coding |
| | | (MALDO- | sequence |
| | | WUS) | |
| 194 | PRT | MD-WUS | Malus domestica WUS protein |
| | | (MALDO- | sequence |
| | | WUS) | |
| 195 | DNA | ME-WUS | Manihot esculenta WUS coding |
| | | (MANES- | sequence |
| | | WUS) | |
| 196 | PRT | ME-WUS | Manihot esculenta WUS protein |
| | | (MANES- | sequence |
| | | WUS) | |
| 197 | DNA | KF-WUS | Kalanchoe fedtschenkoi WUS |
| | | (KALFE-WUS) | coding sequence |
| 198 | PRT | KF-WUS | Kalanchoe fedtschenkoi WUS |
| | | (KALFE-WUS) | protein sequence |
| 199 | DNA | GH-WUS | Gossypium hirsutum WUS coding |
| | | (GOSHI-WUS) | sequence |
| 200 | PRT | GH-WUS | Gossypium hirsutum WUS protein |
| | | (GOSHI-WUS) | sequence |
| 201 | DNA | ZOSMA-WUS | Zostera marina WUS coding |
| | | | sequence |
| 202 | PRT | ZOSMA-WUS | Zostera marina WUS protein |
| | | | sequence |
| 203 | DNA | AMBTR-WUS | Amborella trichopoda WUS coding |
| | | | sequence |
| 204 | PRT | AMBTR-WUS | Amborella trichopoda WUS protein |
| | | | sequence |
| 205 | DNA | AC-WUS | Aquilegia coerulea WUS coding |
| | | (AQUCO- | sequence |
| | | WUS) | |
| 206 | PRT | AC-WUS | Aquilegia coerulea WUS protein |
| | | (AQUCO- | sequence |
| | | WUS) | |
| 207 | DNA | AH-WUS | Amaranthus hypochondriacus WUS |
| | | (AMAHY- | coding sequence |
| | | WUS) | |
| 208 | PRT | AH-WUS | Amaranthus hypochondriacus WUS |
| | | (AMAHY- | protein sequence |
| | | WUS) | |
| 209 | DNA | CUCSA-WUS | Cucumis sativus WUS coding |
| | | | sequence |
| 210 | PRT | CUCSA -WUS | Cucumis sativus WUS protein |
| | | | sequence |
| 211 | DNA | PINTA-WUS | Pinus taeda WUS coding sequence |
| 212 | PRT | PINTA-WUS | Pinus taeda WUS protein sequence |
| 213 | DNA | SL-WUS | WUS ortholog of Solanum |
| | | | lycopersicum with KpnI site |
| | | | replaced by changing C to T at 762 |
| | | | bp coding sequence |
| 214 | PRT | SL-WUS | Solanum lycopersicum WUS protein |
| | | | sequence |
| 215 | DNA | ZM-ODP2 | Z. mays ODP2 coding sequence |
| 216 | PRT | ZM-ODP2 | Z. mays ODP2 protein sequence |
| 217 | DNA | ZM-BBM2 | Z. mays BBM2 coding sequence |
| 218 | PRT | ZM-BBM2 | Z. mays BBM2 protein sequence |
| 219 | DNA | ZM-ODP2 | Z. mays ODP2 coding sequence |
| | | | (synthetic) |
| 220 | DNA | OS-BBM1 | Oryza sativa BBM1 coding |
| | | | sequence |
| 221 | PRT | OS-BBM1 | Oryza sativa BBM1 protein |
| | | | sequence |
| 222 | DNA | OS-BBM2 | Oryza sativa BBM2 coding |
| | | | sequence |
| 223 | PRT | OS-BBM2 | Oryza sativa BBM2 protein |
| | | | sequence |
| 224 | DNA | OS-BBM3 | Oryza sativa BBM3 coding |
| | | | sequence |
| 225 | PRT | OS-BBM3 | Oryza sativa BBM3 protein |
| | | | sequence |
| 226 | DNA | SB-BBM2 | Sorghum bicolor BBM2 coding |
| | | | sequence |
| 227 | PRT | SB-BBM2 | Sorghum bicolor BBM2 protein |
| | | | sequence |
| 228 | DNA | SB-ODP2 | Sorghum bicolor ODP2 coding |
| | | | sequence |
| 229 | PRT | SB-ODP2 | Sorghum bicolor ODP2 protein |
| | | | sequence |
| 230 | DNA | SI-ODP2 | Setaria italica ODP2 coding |
| | | | sequence |
| 231 | PRT | SI-ODP2 | Setaria italica ODP2 protein |
| | | | sequence |
| 232 | DNA | 234 | Brachypodium distachyum ODP2 |
| | | | coding sequence |
| 233 | PRT | BD-ODP2 | Brachypodium distachyum ODP2 |
| | | | protein sequence |
| 234 | DNA | SB-ODP2 | Sorghum bicolor ODP2 genomic |
| | | | sequence |
| 235 | DNA | PHP8418-0005 | RB + LOXP + NOS |
| | | | PRO::WUS2::IN2-1 TERM + FMV |
| | | | ENH::PVSC ENH::MMV |
| | | | ENH::UBI1ZM PRO::UBI1ZM |
| | | | 5UTR::UBI1ZM INTRON1::ZM- |
| | | | ODP2::OS-T28 TERM + AT5-IV-7 |
| | | | INS + HSP17.7 PRO::MO-CRE |
| | | | EXON1::ST-LS1 INTRON1::MO- |
| | | | CRE EXON2::PINII TERM + OS- |
| | | | UBI TERM + LOXP + UBI1ZM |
| | | | PRO::UBI1ZM 5UTR::UBI1ZM |
| | | | INTRON1::SV40 NLS::CAS9 |
| | | | EXON1::ST-LS1 |
| | | | INTRON1::CAS9 EXON2::VIRD2 |
| | | | NLS::ZM-UBI TERM + ZM-U6 |
| | | | POLII CHR8 PRO::ZM-CHR1- |
| | | | 53.66-45CR1::GUIDE RNA::ZM- |
| | | | U6 POLII CHR8 PRO TERM + |
| | | | ZM-ALS PRO::ZM-ALS (HRA)- |
| | | | V2::SB-UBI TERM + ZM CHR1- |
| | | | 53.66-45CR1 TARGET SITE + |
| | | | ZM-SEQ11 (GENOMIC)(EDH5G) + |
| | | | SB-UBI PRO::NPTII::SI-UBI |
| | | | TERM (MOD1) + ZM-SEQ12 |
| | | | (GENOMIC)(EDH5G) + ZM |
| | | | CHR1-53.66-45CR1 TARGET |
| | | | SITE + SB-UBI PRO::ZS- |
| | | | GREEN::OS-UBI TERM + LB |
| 236 | DNA | PHP8418-0006 | RB + LOXP + NOS |
| | | | PRO::WUS2::IN2-1 TERM + FMV |
| | | | ENH::PVSC ENH::MMV |
| | | | ENH::UBI1ZM PRO::UBI1ZM |
| | | | 5UTR::UBI1ZM INTRON1::ZM- |
| | | | ODP2::OS-T28 TERM LOXP + |
| | | | AT5-IV-7 INS + HSP17.7 |
| | | | PRO::MO-CRE EXON1::ST-LS1 |
| | | | INTRON1::MO-CRE |
| | | | EXON2::PINII TERM + OS-UBI |
| | | | TERM + UBI1ZM PRO::UBI1ZM |
| | | | 5UTR::UBI1ZM INTRON1::SV40 |
| | | | NLS::CAS9 EXON1::ST-LS1 |
| | | | INTRON1::CAS9 EXON2::VIRD2 |
| | | | NLS::ZM-UBI TERM + ZM-U6 |
| | | | POLII CHR8 PRO::ZM-CHR1- |
| | | | 53.66-45CR1::GUIDE RNA::ZM- |
| | | | U6 POLII CHR8 PRO TERM + |
| | | | ZM-ALS PRO::ZM-ALS (HRA)- |
| | | | V2::SB-UBI TERM + ZM CHR1- |
| | | | 53.66-45CR1 TARGET SITE + |
| | | | ZM-SEQ11 (GENOMIC)(EDH5G) + |
| | | | SB-UBI PRO::NPTII::SI-UBI |
| | | | TERM (MOD1) + ZM-SEQ12 |
| | | | (GENOMIC)(EDH5G) + ZM |
| | | | CHR1-53.66-45CR1 TARGET |
| | | | SITE + SB-UBI PRO::ZS- |
| | | | GREEN::OS-UBI TERM + LB |
| 237 | DNA | PHP70298 | VIRB1 + VIRB2 + VIRB3 + VIRB4 + |
| | | | VIRB5 + VIRB6 + VIRB7 + |
| | | | VIRB8 + VIRB9 + VIRB 10 + |
| | | | VIRB11 + VIRG + VIRC2 + |
| | | | VIRC1 + VIRD1 + VIRD2 + GENT + |
| | | | COLE1 ORI + PVS1 ORI |
| 238 | DNA | RV005393 | VIRA + VIRJ + VIRB1 + VIRB2 + |
| | | | VIRB3 + VIRB4 + VIRB5 + VIRB6 + |
| | | | VIRB7 + VIRB8 + VIRB9 + |
| | | | VIRB10 + VIRB11 + VIRG-V1 + |
| | | | VIRC2 + VIRC1(FL) + VIRD1 + |
| | | | VIRD2 + VIRD3 + VIRD4 + |
| | | | VIRD5 + VIRE1 + VIRE2 + VIRE3 + |
| | | | GENT + ORI V + CTL + TRF A + |
| | | | PARDE |
| 239 | DNA | RV007497 | AR-VIRA-ALT1 + AR-VIRB1 + |
| | | | AR-VIRB2 + AR-VIRB3 + AR- |
| | | | VIRB4-ALT1 + AR-VIRB5-V1 + |
| | | | AR-VIRB6 + AR-VIRB7 + AR- |
| | | | VIRB8 + AR-VIRB9 + AR-VIRB10 + |
| | | | AR-VIRB11 + AR-VIRG + AR- |
| | | | VIRC2 + AR-VIRC1-V1 + AR- |
| | | | VIRD1 + AR-VIRD2 + AR-VIRD3- |
| | | | V1 + AR-VIRD4 + AR-VIRD5- |
| | | | ALT1 + AR-VIRF + AR-VIRE3 + |
| | | | AR-GALLS-V1 + GENT + COLE1 |
| | | | ORI + PVS1 ORI |
| 240 | DNA | PHP71193 | UBI1ZM PRO::UBI1ZM 5UTR:: |
| | | | UBI1ZM INTRON1::SV40 |
| | | | NLS::CAS9 EXON1::ST-LS1 |
| | | | INTRON1::CAS9 EXON2::VIRD2 |
| | | | NLS::PINII TERM + ZM-U6 |
| | | | POLIII CHR8 PRO::ZM-CHR 1- |
| | | | 52.56-8CR1::GUIDE RNA::ZM- |
| | | | U6 POLIII CHR8 PRO TERM + |
| | | | PUC ORI + AMP + F1 ORI |
| 241 | DNA | PHP71788 | RB + ZM-SEQ80 + LOXP + |
| | | | UBI1ZM PRO::UBI1ZM 5UTR:: |
| | | | UBI1ZM INTRON1::FRT1 + |
| | | | NPTII::PINII TERM + FRT87 + |
| | | | ZM-SEQ81 + LB |
| 242 | DNA | PHP21875 | UBI1ZM PRO::UBI1ZM 5UTR:: |
| | | | UBI1ZM INTRON1::ZM- |
| | | | ODP2::PINII TERM + PUC ORI + |
| | | | KAN + F1 ORI |
| 243 | DNA | PHP40428 | RB + H2B PRO::UBI1ZM 5UTR:: |
| | | | UBI1ZM INTRON1::ZS- |
| | | | GREEN::PINII TERM + DMMV |
| | | | PRO::DMMV5UTR:: |
| | | | ATTB4::UNISCN-22::ATTB3::ST- |
| | | | LS1 INTRON2::ATTB3::UNISCN- |
| | | | 22::ATTB4::NOS TERM + LB |
| 244 | DNA | PHP93586 | RB + PLTP PRO::ZM- |
| | | | WUS2::TAV-T2A::REPA::OS-T28 |
| | | | TERM + SB-UBI PRO::SB-UBI |
| | | | INTRON1::ZSGREEN1::OS-UBI |
| | | | TERM + SB-ALS PRO::ZM- |
| | | | ALS::SB-PEPC1 TERM + LB |
| 245 | DNA | PHP93742 | RB + LOXP + ZM-EXP13262.1 |
| | | | PRO::ZM-WUS2::TAV-T2A::ZM- |
| | | | ODP2::IN2 TERM + ZM- |
| | | | EXP11232.1 PRO::ZM-MPKL- |
| | | | A::ZM MiRNA PRECURSOR |
| | | | 396H::ZM-MPKL-A STAR |
| | | | SEQ::PINII TERM + LOXP + SB- |
| | | | UBI PRO::SB-UBI |
| | | | INTRON1::ZSGREEN1::OS-UBI |
| | | | TERM + SI-ALS PRO::SI-ALS 5 |
| | | | UTR::ZM-ALS::SB-UBI TERM + |
| | | | LB |
| 246 | DNA | PHP93937 | RB + LOXP + ZM-EXP11232.1 |
| | | | PRO::ZM-WUS2::IN2 TERM + |
| | | | ZM-EXP13262 PRO::ZM-MPKL- |
| | | | A::ZM MiRNA PRECURSOR |
| | | | 396H::ZM-MPKL-A STAR |
| | | | SEQ::ZM-EXP23070 TERM + |
| | | | LOXP + SB-UBI PRO::SB-UBI |
| | | | INTRON1::ZSGREEN1::OS-UBI |
| | | | TERM + SB-ALS PRO::ZM- |
| | | | ALS::SB-UBI TERM + LB |
| 247 | DNA | PHP94638 | RB + LOXP + ZM-HSP17.7 |
| | | | PRO::MO-CRE EXON1::ST-LS1 |
| | | | INTRON1::MO-CRE |
| | | | EXON2::PINII TERM + IN2 |
| | | | TERM::ZM-WUS2::ZM-UBI1 |
| | | | INTRON1::ZM-UBI1 |
| | | | MINPRO::ZM-UBI1 5UTR + |
| | | | UBI1ZM PRO::UBI1ZM 5UTR:: |
| | | | UBI1ZM INTRON1::ZM- |
| | | | ODP2::ZM-UBI TERM + LOXP + |
| | | | SB-UBI PRO::SB-UBI |
| | | | INTRON1::ZM-MPKL-A::ZM |
| | | | MiRNA PRECURSOR 396H::ZM- |
| | | | MPKL-A STAR SEQ::SB-GKAF |
| | | | TERM + LB |
| 248 | DNA | PHP98567 | RB + LOXP + UBI1ZM PRO (3X |
| | | | ZM-AS2 EME)::UBI1ZM |
| | | | INTRON1::ZM-WUS2::IN2 TERM + |
| | | | UBI1ZM PRO (3X ZM-AS2 |
| | | | EME)::UBI1ZM INTRON1::ZM- |
| | | | ODP2::OS-T28 TERM + CZ19B1 |
| | | | TERM + ZM-HSP17.7 PRO::MO- |
| | | | CRE EXON1::ST-LS1 |
| | | | INTRON1::MO-CRE |
| | | | EXON2::PINII TERM + LOXP + |
| | | | SB-UBI PRO::SB-UBI |
| | | | INTRON1::ZSGREEN1::OS-UBI |
| | | | TERM + SB-ALS PRO::ZM- |
| | | | ALS::SB-UBI TERM + LB |
| 249 | DNA | PHP97452 | RB + LOXP + UBI1ZM PRO (3X |
| | | | ZM-AS2 EME)::UBI1ZM |
| | | | INTRON1::ZM-WUS2::IN2 TERM + |
| | | | UBI1ZM PRO::UBI1ZM |
| | | | 5UTR::UBI1ZM INTRON1::ZM- |
| | | | ODP2::OS-T28 TERM + CZ19B1 |
| | | | TERM + ZM-HSP17.7 PRO::MO- |
| | | | CRE EXON1::ST-LS1 |
| | | | INTRON1::MO-CRE |
| | | | EXON2::PINII TERM + LOXP + |
| | | | SB-UBI PRO::SB-UBI |
| | | | INTRON1::ZSGREEN1::OS-UBI |
| | | | TERM + SB-ALS PRO::ZM- |
| | | | ALS::SB-UBI TERM + LB |
| 250 | DNA | PHP97456 | RB + LOXP + UBI1ZM PRO (3X |
| | | | ZM-AS2 EME)::UBI1ZM |
| | | | INTRON1::ZM-WUS2::IN2 TERM + |
| | | | UBI1ZM PRO::UBI1ZM |
| | | | 5UTR::ADHI INTRON1::ZM- |
| | | | ODP2::OS-T28 TERM + CZ19B1 |
| | | | TERM + ZM-HSP17.7 PRO::MO- |
| | | | CRE EXON1::ST-LS1 |
| | | | INTRON1::MO-CRE |
| | | | EXON2::PINII TERM + LOXP + |
| | | | SB-UBI PRO::SB-UBI |
| | | | INTRON1::ZSGREEN1::OS-UBI |
| | | | TERM + SB-ALS PRO::ZM- |
| | | | ALS::SB-UBI TERM + LB |
| 251 | DNA | PHP97977 | RB + LOXP + UBI1ZM PRO (3X |
| | | | ZM-AS2 EME)::UBI1ZM |
| | | | INTRON1::ZM-WUS2::IN2 TERM + |
| | | | UBI1ZM PRO::UBI1ZM |
| | | | 5UTR(TR1)::ZM-ODP2::OS-T28 |
| | | | TERM + CZ19B1 TERM + ZM- |
| | | | HSP17.7 PRO::MO-CRE EXON1:: |
| | | | ST-LS1 INTRON1::MO-CRE |
| | | | EXON2::PINII TERM + LOXP + |
| | | | SB-UBI PRO::SB-UBI INTRON1:: |
| | | | ZSGREEN1::OS-UBI TERM + SB- |
| | | | ALS PRO::ZM-ALS::SB-UBI |
| | | | TERM + LB |
| 252 | DNA | PHP97449 | RB + LOXP + UBI1ZM |
| | | | PRO::UBI1ZM 5UTR(TR1)::ZM- |
| | | | WUS2::IN2 TERM + UBI1ZM |
| | | | PRO (3X ZM-AS2 EME)::UBI1ZM |
| | | | INTRON1::ZM-ODP2::OS-T28 |
| | | | TERM + CZ19B1 TERM + ZM- |
| | | | HSP17.7 PRO::MO-CRE EXON1:: |
| | | | ST-LS1 INTRON1::MO-CRE |
| | | | EXON2::PINII TERM + LOXP + |
| | | | SB-UBI PRO::SB-UBI INTRON1:: |
| | | | ZSGREEN1::OS-UBI TERM + SB- |
| | | | ALS PRO::ZM-ALS::SB-UBI |
| | | | TERM + LB |
| 253 | DNA | PHP98680 | RB + FMV ENHANCER + PCSV |
| | | | ENH + MMV ENH + UBI1ZM |
| | | | PRO::UBI1ZM 5UTR::UBI1ZM |
| | | | INTRON1::LOXP::ZM- |
| | | | ODP2::TAV-T2A::ZM-WUS2::IN2 |
| | | | TERM + AT-5-IV-2 INS + ZM- |
| | | | HSP17.7 PRO::MO-CRE EXON1:: |
| | | | ST-LS1 INTRON1::MO-CRE |
| | | | EXON2::PINII TERM + AT-5-IV- |
| | | | 2 INS + LOXP + ZM-MIR156B + |
| | | | SB-GKAF TERM + SB-UBI |
| | | | PRO::SB-UBI INTRON1:: |
| | | | ZSGREEN1::OS-UBI TERM + SI- |
| | | | ALS PRO::SI-ALS 5 UTR::ZM- |
| | | | ALS::SB-UBI TERM + LB |
| 254 | DNA | PHP98681 | RB + UBI1ZM PRO::UBI1ZM |
| | | | 5UTR::UBI1ZM |
| | | | INTRON1::LOXP::NOS PRO:: |
| | | | ZM-WUS2::IN2 TERM + FMV |
| | | | ENHANCER + PCSV ENH + |
| | | | MMV ENH + UBI1ZM |
| | | | PRO::UBI1ZM 5UTR::UBI1ZM |
| | | | INTRON1::ZM-ODP2::OS-T28 |
| | | | TERM + AT-5-IV-2 INS + ZM- |
| | | | HSP17.7 PRO::MO-CRE EXON1:: |
| | | | ST-LS1 INTRON1::MO-CRE |
| | | | EXON2::PINII TERM + AT-5-IV- |
| | | | 2 INS + LOXP + ZM-MIR156B + |
| | | | SB-GKAF TERM + SB-UBI |
| | | | PRO::SB-UBI INTRON1:: |
| | | | ZSGREEN1::OS-UBI TERM + SI- |
| | | | ALS PRO::SI-ALS 5 UTR::ZM- |
| | | | ALS::SB-UBI TERM + LB |
| 255 | DNA | PHP98328 | RB + LOXP + BD-CAB2 |
| | | | UAR1::OC EME1::OC EME1::BD- |
| | | | CAB2 PRO::ZM-HPLV9 |
| | | | INTRON1::ZM-WUS2::PINII |
| | | | TERM + UBI1ZM PRO::UBI1ZM |
| | | | 5UTR::UBI1ZM INTRON1::ZM- |
| | | | ODP2::PINII TERM + ZM- |
| | | | HSP17.7 PRO::MO-CRE EXON1:: |
| | | | ST-LS1 INTRON1::MO-CRE |
| | | | EXON2::PINII TERM + LOXP + |
| | | | SB-UBI3 PRO::SB-UBI3 |
| | | | INTRON1::ZSGREEN1::PINII |
| | | | TERM + SB-ALS PRO::ZM- |
| | | | ALS::SB-PEPC1 TERM + LB |
| 256 | DNA | PHP98329 | RB + LOXP + ZM-GOS2 PRO |
| | | | (UAR)::OC EME1::OC |
| | | | EME1::ZM-GOS2 PRO |
| | | | (CORE)::ZM-GOS2 |
| | | | INTRON1::ZM-WUS2::PINII |
| | | | TERM + UBI1ZM PRO::UBI1ZM |
| | | | 5UTR::UBI1ZM INTRON1::ZM- |
| | | | ODP2::PINII TERM + ZM- |
| | | | HSP17.7 PRO::MO-CRE EXON1:: |
| | | | ST-LS1 INTRON1::MO-CRE |
| | | | EXON2::PINII TERM + OS-UBI |
| | | | TERM + LOXP + SB-UBI3 |
| | | | PRO::SB-UBI3 INTRON1:: |
| | | | ZSGREEN1::PINII TERM + SB- |
| | | | ALS PRO::ZM-ALS::SB-PEPC1 |
| | | | TERM + LB |
| 257 | DNA | PHP98327 | RB + LOXP + BD-CAB2 |
| | | | UAR1::OC EME1::OC EME1::BD- |
| | | | CAB2 PRO::ZM-HPL V9 |
| | | | INTRON1::ZM-WUS2::PINII |
| | | | TERM + FMV ENHANCER + |
| | | | PCSV ENH + MMV ENH + |
| | | | UBI1ZM PRO::UBI1ZM |
| | | | 5UTR::UBI1ZM INTRON1::ZM- |
| | | | ODP2::OS-T28 TERM + AT-5-IV-7 |
| | | | INS + ZM-HSP17.7 PRO::MO-CRE |
| | | | EXON1::ST-LS1 INTRON1::MO- |
| | | | CRE EXON2::PINII TERM + OS- |
| | | | UBI TERM + LOXP + SI-UBI3 |
| | | | PRO::SI-UBI3 INTRON1:: |
| | | | ZSGREEN1::PINII TERM + SB- |
| | | | ALS PRO::ZM-ALS::SB-PEPC1 |
| | | | TERM + LB |
| 258 | DNA | PHP98370 | RB + LOXP + ZM-GOS2 PRO |
| | | | (UAR)::OC EME1::OC |
| | | | EME1::ZM-GOS2 PRO |
| | | | (CORE)::ZM-GOS2 |
| | | | INTRON1::ZM-WUS2::PINII |
| | | | TERM + FMV ENHANCER + |
| | | | PCSV ENH + MMV ENH + |
| | | | UBI1ZM PRO::UBI1ZM |
| | | | 5UTR::UBI1ZM INTRON1::ZM- |
| | | | ODP2::OS-T28 TERM + AT-5-IV-7 |
| | | | INS + ZM-HSP17.7 PRO::MO-CRE |
| | | | EXON1::ST-LS1 INTRON1::MO- |
| | | | CRE EXON2::PINII TERM + OS- |
| | | | UBI TERM + LOXP + SI-UBI3 |
| | | | PRO::SI-UBI3 INTRON1:: |
| | | | ZSGREEN1::PINII TERM + SB- |
| | | | ALS PRO::ZM-ALS::SB-PEPC1 |
| | | | TERM + LB |
| 259 | DNA | PHP98564 | RB + LOXP + ZM-PLTP |
| | | | PRO::ZM-PLTP 5UTR::ZM- |
| | | | WUS2::IN2 TERM + UBI1ZM |
| | | | PRO::UBI1ZM 5UTR::UBI1ZM |
| | | | INTRON1::ZM-ODP2::PINII |
| | | | TERM + ZM-HSP17.7 PRO::MO- |
| | | | CRE EXON1::ST-LS1 |
| | | | INTRON1::MO-CRE EXON2:: |
| | | | PINII TERM + OS-UBI TERM + |
| | | | LOXP + SB-UBI3 PRO::SB-UBI3 |
| | | | INTRON1::ZSGREEN1::PINII |
| | | | TERM + SB-ALS PRO::ZM- |
| | | | ALS::SB-PEPC1 TERM + LB |
| 260 | DNA | PHP98565 | RB + LOXP + ZM-PLTP |
| | | | PRO::ZM-PLTP 5UTR::ZM- |
| | | | WUS2::IN2 TERM + FMV |
| | | | ENHANCER + PCSV ENH + |
| | | | MMV ENH + UBI1ZM |
| | | | PRO::UBI1ZM 5UTR::UBI1ZM |
| | | | INTRON1::ZM-ODP2::OS-T28 |
| | | | TERM + AT-5-IV-7 INS + ZM- |
| | | | HSP17.7 PRO::MO-CRE EXON1:: |
| | | | ST-LS1 INTRON1::MO-CRE |
| | | | EXON2::PINII TERM + OS-UBI |
| | | | TERM + LOXP + SI-UBI3 |
| | | | PRO::SI-UBI3 INTRON1:: |
| | | | ZSGREEN1::PINII TERM + SB- |
| | | | ALS PRO::ZM-ALS::SB-PEPC1 |
| | | | TERM + LB |
| 261 | DNA | PHP97447 | RB + LOXP + ZM-HSP17.7 |
| | | | PRO::MO-CRE EXON1::ST-LS1 |
| | | | INTRON1::MO-CRE EXON2:: |
| | | | PINII TERM + UBI1ZM |
| | | | PRO::UBI1ZM 5UTR::UBI1ZM |
| | | | INTRON1::ZM-WUS2::IN2 TERM + |
| | | | UBI1ZM PRO (3X ZM-AS2 |
| | | | EME)::UBI1ZM INTRON1::ZM- |
| | | | ODP2::OS-T28 TERM + LOXP + |
| | | | SB-UBI PRO::SB-UBI INTRON1:: |
| | | | ZSGREEN1::OS-UBI TERM + SI- |
| | | | ALS PRO::SI-ALS 5UTR::ZM- |
| | | | ALS::SB-UBI TERM + LB |
| 262 | DNA | PHP97881 | RB + LOXP + UBI1ZM |
| | | | PRO::UBI1ZM 5UTR::UBI1ZM |
| | | | INTRON1::ZM-WUS2::IN2 TERM + |
| | | | UBI1ZM PRO (3X ZM-AS2 |
| | | | EME)::UBI1ZM INTRON1::ZM- |
| | | | ODP2::OS-T28 TERM + ZM- |
| | | | HSP17.7 PRO::MO-CRE EXON1:: |
| | | | ST-LS1 INTRON1::MO-CRE |
| | | | EXON2::PINII TERM + LOXP + |
| | | | SB-UBI PRO::SB-UBI INTRON1:: |
| | | | ZSGREEN1::OS-UBI TERM + SI- |
| | | | ALS PRO::SI-ALS 5UTR::ZM- |
| | | | ALS::SB-UBI TERM + LB |
| 263 | DNA | PHP99676 | RB + LOXP + NOS PRO::ZM- |
| | | | WUS2::PINII TERM + ZM-GRP1 |
| | | | PRO::ZM-ODP2::PINII TERM + |
| | | | AT-5-IV-7 INS + ZM-HSP17.7 |
| | | | PRO::MO-CRE EXON1::ST-LS1 |
| | | | INTRON1::MO-CRE EXON2:: |
| | | | PINII TERM + OS-UBI TERM + |
| | | | LOXP + SI-UBI3 PRO::SI-UBI3 |
| | | | INTRON1::ZSGREEN1::PINII |
| | | | TERM + SB-ALS PRO::ZM- |
| | | | ALS::SB-PEPC1 TERM + LB |
| 264 | DNA | PHP99677 | RB + LOXP + NOS PRO::ZM- |
| | | | WUS2::PINII TERM + ZM-RPL1 |
| | | | PRO::ZM-ODP2::PINII TERM + |
| | | | AT-5-IV-7 INS + ZM-HSP17.7 |
| | | | PRO::MO-CRE EXON1::ST-LS1 |
| | | | INTRON1::MO-CRE EXON2:: |
| | | | PINII TERM + OS-UBI TERM + |
| | | | LOXP + SI-UBI3 PRO::SI-UBI3 |
| | | | INTRON1::ZSGREEN1::PINII |
| | | | TERM + SB-ALS PRO::ZM- |
| | | | ALS::SB-PEPC1 TERM + LB |
| 265 | DNA | PHP99678 | RB + LOXP + NOS PRO::ZM- |
| | | | WUS2::PINII TERM + ZM-DNAJ |
| | | | PRO::ZM-ODP2::PINII TERM + |
| | | | AT-5-IV-7 INS + ZM-HSP17.7 |
| | | | PRO::MO-CRE EXON1::ST-LS1 |
| | | | INTRON1::MO-CRE EXON2:: |
| | | | PINII TERM + OS-UBI TERM + |
| | | | LOXP + SI-UBI3 PRO::SI-UBI3 |
| | | | INTRON1::ZSGREEN1::PINII |
| | | | TERM + SB-ALS PRO::ZM- |
| | | | ALS::SB-PEPC1 TERM + LB |
| 266 | DNA | PHP99679 | RB + LOXP + NOS PRO::ZM- |
| | | | WUS2::PINII TERM + ZM- |
| | | | SAMDC2 PRO::ZM-ODP2::PINII |
| | | | TERM + AT-5-IV-7 INS + ZM- |
| | | | HSP17.7 PRO::MO-CRE EXON1:: |
| | | | ST-LS1 INTRON1::MO-CRE |
| | | | EXON2::PINII TERM + OS-UBI |
| | | | TERM + LOXP + SI-UBI3 |
| | | | PRO::SI-UBI3 |
| | | | INTRON1::ZSGREEN1::PINII |
| | | | TERM + SB-ALS PRO::ZM- |
| | | | ALS::SB-PEPC1 TERM + LB |
| 267 | DNA | PHP99680 | RB + LOXP + NOS PRO::ZM- |
| | | | WUS2::PINII TERM + ZM-PPISO |
| | | | PRO::ZM-ODP2::PINII TERM + |
| | | | AT-5-IV-7 INS + ZM-HSP17.7 |
| | | | PRO::MO-CRE EXON1::ST-LS1 |
| | | | INTRON1::MO-CRE EXON2:: |
| | | | PINII TERM + OS-UBI TERM + |
| | | | LOXP + SI-UBI3 PRO::SI-UBI3 |
| | | | INTRON1::ZSGREEN1::PINII |
| | | | TERM + SB-ALS PRO::ZM- |
| | | | ALS::SB-PEPC1 TERM + LB |
| 268 | DNA | PHP99569 | RB + LOXP + NOS PRO::ZM- |
| | | | WUS2::PINII TERM + ZM-EF1A |
| | | | PRO::ZM-ODP2::PINII TERM + |
| | | | AT-5-IV-7 INS + ZM-HSP17.7 |
| | | | PRO::MO-CRE EXON1::ST-LS1 |
| | | | INTRON1::MO-CRE EXON2:: |
| | | | PINII TERM + OS-UBI TERM + |
| | | | LOXP + SI-UBI3 PRO::SI-UBI3 |
| | | | INTRON1::ZSGREEN1::PINII |
| | | | TERM + SB-ALS PRO::ZM- |
| | | | ALS::SB-PEPC1 TERM + LB |
| 269 | DNA | PHP100011 | RB + LOXP + NOS PRO::ZM- |
| | | | WUS2::PINII TERM + FMV |
| | | | ENHANCER + PCSV ENH + |
| | | | MMV ENH + ZM-RPL1 PRO::ZM- |
| | | | ODP2::PINII TERM + AT-5-IV-7 |
| | | | INS + ZM-HSP17.7 PRO::MO-CRE |
| | | | EXON1::ST-LS1 INTRON1::MO- |
| | | | CRE EXON2::PINII TERM + OS- |
| | | | UBI TERM + LOXP + SI-UBI3 |
| | | | PRO::SI-UBI3 |
| | | | INTRON1::ZSGREEN1::PINII |
| | | | TERM + SB-ALS PRO::ZM- |
| | | | ALS::SB-PEPC1 TERM + LB |
| 270 | DNA | PHP100012 | RB + LOXP + NOS PRO::ZM- |
| | | | WUS2::PINII TERM + FMV |
| | | | ENHANCER + PCSV ENH + |
| | | | MMV ENH + ZM-DNAJ |
| | | | PRO::ZM-ODP2::PINII TERM + |
| | | | AT-5-IV-7 INS + ZM-HSP17.7 |
| | | | PRO::MO-CRE EXON1::ST-LS1 |
| | | | INTRON1::MO-CRE EXON2:: |
| | | | PINII TERM + OS-UBI TERM + |
| | | | LOXP + SI-UBI3 PRO::SI-UBI3 |
| | | | INTRON1::ZSGREEN1::PINII |
| | | | TERM + SB-ALS PRO::ZM- |
| | | | ALS::SB-PEPC1 TERM + LB |
| 271 | DNA | PHP100013 | RB + LOXP + NOS PRO::ZM- |
| | | | WUS2::PINII TERM + FMV |
| | | | ENHANCER + PCSV ENH + |
| | | | MMV ENH + ZM-SAMDC2 |
| | | | PRO::ZM-ODP2::PINII TERM + |
| | | | AT-5-IV-7 INS + ZM-HSP17.7 |
| | | | PRO::MO-CRE EXON1::ST-LS1 |
| | | | INTRON1::MO-CRE EXON2:: |
| | | | PINII TERM + OS-UBI TERM + |
| | | | LOXP + SI-UBI3 PRO::SI-UBI3 |
| | | | INTRON1::ZSGREEN1::PINII |
| | | | TERM + SB-ALS PRO::ZM- |
| | | | ALS::SB-PEPC1 TERM + LB |
| 272 | DNA | PHP100056 | RB + LOXP + NOS PRO::ZM- |
| | | | WUS2::PINII TERM + FMV |
| | | | ENHANCER + PCSV ENH + |
| | | | MMV ENH + ZM-PPISO |
| | | | PRO::ZM-ODP2::PINII TERM + |
| | | | AT-5-IV-7 INS + ZM-HSP17.7 |
| | | | PRO::MO-CRE EXON1::ST-LS1 |
| | | | INTRON1::MO-CRE EXON2:: |
| | | | PINII TERM + OS-UBI TERM + |
| | | | LOXP + SI-UBI3 PRO::SI-UBI3 |
| | | | INTRON1::ZSGREEN1::PINII |
| | | | TERM + SB-ALS PRO::ZM- |
| | | | ALS::SB-PEPC1 TERM + LB |
| 273 | DNA | PHP100057 | RB + LOXP + NOS PRO::ZM- |
| | | | WUS2::PINII TERM + FMV |
| | | | ENHANCER + PCSV ENH + |
| | | | MMV ENH + ZM-EF1A PRO::ZM- |
| | | | ODP2::PINII TERM + AT-5-IV-7 |
| | | | INS + ZM-HSP17.7 PRO::MO-CRE |
| | | | EXON1::ST-LS1 INTRON1::MO- |
| | | | CRE EXON2::PINII TERM + OS- |
| | | | UBI TERM + LOXP + SI-UBI3 |
| | | | PRO::SI-UBI3 |
| | | | INTRON1::ZSGREEN1::PINII |
| | | | TERM + SB-ALS PRO::ZM- |
| | | | ALS::SB-PEPC1 TERM + LB |
| 274 | DNA | PHP100158 | RB + LOXP + NOS PRO::ZM- |
| | | | WUS2::PINII TERM + FMV |
| | | | ENHANCER + PCSV ENH + |
| | | | MMV ENH + ZM-GRP1 PRO::ZM- |
| | | | ODP2::PINII TERM + AT-5-IV-7 |
| | | | INS + ZM-HSP17.7 PRO::MO-CRE |
| | | | EXON1::ST-LS1 INTRON1::MO- |
| | | | CRE EXON2::PINII TERM + OS- |
| | | | UBI TERM + LOXP + SI-UBI3 |
| | | | PRO::SI-UBI3 |
| | | | INTRON1::ZSGREEN1::PINII |
| | | | TERM + SB-ALS PRO::ZM- |
| | | | ALS::SB-PEPC1 TERM + LB |
| 275 | DNA | PHP98229 | RB + LOXP + NOS PRO::ZM- |
| | | | WUS2::IN2 TERM + AT-5-IV-2 |
| | | | INS + FMV ENHANCER + PCSV |
| | | | ENH + MMV ENH + UBI1ZM |
| | | | PRO::UBI1ZM 5UTR::UBI1ZM |
| | | | INTRON1::ZM-ODP2::OS-T28 |
| | | | TERM + AT-5-IV-2 INS + ZM- |
| | | | HSP17.7 PRO::MO-CRE EXON1:: |
| | | | ST-LS1 INTRON1::MO-CRE |
| | | | EXON2::PINII TERM + LOXP + |
| | | | SB-UBI PRO::SB-UBI INTRON1:: |
| | | | ZSGREEN1::OS-UBI TERM + SI- |
| | | | ALS PRO::SI-ALS 5 UTR::ZM- |
| | | | ALS::SB-UBI TERM + LB |
| 276 | DNA | PHP100159 | RB + LOXP + NOS PRO::ZM- |
| | | | WUS2::IN2 TERM + FMV |
| | | | ENHANCER + PCSV ENH + |
| | | | MMV ENH + UBI1ZM |
| | | | PRO::UBI1ZM 5UTR::UBI1ZM |
| | | | INTRON1::ZM-ODP2::OS-T28 |
| | | | TERM + UBI1ZM PRO::UBI1ZM |
| | | | 5UTR::UBI1ZM INTRON1::ZM- |
| | | | CYCD2::SB-GKAF TERM + AT-5- |
| | | | IV-7 INS + ZM-HSP17.7 |
| | | | PRO::MO-CRE EXON1::ST-LS1 |
| | | | INTRON1::MO-CRE EXON2:: |
| | | | PINII TERM + OS-UBI TERM + |
| | | | LOXP + SB-UBI3 PRO::SB-UBI3 |
| | | | INTRON1::ZSGREEN1::PINII |
| | | | TERM + SB-ALS PRO::ZM- |
| | | | ALS::SB-PEPC1 TERM + LB |
| 277 | DNA | PHP100160 | RB + LOXP + NOS PRO::ZM- |
| | | | WUS2::IN2 TERM + FMV |
| | | | ENHANCER + PCSV ENH + |
| | | | MMV ENH + UBI1ZM |
| | | | PRO::UBI1ZM 5UTR::UBI1ZM |
| | | | INTRON1::ZM-ODP2::OS-T28 |
| | | | TERM + UBI1ZM PRO::UBI1ZM |
| | | | 5UTR::UBI1ZM |
| | | | INTRON1::REPA(WDV)::SB- |
| | | | GKAF TERM + AT-5-IV-7 INS + |
| | | | ZM-HSP17.7 PRO::MO-CRE |
| | | | EXON1::ST-LS1 INTRON1::MO- |
| | | | CRE EXON2::PINII TERM + OS- |
| | | | UBI TERM + LOXP + SB-UBI3 |
| | | | PRO::SB-UBI3 INTRON1:: |
| | | | ZSGREEN1::PINII TERM + SB- |
| | | | ALS PRO::ZM-ALS::SB-PEPC1 |
| | | | TERM + LB |
| 278 | DNA | PHP100229 | RB + LOXP + ZM-ATP SYN |
| | | | PRO::ZM-WUS2::PINII TERM + |
| | | | FMV ENHANCER + PCSV ENH + |
| | | | MMV ENH + UBI1ZM |
| | | | PRO::UBI1ZM 5UTR::UBI1ZM |
| | | | INTRON1::ZM-ODP2::OS-T28 |
| | | | TERM + AT-5-IV-7 INS + ZM- |
| | | | HSP17.7 PRO::MO-CRE EXON1:: |
| | | | ST-LS1 INTRON1::MO-CRE |
| | | | EXON2::PINII TERM + OS-UBI |
| | | | TERM + LOXP + SB-UBI3 |
| | | | PRO::SB-UBI3 INTRON1:: |
| | | | ZSGREEN1::PINII TERM + SB- |
| | | | ALS PRO::ZM-ALS::SB-PEPC1 |
| | | | TERM + LB |
| 279 | DNA | PHP99971 | RB + LOXP + ZM-EF4A |
| | | | PRO::ZM-WUS2::PINII TERM + |
| | | | FMV ENHANCER + PCSV ENH + |
| | | | MMV ENH + UBI1ZM |
| | | | PRO::UBI1ZM 5UTR::UBI1ZM |
| | | | INTRON1::ZM-ODP2::OS-T28 |
| | | | TERM + AT-5-IV-7 INS + ZM- |
| | | | HSP17.7 PRO::MO-CRE EXON1:: |
| | | | ST-LS1 INTRON1::MO-CRE |
| | | | EXON2::PINII TERM + OS-UBI |
| | | | TERM + LOXP + SB-UBI3 |
| | | | PRO::SB-UBI3 INTRON1:: |
| | | | ZSGREEN1::PINII TERM + SB- |
| | | | ALS PRO::ZM-ALS::SB-PEPC1 |
| | | | TERM + LB |
| 280 | DNA | PHP99809 | RB + LOXP + ZM-PABP |
| | | | PRO::ZM-WUS2::PINII TERM + |
| | | | FMV ENHANCER + PCSV ENH + |
| | | | MMV ENH + UBI1ZM |
| | | | PRO::UBI1ZM 5UTR::UBI1ZM |
| | | | INTRON1::ZM-ODP2::OS-T28 |
| | | | TERM + AT-5-IV-7 INS + ZM- |
| | | | HSP17.7 PRO::MO-CRE EXON1:: |
| | | | ST-LS1 INTRON1::MO-CRE |
| | | | EXON2::PINII TERM + OS-UBI |
| | | | TERM + LOXP + SB-UBI3 |
| | | | PRO::SB-UBI3 INTRON1:: |
| | | | ZSGREEN1::PINII TERM + SB- |
| | | | ALS PRO::ZM-ALS::SB-PEPC1 |
| | | | TERM + LB |
| 281 | DNA | PHP99810 | RB + LOXP + ZM-VDACIA |
| | | | PRO::ZM-WUS2::PINII TERM + |
| | | | FMV ENHANCER + PCSV ENH + |
| | | | MMV ENH + UBI1ZM |
| | | | PRO::UBI1ZM 5UTR::UBI1ZM |
| | | | INTRON1::ZM-ODP2::OS-T28 |
| | | | TERM + AT-5-IV-7 INS + ZM- |
| | | | HSP17.7 PRO::MO-CRE EXON1:: |
| | | | ST-LS1 INTRON1::MO-CRE |
| | | | EXON2::PINII TERM + OS-UBI |
| | | | TERM + LOXP + SB-UBI3 |
| | | | PRO::SB-UBI3 INTRON1:: |
| | | | ZSGREEN1::PINII TERM + SB- |
| | | | ALS PRO::ZM-ALS::SB-PEPC1 |
| | | | TERM + LB |
| 282 | DNA | PHP99716 | RB + LOXP + ZM-LEA14 |
| | | | PRO::ZM-WUS2::PINII TERM + |
| | | | FMV ENHANCER + PCSV ENH + |
| | | | MMV ENH + UBI1ZM |
| | | | PRO::UBI1ZM 5UTR::UBI1ZM |
| | | | INTRON1::ZM-ODP2::OS-T28 |
| | | | TERM + AT-5-IV-7 INS + ZM- |
| | | | HSP17.7 PRO::MO-CRE EXON1:: |
| | | | ST-LS1 INTRON1::MO-CRE |
| | | | EXON2::PINII TERM + OS-UBI |
| | | | TERM + LOXP + SB-UBI3 |
| | | | PRO::SB-UBI3 INTRON1:: |
| | | | ZSGREEN1::PINII TERM + SB- |
| | | | ALS PRO::ZM-ALS::SB-PEPC1 |
| | | | TERM + LB |
| | | | RB + LOXP + NOS::WUS2::IN2 |
| | | | TERM + FMV ENHANCER + |
| | | | PCSV ENH + MMV ENH + |
| 283 | DNA | PHP99721 | UBI1ZM PRO::UBI1ZM |
| | | | 5UTR::UBI1ZM INTRON1::ZM- |
| | | | ODP2::OS-T28 TERM + AT-5-IV-7 |
| | | | INS + HSP17.7 PRO::MO- |
| | | | CRE::PINII TERM + UBI1ZM |
| | | | PRO::CAS9::ZM-UBI TERM + |
| | | | ZM-U6 PRO::gRNA-CHR1-53.66 + |
| | | | ZM-ALS PRO::HRA::SB-UBI |
| | | | TERM + CHR1-53.66 TARGET |
| | | | SITE + HOMOLOGY SEQ1 + SI- |
| | | | UBI PRO::NPTII::SI-UBI TERM + |
| | | | HOMOLOGY SEQ2 + CHR1-53.66 |
| | | | TARGET SITE + SB-UBI |
| | | | PRO::ZS-GREEN1::OS-UBI TERM + |
| | | | LB |
| 284 | DNA | PHP97978 | RB + LOXP + NOS::WUS2::IN2 |
| | | | TERM + UBI1ZM PRO::UBI1ZM |
| | | | 5UTR::UBI1ZM INTRON1::ZM- |
| | | | ODP2::OS-T28 TERM + CZ19B1 |
| | | | TERM + HSP17.7 PRO::MO- |
| | | | CRE::PINII TERM + LOXP + SB- |
| | | | UBI PRO::SB-UBI INTRON1:: |
| | | | ZSGREEN1::OS-UBI TERM + SB- |
| | | | ALS PRO::ZM-ALS::SB-UBI |
| | | | TERM + LB |
| 285 | DNA | PHP101270 | RB + LOXP + NOS::WUS2::IN2 |
| | | | TERM + SCBV PRO::SCBV |
| | | | 5UTR::ZM-ODP2::PINII TERM + |
| | | | AT-5-IV-7 INS + ZM-HSP17.7 |
| | | | PRO::MO-CRE EXON1::ST-LS1 |
| | | | INTRON1::MO-CRE EXON2:: |
| | | | PINII TERM + OS-UBI TERM + |
| | | | LOXP + SB-UBI3 PRO::SB-UBI3 |
| | | | INTRON1::ZSGREEN1::PINII |
| | | | TERM + SB-ALS PRO::ZM- |
| | | | ALS::SB-PEPC1 TERM + LB |
| 286 | DNA | PHP102481 | RB + LOXP + NOS::WUS2::IN2 |
| | | | TERM + BD-CAB2 UAR1::OC |
| | | | EME 1::OC EME 1::BD-CAB2 |
| | | | PRO::ZM-HPL V9 INTRON::ZM- |
| | | | ODP2::OS-T28 TERM + AT-5-IV-7 |
| | | | INS + ZM-HSP17.7 PRO::MO-CRE |
| | | | EXON1::ST-LS1 INTRON1::MO- |
| | | | CRE EXON2::PINII TERM + OS- |
| | | | UBI TERM + LOXP + SB-UBI |
| | | | PRO::SB-UBI INTRON1:: |
| | | | ZSGREEN1::OS-UBI TERM + SI- |
| | | | UBI1 PRO::SI-UBI1 |
| | | | INTRON::NPTII::SB-UBI TERM + |
| | | | LB |
| 287 | DNA | BD-UBI1 | Promoter for Ubiquitin 1 from |
| | | | Brachypodium distachyon |
| 288 | DNA | BD-UBI1C | Promoter for Ubiquitin 1C from |
| | | | Brachypodium distachyon |
| 289 | DNA | BSV(AY) | Promoter from Banana Streak Virus |
| 290 | DNA | AT-NOS PRO | Nopaline Synthase promoter from |
| | | | Agrobacterium tumefaciens |
| 291 | DNA | ZM-AXIG1 | Zea mays promoter upregulated by |
| | | PRO | banveland auxin |
| 292 | DNA | ZM-PLTP PRO | Zea mays promoter from |
| | | | phospholipid transfer protein |
| | | | (PLTP) homolog |
| 293 | DNA | 35S Enhancer | Cauliflower Mosaic Virus enhancer |
| | | | element |
| 294 | DNA | ZM-CAB PRO | Zea mays cab-1 gene for chlorophyll |
| | | | a/b-binding protein |
| 295 | DNA | SCBV PRO | Promoter from an Australian isolate |
| | | | of Sugarcane bacilliform virus |
| 296 | DNA | 8xDR5 PRO | Synthetic promoter |
| 297 | DNA | FT-MEM1 | Flaveria trinervia transciption factor |
| | | | binding site |
| 298 | DNA | ZM-PEPC1 | Zea mays Phospoenolpyruvate |
| | | PRO | Carboxylase1 promoter |
| 299 | DNA | DIURNAL12 | Zea mays thiazole biosynthetic |
| | | Promoter | enzyme 1-1, chloroplast promoter |
| 300 | DNA | RUBISCO SSU | Zea mays promoter for the Ribulose |
| | | PROr | bisphosphate carboxylase |
| | | | (RUBISCO) Small Subunit protein |
| 301 | DNA | CSVMV PRO | Cassava vein mosaic virus promoter |
| 302 | DNA | FT-PPCA1 | Flaveria trinervia |
| | | PRO | Phosphoenolpyruvate carboxylase |
| | | | A1 promoter |
| 303 | DNA | ZM-GOS2 | Zea mays GOS2 promoter |
| | | PRO | |
| 304 | DNA | ZM-SWEET11 | Zea mays SWEET11 promoter |
| | | PRO | |
| 305 | DNA | ZM- | Zea mays diurnal promoter #10 |
| | | DIURNAL10 | |
| | | PRO | |
| 306 | DNA | ZM- | Zea mays diurnal promoter #11 |
| | | DIURNAL11 | |
| | | PRO | |
| 307 | DNA | ZM-ADH | Zea mays alcohol dehydrogenase |
| | | INTRON | intron 1 |
| 308 | DNA | ZM-LEC1 | Zea mays LEC1 (Leafy cotyledon 1) |
| | | | gene |
| 309 | PRT | ZM-LEC1 | Encoded protein of the Zea mays |
| | | | LECI gene |
| 310 | DNA | PLTP2 PPO | Zea mays promoter from |
| | | | phospholipid transfer protein2 |
| | | | (PLTP2) |
| 311 | DNA | REPA | Wheat Dwarf Virus REPA gene |
| 312 | PRT | REPA | Encoded protein of the Wheat |
| | | | Dwarf Virus REPA gene |
| 313 | DNA | amiPKL-A | Synthetic artificial micro-RNA that |
| | | | targets the Zea mays PICKLE (PKL) |
| | | | transcript. |
| 314 | DNA | ZM-GPCNAC-1 | Full-length Zea mays Grain Protein |
| | | | Content NAC transcription factor |
| | | | gene |
| 315 | PRT | ZM-GPCNAC-1 | Encoded protein for the Zea mays |
| | | | Grain Protein Content NAC |
| | | | transcription factor gene |
| 316 | DNA | RKD4 | Maize-optimized version of the |
| | | | Arabidopsis RWP-RK-type |
| | | | transcription factor |
| 317 | PRT | AT-RKD4 | Encoded protein for the maize- |
| | | | optimized version of the |
| | | | Arabidopsis RWP-RK-type |
| | | | transcription factor |
| 318 | DNA | MO-LEC2 | Maize codon-optimized version of |
| | | | the Arabidopsis thaliana AtLEC2 |
| | | | LEAFY COTYLEDON 2 gene |
| 319 | PRT | AT-LEC2 | Encoded protein of the maize |
| | | | codon-optimized version of the |
| | | | Arabidopsis thaliana LEC2 LEAFY |
| | | | COTYLEDON 2 gene |
| 320 | DNA | RAP2.6L | Maize codon-optimized version of |
| | | | the Arabidopsis thaliana RAP2.6L |
| | | | gene |
| 321 | PRT | AT-RAP2.6L | Encoded protein of the maize |
| | | | codon-optimized version of the |
| | | | Arabidopsis thaliana RAP2.6L gene |
| 322 | DNA | AT-5-IV-2 | Sequence from Arabidopsis thaliana |
| | | | with insulator properties |
| 323 | DNA | ZM-RLD1 | Zea mays Rolled Leaf 1 homolog of |
| | | | Revoluta from Arabidopsis thaliana |
| 324 | PRT | ZM-RLD1 | Encoded protein of the Zea mays |
| | | | Rolled Leaf 1 homolog of Revoluta |
| | | | from Arabidopsis thaliana |
| 325 | DNA | ZM-KN1 | Zea mays class I homeobox |
| | | | transcription factor Knotted1 gene |
| 326 | PRT | KN1 | Encoded protein of the Zea mays |
| | | | class I homeobox transcription |
| | | | factor Knotted1 gene |
| 327 | DNA | AT-5-IV-7 | Sequence from Arabidopsis with |
| | | | insulator properties |
| 328 | DNA | ZM-CYCD2 | Zea mays Cyclin delta-2 gene |
| 329 | PRT | ZM-CYCD2 | Encoded protein of the Zea mays |
| | | | Cyclin delta-2 gene |
| 330 | DNA | HSP17.7 PRO | Zea mays promoter for Heat Shock |
| | | | Protein 17.7 |
| 331 | DNA | RAB17 PRO | Zea mays promoter for RAB17 |
| 332 | DNA | GLB1 PRO | Zea mays globulin 1 promoter |
| 333 | DNA | ZM-UBI1 PRO | Zea mays ubiquitin1 promoter |
| | | (UBI1ZM | |
| | | PRO) | |
| 334 | DNA | ZM-UBI1 | Zea mays ubiquitin1 5′ untranslated |
| | | 5UTR | region |
| | | (UBI1ZM | |
| | | 5UTR) | |
| 335 | DNA | ZM-UBI1 | Zea mays ubiquitin1 intron1 |
| | | INTRON1 | |
| | | (UBI1ZM | |
| | | INTRON1) | |
| 336 | DNA | FMV ENH | Figwort Mosaic Virus enhancer |
| 337 | DNA | PCSV ENH | Peanut Chlorotic Streak |
| | | | Caulimovirus enhancer |
| 338 | DNA | MMV ENH | Mirabilis Mosaic Virus enhancer |
| 339 | DNA | ZM-UBI1 PRO | Zea mays ubiquitin1 promoter (SEQ |
| | | Complete | ID NO: 333) + Zea mays ubiquitin1 |
| | | | intron1 (SEQ ID NO: 334) + Zea |
| | | | mays ubiquitin1 intron1 (SEQ ID |
| | | | NO: 335) |
| 340 | DNA | 3xENH | Figwort Mosaic Virus enhancer |
| | | | (SEQ ID NO: 336) + Peanut |
| | | | Chlorotic Streak Caulimovirus |
| | | | enhancer (SEQ ID NO: 337) + |
| | | | Mirabilis Mosaic Virus enhancer |
| | | | (SEQ ID NO: 338) |
| 341 | DNA | PHV00001 | RB + LOXP + FMV ENH:PSCV |
| | | | ENH:MMV ENH:UBI1ZM |
| | | | PRO::UBI1ZM 5UTR: UBI1ZM |
| | | | INTRON1::ZM-ODP2::OS-T28 |
| | | | TERM + HSP17.7 PRO::CRE |
| | | | EXON1:ST-LS1 INTRON2:CRE |
| | | | EXON2::PINII TERM + LOXP + |
| | | | SB-UBI PRO::SB-UBI |
| | | | INTRON1::ZS-GREEN::OS-UBI |
| | | | TERM + SI-UBI PRO::SI-UBI |
| | | | INTRON1::NPTII::SB-UBI TERM + |
| | | | LB |
| 342 | DNA | PHV00002 | RB + LOXP + FMV ENH:PSCV |
| | | | ENH:MMV ENH:UBI1ZM |
| | | | PRO::UBI1ZM 5UTR: UBI1ZM |
| | | | INTRON1::ZM-WUS2::OS-T28 |
| | | | TERM + HSP17.7 PRO::CRE |
| | | | EXON1:ST-LS1 INTRON2:CRE |
| | | | EXON2::PINII TERM + LOXP + |
| | | | SB-UBI PRO::SB-UBI |
| | | | INTRON1::ZS-GREEN::OS-UBI |
| | | | TERM + SI-UBI PRO::SI-UBI |
| | | | INTRON1::NPTII::SB-UBI TERM + |
| | | | LB |
| 343 | DNA | PHV00003 | RB + LOXP + ZM-GOS2 PRO::SB- |
| | | | UBI INTRON1::MO-LEXA:MO- |
| | | | CBF1A::SB-ACTIN TERM + |
| | | | 6xREC:MIN35S PRO::ZM- |
| | | | ODP2::OS-UBI TERM + HSP17.7 |
| | | | PRO::CRE EXON1: ST-LS1 |
| | | | INTRON2:CRE EXON2::PINII |
| | | | TERM + LOXP + SB-UBI |
| | | | PRO::SB-UBI INTRON1::ZS- |
| | | | GREEN::OS-UBI TERM + SI-UBI |
| | | | PRO::SI-UBI |
| | | | INTRON1::NPTII::SB-UBI TERM + |
| | | | LB |
| 344 | DNA | PHV00004 | RB + LOXP + ZM-GOS2 PRO::SB- |
| | | | UBI INTRON1::MO-LEXA:MO- |
| | | | CBF1A::SB-ACTIN TERM + |
| | | | 6xREC:MIN35S PRO::ZM- |
| | | | WUS2::OS-UBI TERM + HSP17.7 |
| | | | PRO::CRE EXON1:ST-LS1 |
| | | | INTRON2:CRE EXON2::PINII |
| | | | TERM + LOXP + SB-UBI |
| | | | PRO::SB-UBI INTRON1::ZS- |
| | | | GREEN::OS-UBI TERM + SI-UBI |
| | | | PRO::SI-UBI |
| | | | INTRON1::NPTII::SB-UBI TERM + |
| | | | LB |
| 345 | DNA | 3xENH-UBI | 3xENH-UBI |
| 346 | DNA | MO-LEXA- | Fusion protein coding sequence |
| | | MO-CBF1A | composed of the maize-optimized |
| | | | LEXA gene via a flexible protein |
| | | | linker peptide to a maize-optimized |
| | | | CBF1A gene |
| 347 | PRT | MO-LEXA- | Encoded fusion protein composed of |
| | | MO-CBF1A | the maize-optimized LEXA DNA- |
| | | PRT | binding polypeptide, a flexible |
| | | | protein linker peptide, and the |
| | | | CBF1A activation domain |
| 348 | DNA | 6xREC- | Six repeats of the LEXA binding |
| | | MIN35S | motif plus the 45 base-pair minimal |
| | | | 35S promoter core |

### Example 2: Media Compositions

[0177] Various media are referenced in the Examples for use in transformation and cell culture. The composition of these media are provided below in Tables 3-14.

TABLE 3
Medium Composition

PHI-I: 4.3 g/l MS salts (Phytotechnology Laboratories, Shawnee Mission, KS,
catalog number M524), 0.5 mg/l nicotinic acid, 0.5 mg/l pyridoxine HCl, 1 mg/l
thiamine HCl, 0.1 g/l myo-inositol, 1 g/l casamino acids (Becton Dickinson and
Company, BD Diagnostic Systems, Sparks, MD, catalog number 223050),
1.5 mg/l 2,4-dichlorophenoxyacetic acid (2,4-D), 68.5 g/l sucrose, 36 g/l
glucose, pH 5.2; with 100 μM acetosyringone added before using.
PHI-T: PHI-I with 20 g/l sucrose, 10 g/l glucose, 2 mg/l 2,4-D, no casamino
acids, 0.5 g/l MES buffer, 0.7 g/l L-proline, 10 mg/l ascorbic acid, 100 μM
acetosyringone, 8 g/l agar, pH 5.8.
PHI-U: PHI-T with 1.5 mg/1 2,4-D 100 mg/l carbenicillin, 30 g/l sucrose, no
glucose and acetosyringone; 5 mg/l PPT, pH 5.8.
PHI-UM: PHI-U with12.5 g/l mannose and 5 g/l maltose, no sucrose, no PPT,
pH 5.8
PHI-V: PHI-U with 10 mg/l PPT
DBC3: 4.3 g/l MS salts, 0.25 g/l myo-inositol, 1.0 g/l casein hydrolysate,
1.0 mg/l thiamine HCL, 1.0 mg/l 2,4-D, 30 g/l maltose, 0.69 g/l L-proline,
1.22 mg/l cupric sulfate, 0.5 mg/l BAP, 3.5 g/l phytagel, pH 5.8
PHI-X: 4.3 g/l MS salts, 0.1 g/l myo-inositol, 5.0 ml MS vitamins stock^{a},
0.5 mg/l zeatin, 700 mg/l L-proline, 60 g/l sucrose, 1 mg/l indole-3-acetic acid,
0.1 μM abscisic acid, 0.1 mg/l thidiazuron, 100 mg/l carbenicillin, 5 mg/l PPT,
8 g/l agar, pH 5.6.
PHI-XM: PHI-X with no PPT; added 1.25 mg/l cupric sulfate, pH 5.6.
PHI-Z: 2.15 g/l MS salts, 0.05 g/l myo-inositol, 2.5 ml MS vitamins stock^{a},
20 g/l sucrose, 3 g/l phytagel, pH 5.6
^{a}MS vitamins stock: 0.1 g/l nicotinic acid, 0.1 g/l pyridoxine HCl, 0.02 g/l thiamine HCl, 0.4 g/l glycine.

TABLE 4

| WI 4 | | |
|---|---|---|
| DI water | 1000 | mL |
| MS salt + Vitamins(M519) | 4.43 | g |
| Maltose | 30 | g |
| Glucose | 10 | g |
| MES | 1.95 | g |
| 2,4-D (.5 mg/L) | 1 | ml |
| Picloram (10 mg/ml) | 200 | μl |
| BAP (1 mg/L) | .5 | ml |
| Adjust PH to 5.8 with KOH | | |
| Post sterilization add: | | |
| Acetosyringone (400 μM) | 400 | μl |

TABLE 5

| WC # 10 | | |
|---|---|---|
| DI water | 1000 | mL |
| MS salt + Vitamins(M519) | 4.43 | g |
| Maltose | 30 | g |
| Glucose | 1 | g |
| MES | 1.95 | g |
| 2,4-D (.5 mg/L) | 1 | ml |
| Picloram (10 mg/ml) | 200 | μl |
| BAP (1 mg/L) | .5 | ml |
| 50X CuSO4 (.1M) | 49 | μl |
| Adjust PH to 5.8 with KOH and add 2.5 g/L | | |
| of Phytagel. | | |
| Post sterilization add: | | |
| Acetosyringone (400 μM) | 400 | μl |

TABLE 6

| DBC4 | | |
|---|---|---|
| dd H20 | 1000 | mL |
| MS salt | 4.3 | g |
| Maltose | 30 | g |
| Myo-inositol | 0.25 | g |
| N-Z-Amine-A | 1 | g |
| Proline | 0.69 | g |
| Thiamine-HCl (0.1 mg/mL) | 10 | mL |
| 50X CuSO4 (0.1M) | 49 | μL |
| 2,4-D (0.5 mg/mL) | 2 | mL |
| BAP | 1 | mL |
| Adjust PH to 5.8 with KOH and then add | | |
| 3.5 g/L of Phytagel. | | |
| Post sterilization add: | | |
| Cef(100 mg/ml) | 1 | ml |

TABLE 7

| DBC6 | | |
|---|---|---|
| dd H20 | 1000 | mL |
| MS salt | 4.3 | g |
| Maltose | 30 | g |
| Myo-inositol | 0.25 | g |
| N-Z-Amine-A | 1 | g |
| Proline | 0.69 | g |
| Thiamine-HCl (0.1 mg/mL) | 10 | mL |
| 50X CuSO4 (0.1M) | 49 | μL |
| 2,4-D (0.5 mg/mL) | 1 | mL |
| BAP | 2 | mL |
| Adjust PH to 5.8 with KOH and then add 3.5 | | |
| g/L of Phytagel. | | |
| Post sterilization add: | | |
| Cef(100 mg/ml) | 1 | ml |

TABLE 8

| MSA | | |
|---|---|---|
| dd H20 | 1000 | mL |
| MS salt + Vitamins(M519) | 4.43 | g |
| Sucorse | 20 | g |
| Myo- Inositol | 1 | g |
| Adjust PH to 5.8 with KOH and then add 3.5 | | |
| g/L of Phytagel. | | |
| Post steriliaztion add: | | |
| Cef(100 mg/ml) | 1ml | |

TABLE 9

| MSB | | |
|---|---|---|
| dd H20 | 1000 | mL |
| MS salt + Vitamins(M519) | 4.43 | g |
| Sucorse | 20 | g |
| Myo- Inositol | 1 | g |
| Adjust PH to 5.8 with KOH and then add 3.5 | | |
| g/L of Phytagel. | | |
| Post sterilization add: | | |
| Cef(100 mg/ml) | 1 | ml |
| IBA | .5 | ml |

TABLE 10

| | Units | | | | | | | |
|---|---|---|---|---|---|---|---|---|
| | per | | | | | | | |
| Medium Components | liter | 12V | 810I | 700A | 710I | 605J | 605T | 289Q |
| MS BASAL SALT MIXTURE | g | | | 4.3 | 4.3 | 4.3 | 4.3 | 4.3 |
| N6 MACRONUTRIENTS 10× | ml | | | | | 60.0 | 60.0 | |
| POTASSIUM NITRATE | g | | | | | 1.7 | 1.7 | |
| B5H MINOR SALTS 1000× | ml | | | | | 0.6 | 0.6 | |
| NaFe EDTA FOR B5H 100× | ml | | | | | 6.0 | 6.0 | |
| ERIKSSON'S VITAMINS 1000× | ml | | | | | 0.4 | 0.4 | |
| S&H VITAMIN STOCK 100× | ml | | | | | 6.0 | 6.0 | |
| THIAMINE · HCL | mg | | | 10.0 | 10.0 | 0.5 | 0.5 | |
| L-PROLINE | g | | | | 0.7 | 2.0 | 2.0 | 0.7 |
| CASEIN HYDROLYSATE | g | | | | | 0.3 | 0.3 | |
| (ACID) | | | | | | | | |
| SUCROSE | g | | | 68.5 | 20.0 | 20.0 | 20.0 | 60.0 |
| GLUCOSE | g | 5.0 | | 36.0 | 10.0 | 0.6 | 0.6 | |
| MALTOSE | g | | | | | | | |
| 2,4-D | mg | | | 1.5 | 2.0 | 0.8 | 0.8 | |
| AGAR | g | 15.0 | 15.0 | | 8.0 | 6.0 | 6.0 | 8.0 |
| PHYTAGEL | g | | | | | | | |
| DICAMBA | g | | | | | 1.2 | 1.2 | |
| SILVER NITRATE | mg | | | | | 3.4 | 3.4 | |
| AGRIBIO Carbenicillin | mg | | | | | 100.0 | | |
| Timentin | mg | | | | | | 150.0 | 150.0 |
| Cefotaxime | mg | | | | | | 100.0 | 100.0 |
| MYO-INOSITOL | g | | | 0.1 | 0.1 | | | 0.1 |
| NICOTINIC ACID | mg | | | 0.5 | 0.5 | | | |
| PYRIDOXINE · HCL | mg | | | 0.5 | 0.5 | | | |
| VITAMIN ASSAY CASAMINO | g | | | 1.0 | | | | |
| ACIDS | | | | | | | | |
| MES BUFFER | g | | | | 0.5 | | | |
| ACETOSYRINGONE | uM | | | | 100.0 | | | |
| ASCORBIC ACID | mg | | | | 10.0 | | | |
| 10 MG/ML (7S) | | | | | | | | |
| MS VITAMIN STOCK SOL. | ml | | | | | | | 5.0 |
| ZEATIN | mg | | | | | | | 0.5 |
| CUPRIC SULFATE | mg | | | | | | | 1.3 |
| IAA 0.5 MG/ML (28A) | ml | | | | | | | 2.0 |
| ABA 0.1 mm | ml | | | | | | | 1.0 |
| THIDIAZURON | mg | | | | | | | 0.1 |
| AGRIBIO Carbenicillin | mg | | | | | | | 100.0 |
| PPT(GLUFOSINATE-NH4) | mg | | | | | | | |
| BAP | mg | | | | | | | 1.0 |
| YEAST EXTRACT (BD Difco) | g | | 5.0 | | | | | |
| PEPTONE | g | | 10.0 | | | | | |
| SODIUM CHLORIDE | g | | 5.0 | | | | | |
| SPECTINOMYCIN | mg | 50.0 | 100.0 | | | | | |
| FERROUS SULFATE · 7H20 | ml | 2.0 | | | | | | |
| AB BUFFER 20× (12D) | ml | 50.0 | | | | | | |
| AB SALTS 20× (12E) | ml | 50.0 | | | | | | |
| Benomyl | mg | | | | | | | |
| pH | | | | | | | | 5.6 |

TABLE 11

| | Units | | | |
|---|---|---|---|---|
| | per | | | |
| Medium Components | liter | 289R | 13158H | 13224B |
| MS BASAL SALT MIXTURE | g | 4.3 | 4.3 | |
| N6 MACRONUTRIENTS 10X | ml | | | 4.0 |
| POTASSIUM NITRATE | g | | | |
| B5H MINOR SALTS 1000X | ml | | | |
| NaFe EDTA FOR B5H 100X | ml | | | |
| ERIKSSON'S VITAMINS 1000X | ml | | | 1.0 |
| S&H VITAMIN STOCK 100X | ml | | | |
| THIAMINE•HCL | mg | | | 0.5 |
| L-PROLINE | g | 0.7 | 0.7 | 2.9 |
| CASEIN HYDROLYSATE | g | | | |
| (ACID) | | | | |
| SUCROSE | g | 60.0 | 60.0 | 190.0 |
| GLUCOSE | g | | | |
| MALTOSE | g | | | |
| 2,4-D | mg | | | |
| AGAR | g | | 8.0 | 6.4 |
| PHYTAGEL | g | | | |
| DICAMBA | g | | | |
| SILVER NITRATE | mg | | | 8.5 |
| AGRIBIO Carbenicillin | mg | | | |
| Timentin | mg | 150.0 | 150.0 | |
| Cefotaxime | mg | 100.0 | 100.0 | 25 |
| MYO-INOSITOL | g | 0.1 | 0.1 | |
| NICOTINIC ACID | mg | | | |
| PYRIDOXINE•HCL | mg | | | |
| VITAMIN ASSAY CASAMINO | g | | | |
| ACIDS | | | | |
| MES BUFFER | g | | | |
| ACETOSYRINGONE | uM | | | |
| ASCORBIC ACID 10 MG/ML | mg | | | |
| (7S) | | | | |
| MS VITAMIN STOCK SOL. | ml | 5.0 | 5.0 | |
| ZEATIN | mg | 0.5 | 0.5 | |
| CUPRIC SULFATE | mg | 1.3 | 1.3 | |
| IAA 0.5 MG/ML (28A) | ml | 2.0 | 2.0 | |
| ABA 0.1 mm | ml | 1.0 | 1.0 | |
| THIDIAZURON | mg | 0.1 | 0.1 | |
| AGRIBIO Carbenicillin | mg | | | |
| PPT(GLUFOSINATE-NH4) | mg | | | |
| BAP | mg | | | |
| YEAST EXTRACT (BD Difco) | g | | | |
| PEPTONE | g | | | |
| SODIUM CHLORIDE | g | | | |
| SPECTINOMYCIN | mg | | | |
| FERROUS SULFATE•7H20 | ml | | | |
| AB BUFFER 20X (12D) | ml | | | |
| AB SALTS 20X (12E) | ml | | | |
| Benomyl | mg | | | |
| pH | | | | |

TABLE 12

| | Units | | | | |
|---|---|---|---|---|---|
| | per | | | | |
| Medium Components | liter | 13266K | 272X | 272V | 13158 |
| MS BASAL SALT MIXTURE | g | 4.3 | 4.3 | 4.3 | 4.3 |
| N6 MACRONUTRIENTS 10X | ml | 60.0 | | | |
| POTASSIUM NITRATE | g | 1.7 | | | |
| B5H MINOR SALTS 1000X | ml | 0.6 | | | |
| NaFe EDTA FOR B5H 100X | ml | 6.0 | | | |
| ERIKSSON'S VITAMINS | ml | 0.4 | | | |
| 1000X | | | | | |
| S&H VITAMIN STOCK 100X | ml | 6.0 | | | |
| THIAMINE•HCL | mg | 0.5 | | | |
| L-PROLINE | g | 2.0 | | | |
| CASEIN HYDROLYSATE | g | 0.3 | | | |
| (ACID) | | | | | |
| SUCROSE | g | 20.0 | 40.0 | 40.0 | 40.0 |
| GLUCOSE | g | 0.6 | | | |
| MALTOSE | g | | | | |
| 2,4-D | mg | 1.6 | | | |
| AGAR | g | 6.0 | 6.0 | 6.0 | 6.0 |
| PHYTAGEL | g | | | | |
| DICAMBA | g | 1.2 | | | |
| SILVER NITRATE | mg | 1.7 | | | |
| AGRIBIO Carbenicillin | mg | 2.0 | | | |
| Timentin | mg | | | | |
| Cefotaxime | mg | 25 | | | |
| MYO-INOSITOL | g | | 0.1 | 0.1 | 0.1 |
| NICOTINIC ACID | mg | | | | |
| PYRIDOXINE•HCL | mg | | | | |
| VITAMIN ASSAY | g | | | | |
| CASAMINO ACIDS | | | | | |
| MES BUFFER | g | | | | |
| ACETOSYRINGONE | uM | | | | |
| ASCORBIC ACID 10 MG/ML | mg | | | | |
| (7S) | | | | | |
| MS VITAMIN STOCK SOL. | ml | | 5.0 | 5.0 | 5.0 |
| ZEATIN | mg | | | | |
| CUPRIC SULFATE | mg | | | | |
| IAA 0.5 MG/ML (28A) | ml | | | | |
| ABA 0.1 mm | ml | | | | |
| THIDIAZURON | mg | | | | |
| AGRIBIO Carbenicillin | mg | | | | |
| PPT(GLUFOSINATE-NH4) | mg | | | | |
| BAP | mg | | | | |
| YEAST EXTRACT (BD Difco) | g | | | | |
| PEPTONE | g | | | | |
| SODIUM CHLORIDE | g | | | | |
| SPECTINOMYCIN | mg | | | | |
| FERROUS SULFATE•7H20 | ml | | | | |
| AB BUFFER 20X (12D) | ml | | | | |
| AB SALTS 20X (12E) | ml | | | | |
| Benomyl | mg | | | | 100.0 |
| pH | | | 0.5 | 5.6 | |

TABLE 13

| | Units | | | | |
|---|---|---|---|---|---|
| | per | | | | |
| Medium Components | liter | 12R | 810K | 700J | 710N |
| 404 Modified MS Basal Salts | | | | | |
| MS BASAL SALT MIXTURE | g | | | | 4.3 |
| N6 BASAL SALTS | g | | | | |
| N6 MACRONUTRIENTS 10X | ml | | | | |
| POTASSIUM NITRATE | g | | | | |
| B5H MINOR SALTS 1000X | ml | | | | |
| NaFe EDTA FOR B5H 100X | ml | | | | |
| ERIKSSON'S VITAMINS 1000X | ml | | | | |
| S&H VITAMIN STOCK | g | | | | |
| THIAMINE•HCL | mg | | | | 1.0 |
| L-PROLINE | g | | | | 0.7 |
| CASEIN HYDROLYSATE | g | | | | |
| (ACID) | | | | | |
| SUCROSE | g | | | | |
| GLUCOSE | g | 5.0 | | | 10.0 |
| MALTOSE | g | | | 5.0 | 20.0 |
| 2,4-D | mg | | | | 2.0 |
| AGAR | g | 15.0 | | | 8.0 |
| BACTO-AGAR | g | | 15.0 | | |
| PHYTAGEL | g | | | | |
| DICAMBA | g | | | | |
| SILVER NITRATE | mg | | | | |
| AGRIBIO Carbenicillin | mg | | | | |
| Timentin | mg | | | | |
| Cefotaxime | mg | | | | |
| MYO-INOSITOL | g | | | | 0.1 |
| NICOTINIC ACID | mg | | | | 0.5 |
| PYRIDOXINE•HCL | mg | | | | 0.5 |
| VITAMIN ASSAY CASAMINO | g | | | | |
| ACIDS | | | | | |
| MES BUFFER | g | | | | 0.5 |
| ACETOSYRINGONE | uM | | | | 100.0 |
| ASCORBIC ACID 10 MG/ML | mg | | | | 10.0 |
| (7S) | | | | | |
| MS VITAMIN STOCK SOL. | ml | | | | |
| ZEATIN | mg | | | | |
| CUPRIC SULFATE | uM | | | | 100.0 |
| IAA 0.5 MG/ML (28A) | ml | | | | |
| ABA 0.1 mm | ml | | | | |
| 12N-a-NAA 1 MG/ML | mg | | | | |
| THIDIAZURON | mg | | | | |
| PPT(GLUFOSINATE-NH4) | mg | | | | |
| BAP | mg | | | | 1.0 |
| YEAST EXTRACT (BD Difco) | g | | 5.0 | | |
| PEPTONE | g | | 10.0 | | |
| SODIUM CHLORIDE | g | | 5.0 | | |
| SPECTINOMYCIN | mg | 50.0 | 50.0 | | |
| FERROUS SULFATE•7H20 | ml | 2.0 | | | |
| AB BUFFER 20X (12D) | ml | 50.0 | | | |
| AB SALTS 20X (12E) | ml | 50.0 | | | |
| THYMIDINE | mg | 50.0 | 50.0 | 50.0 | 50.0 |
| GENTAMYCIN | mg | 50.0 | 50.0 | | |
| Benomyl | mg | | | | |
| Magnesium Sulfate, Anhydrous | g | | | 1.204 | |
| 17F-MEROPENEM | mg | | | | |
| 7V-Vitamin E in EtOH 1 mg/mL | mg | | | | |
| 28E-IBA 1 MG/ML | mg | | | | |
| pH | | | 6.8 | | 5.8 |

TABLE 14

| | Units | | | | |
|---|---|---|---|---|---|
| | per | | | | |
| Medium Components | liter | 605B | 13329B | 404J | 90O |
| 404 Modified MS Basal Salts | | | | 4.96 | |
| MS BASAL SALT | g | 4.3 | 4.3 | | 2.165 |
| MIXTURE | | | | | |
| N6 BASAL SALTS | g | | | | |
| N6 MACRONUTRIENTS | ml | 60.0 | | | |
| 10X | | | | | |
| POTASSIUM NITRATE | g | 1.7 | | | |
| B5H MINOR SALTS 1000X | ml | 0.6 | | | |
| NaFe EDTA FOR B5H 100X | ml | 6.0 | | | |
| ERIKSSON'S VITAMINS | ml | 0.4 | | | |
| 1000X | | | | | |
| S&H VITAMIN STOCK | g | 0.6 | | | |
| THIAMINE•HCL | mg | 0.2 | | 0.1 | |
| L-PROLINE | g | 2.0 | 0.7 | | |
| CASEIN HYDROLYSATE | g | 0.3 | | | |
| (ACID) | | | | | |
| SUCROSE | g | 20.0 | 60.0 | 65.0 | 20 |
| GLUCOSE | g | 0.6 | | | |
| MALTOSE | g | | | | |
| 2,4-D | mg | 0.8 | | | |
| AGAR | g | 6.0 | 8.0 | 6.0 | 5 |
| BACTO-AGAR | g | | | | |
| PHYTAGEL | g | | | | |
| DICAMBA | g | 1.2 | | | |
| SILVER NITRATE | mg | 3.4 | | | |
| AGRIBIO Carbenicillin | mg | | | | |
| Timentin | mg | | | | |
| Cefotaxime | mg | | | | |
| MYO-INOSITOL | g | | 0.1 | 0.1 | |
| NICOTINIC ACID | mg | | | | |
| PYRIDOXINE•HCL | mg | | | | |
| VITAMIN ASSAY | g | | | | |
| CASAMINO ACIDS | | | | | |
| MES BUFFER | g | | | | |
| ACETOSYRINGONE | uM | | | | |
| ASCORBIC ACID | mg | | | | |
| 10 MG/ML (7S) | | | | | |
| MS VITAMIN STOCK SOL. | ml | | 5 | 5 | |
| ZEATIN | mg | | 0.5 | | |
| CUPRIC SULFATE | uM | | 4.0 | | |
| IAA 0.5 MG/ML (28A) | ml | | 1 | | |
| ABA 0.1 mm | ml | | | | |
| 12N-a-NAA 1 MG/ML | mg | | | 0.5 | |
| THIDIAZURON | mg | | | | |
| PPT(GLUFOSINATE-NH4) | mg | | | | |
| BAP | mg | | 1.0 | | |
| YEAST EXTRACT (BD | g | | | | |
| Difco) | | | | | |
| PEPTONE | g | | | | |
| SODIUM CHLORIDE | g | | | | |
| SPECTINOMYCIN | mg | | | | |
| FERROUS SULFATE•7H20 | ml | | | | |
| AB BUFFER 20X (12D) | ml | | | | |
| AB SALTS 20X (12E) | ml | | | | |
| THYMIDINE | mg | | | | |
| GENTAMYCIN | mg | | | | |
| Benomyl | mg | | | | 50 |
| Magnesium Sulfate, | g | | | | |
| Anhydrous | | | | | |
| 17F-MEROPENEM | mg | 10.0 | 10.0 | 10.0 | 10 |
| 7V-Vitamin E in EtOH 1 | mg | | | 1.0 | |
| mg/mL | | | | | |
| 28E-IBA 1 MG/ML | mg | | | 1.0 | |
| pH | | 5.8 | | 5.8 | |

### Example 3: Particle Bombardment

[0178] Standard protocols for particle bombardment (Finer and McMullen, 1991, In Vitro Cell Dev. Biol.—Plant 27:175-182) can be used with the methods of the disclosure.

### A. Particle-Mediated Delivery for Cas9-Mediated Donor Template Integration Via Homology-Dependent Repair (HDR)

[0179] Four plasmids were typically used for each particle bombardment; 1) the donor plasmid (50 ng/μl) containing the donor cassette flanked by homology-arms (genomic sequence) for CRISPR/Cas9-mediated homology-dependent SDN3, 2) a plasmid (50 ng/μl) containing the expression cassette UBI PRO::Cas9::pinII plus an expression cassette ZM-U6 PRO::gRNA::U6 TERM, 3) a plasmid (10 ng/μl) containing the expression cassette 3×ENH::UBI PRO::ODP2, and 4) a plasmid (5 ng/ul) containing the expression cassette NOS::WUS2::IN2 TERM. To attach the DNA to 0.6 μm gold particles, the four plasmids were mixed by adding 10 μl of each plasmid together in a low-binding microfuge tube (Sorenson Bioscience 39640T) for a total of 40 μl. To this suspension, 50 μl of 0.6 μm gold particles (30 μg/μl) and 1.0 μl of Transit 20/20 (Cat No MIR5404, Mirus Bio LLC) were added, and the suspension was placed on a rotary shaker for 10 minutes. The suspension was centrifuged at 10,000 RPM (˜9400×g) and the supernatant was discarded. The gold particles were re-suspended in 120 μl of 100% ethanol, briefly sonicated at low power and 10 μl was pipetted onto each carrier disc. The carrier discs were then air-dried to evaporate away all the remaining ethanol. Particle bombardment was performed using a PDF-1000/HE Particle Delivery Device, at 27 inches Hg using a 600 PSI rupture disc.

[0180] A transgenic Pioneer Stiff-Stalk inbred PHH5E was used in this experiment. Hemizygous seed was selected based on seed-specific expression of AM-CYAN1 and was surface sterilized using 80% ethanol for 3 minutes, followed by incubation in a solution of 50% bleach+0.1% Tween-20 while agitating with a stir-bar for 20 minutes. The sterile seed were then rinsed 3 times in sterile double-distilled water. Surface-sterilized seed were germinated on 13158F solid medium under (120 μE m−2 s−1) lights using an 18-hour photoperiod at 25° C.

[0181] Alternatively, chlorine gas or oxidizing agents can be used for seed sterilization. Chlorine gas can be generated using a variety of compounds (or agents), including bleaching powders, calcium hypochlorite, sodium hypochlorite, industrial bleach, household bleach, chlorine dioxide monochloramine, dichloramine, and trichloramine. Oxidizing agents that can be used in the method include but are not limited to, ozone, hydrogen peroxide, hypochlorous acid, hypobromous acid, chlorine dioxide, and ethylene dioxide.

[0182] After 14 days, the 3 cm segment directly above the seedling mesocotyl was excised (containing the leaf-whorl tissue directly above the apical meristem region of the stem). The 3 cm segment was bisected longitudinally using a scalpel. Then the outer layer of leaf tissue (coleoptile) was discarded. For the leaf segments/tissue derived from each seedling, the leaves were separated and laid flat within a 2 cm diameter in the middle of a culture plate containing one of the two following media; i) medium 13224 containing 12% sucrose for 3-4 hr before bombardment (10 plates, each containing segments/tissue from one of 10 seedlings and, ii) medium 13224C containing 12% sucrose+0.1 mg/l ethametsulfuron for 2-3 hours before bombardment (10 plates, each containing segments/tissue from one of 10 seedlings).

[0183] Preparation of DNA-functionalized gold particles was done as follows. Stock solutions of plasmids PHP71193 and PHP71788 (100 ng/ul) were diluted to 50 ng/ul with sterile water. Stock solutions of PHP21875 and PHP40828 (100 ng/ul) were diluted to 25 ng/ul with sterile water. Using sterile, low-binding Eppendorf tubes. Ten ul each of the diluted plasmids PHP71788 (50 ng/ul), PHP71193 (50 ng/ul), PHP21875 (25 ng/ul), and PHP40828 (25 ng/ul), were added to a sterile, low-binding Eppendorf tube (final ratio of plasmids was 50:50:25:25, respectively). This DNA mixture was then added to a sterile-low-binding Eppendorf tube containing 50 ul of 0.6 uM gold particles at a stock concentration of 10 mg/ml) and gently agitated to mix the DNA and gold in the suspension. One ul of Transit 20/20 was added and the tube again gently agitating. The tube was then placed on a 125 RPM rotator shaker for 10 minutes at room temperature. The tube was then centrifuged at 10,000 RPM in a microfuge. The supernatant was discarded and after adding 120 ul of 95% EtOH, the tube was sonicated briefly on a low setting to resuspend the particles and then 10 ul of the DNA/gold/EtOH suspension was pipetted onto the center of the carrier disc. The carrier discs were left exposed to the sterile air low in the laminar flow hood for approximately 10 minutes to evaporate the EtOH. The carrier discs with dried gold/DNA were then used for particle bombardment. For particle bombardment, a PDS-1000/He Particle Delivery System (Bio-rad, Hercules, CA, USA) was used, with 425 psi rupture disc, and the petri dish containing the target segments/tissue positioned two shelves below the carrier-holder, and a vacuum of approximately 27 mg Hg.

[0184] When expression of Wus2 and Odp2 was induced by addition of ethametsulfuron, somatic embryogenesis was stimulated in leaf segments/tissue. Using this inducible Wus2/Odp2 germplasm as the starting point for a new experiment, seedling-derived leaf segments/tissue was then used as the target explant for particle bombardment. As mentioned above, in one treatment the leaf segments/tissue was incubated on culture medium with 12% sucrose (to plasmolyze the leaf cells) prior to particle bombardment, and in the second treatment the leaf segments were exposed to culture medium with 12% sucrose plus 0.1 mg/l ethametsulfuron prior to particle delivery (providing an earlier exposure to the inductive treatment to begin stimulation of Wus2/Odp2 expression). To further enhance morphogenesis (beyond that provided by inducible expression), plasmids containing constitutive Wus2 and ODP2 expression cassettes were co-delivered with Cas9 and gRNA, as well as the template DNA (the genomic-sequence-flanked NPTII expression cassette). After DNA delivery, successful NPTII coding sequence integration via homology-dependent recombination (HDR) permitted regeneration of HDR events using both the inducing ligand (0.1 mg/l ethametsulfuron) and G418 for selection. Due to high levels of Wus2 and Bbm expression (inducible-expression from pre-integrated 60850-T-DNA plus constitutive provided by PHP21875 and PHP40828), selection using NPTII and G418 became less efficient, resulting in escape (wild type) plants being recovered. Thus, at lower levels of G418 selective agent (150 or 200 mg/l), when leaf segments/tissue from 9 seedlings was used as starting explants for each treatment, 46 and 34 TO plants containing the NPTII gene were recovered but none were observed to contain perfect HDR integrations. In contrast, when 9 seedlings were again used for particle delivery of the plasmids followed by increased selective pressure due to higher G418 (250 mg/l), selection became more stringent and three perfect HDR integration events were recovered from a total of 38 TO plants that were regenerated and analyzed.

[0185] Thus, using this combination of Wus2 and Odp2 expression cassettes to stimulate growth while also delivering the SDN3 donor DNA, the Cas9 expression cassette, and the guide-RNA expression cassette resulted in efficient homology-dependent targeted integration. Thus, three perfect HDR events were recovered from particle bombardment of leaf segments derived from only 34 starting seedlings.

[0186] In comparison, when wild-type maize Stiff-Stalk inbred PHH5G was transformed in a similar manner but without the use of Wus2 and Odp2, transgenic events were not recovered. Thus, particle delivery of the plasmids PHP71193 and PHP71788 into seedling-derived leaf segments/tissue (with no Wus2 or Odp2) does not result in transgenic or edited T0 plants.

### B. Site-Specific Integration

[0187] Pioneer inbred PH184C (disclosed in U.S. Pat. No. 8,445,763, incorporated herein by reference in its entirety) that contains in chromosome-1 a pre-integrated Site-Specific Integration (SSI) target site (Chrom-1 target site) composed of UBI PRO:FRT1:NPTII::PINII TERM+FRT87 is used. Prior to bombardment, 10-12 DAP (days after pollination) immature embryos are isolated from ears of Pioneer inbred PH184C and placed on 605J culture medium plus 16% sucrose for three hours to plasmolyze the scutellar cells. Alternatively, the first 2-3 cm of seedling-derived leaf-whorl tissue is bisected longitudinally and sliced into approximately 0.5-3.0 mm leaf segments, and these leaf segments are plasmolyzed on 605J medium plus 16% sucrose for three hours prior to particle bombardment.

[0188] Four plasmids are typically used for each particle bombardment:
[0189] 1) a donor plasmid (100 ng/μl) containing a FRT-flanked donor cassette for Recombinase-Mediated Cassette Exchange, for example a plasmid containing FRT1:PMI: PINII TERM::CZ19B1 TERM+UBI1ZM PRO::UBI1ZM 5 UTR::UBI1ZM INTRON1::DS-RED2::PINII TERM+FRT6 (PHP8418-0004);
[0190] 2) a plasmid (2.5 ng/μl) containing the expression cassette UBI1ZM PRO::UBI1ZM 5 UTR::UBI1ZM INTRON1::FLPm::PINII TERM (PHP5096);
[0191] 3) a plasmid (10 ng/μl) containing the expression cassette ZM-PLTP PRO::ZM-ODP2::OS-T28 TERM+FMV & PCSV ENHANCERS (PHP89030); and
[0192] 4) a plasmid (5 ng/ul) containing the expression cassette ZM-PLTP PRO::ZM-WUS2::IN2-1 TERM+PSW1+GZ-W64A TERM+FL2 TERM (PHP89179).

[0193] To attach the DNA to 0.6 μm gold particles, the four plasmids are mixed by adding 10 μl of each plasmid together in a low-binding microfuge tube (Sorenson Bioscience 39640T) for a total of 40 μl. To this suspension, 50 μl of 0.6 μm gold particles (30 μg/μl) and 1.0 μl of Transit 20/20 (Cat No MIR5404, Mirus Bio LLC) are added, and the suspension is placed on a rotary shaker for 10 minutes. The suspension is centrifuged at 10,000 RPM (˜9400×g) and the supernatant is discarded. The gold particles are re-suspended in 120 μl of 100% ethanol, briefly sonicated at low power and 10 μl is pipetted onto each carrier disc. The carrier discs are then air-dried to remove all remaining ethanol. Particle bombardment is performed using a Biolistics PDF-1000, at 28 inches of Mercury using a 200 PSI rupture disc. After particle bombardment, the immature embryos or leaf segments are selected on 605J medium modified to contain 12.5 g/l mannose and 5 g/l maltose and no sucrose. After 10-12 weeks on selection, plantlets are regenerated and analyzed using qPCR. It is expected that co-delivery of PLTP::ODP2 (PHP89030) and PLTP::WUS2 (PHP89179) along with the SSI components (Donor DNA (PHP8418-0004)+UBI::FLP (PHP5096)) will produce high frequencies of site-specific integration of the donor fragment into the Chrom-1 target site (i.e. at rates of 4-7% relative to the number of bombarded immature embryos).

### Example 4: Agrobacterium-Mediated Transformation of Corn

### A. Preparation of Agrobacterium Master Plate.

[0194] Agrobacterium tumefaciens harboring a binary donor vector was streaked out from a −80° C. frozen aliquot onto solid 12R medium and cultured at 28° C. in the dark for 2-3 days to make a master plate.

### B. Growing Agrobacterium on Solid Medium.

[0195] A single colony or multiple colonies of Agrobacterium were picked from the master plate and streaked onto a second plate containing 810K medium and incubated at 28° C. in the dark overnight.

[0196] Agrobacterium infection medium (700A; 5 ml) and 100 mM 3′-5′-Dimethoxy-4′-hydroxyacetophenone (acetosyringone; 5 μL) were added to a 14 mL conical tube in a hood. About 3 full loops of Agrobacterium from the second plate were suspended in the tube and the tube was then vortexed to make an even suspension. The suspension (1 ml) was transferred to a spectrophotometer tube and the optical density (550 nm) of the suspension was adjusted to a reading of about 0.35-1.0. The Agrobacterium concentration was approximately 0.5 to 2.0×10⁹ cfu/mL. The final Agrobacterium suspension was aliquoted into 2 mL microcentrifuge tubes, each containing about 1 mL of the suspension. The suspensions were then used as soon as possible.

### C. Growing Agrobacterium on Liquid Medium.

[0197] Alternatively, Agrobacterium can be prepared for transformation by growing in liquid medium. One day before infection, a 125 ml flask was prepared with 30 ml of 557A medium (10.5 g/l potassium phosphate dibasic, 4.5 g/l potassium phosphate monobasic anhydrous, 1 g/l ammonium sulfate, 0.5 g/l sodium citrate dehydrate, 10 g/l sucrose, 1 mM magnesium sulfate) and 30 μL spectinomycin (50 mg/mL) and 30 μL acetosyringone (20 mg/mL). A half loopful of Agrobacterium from a second plate was suspended into the flasks and placed on an orbital shaker set at 200 rpm and incubated at 28° C. overnight. The Agrobacterium culture was centrifuged at 5000 rpm for 10 min. The supernatant was removed and the Agrobacterium infection medium (700A) with acetosyringone solution was added. The bacteria were resuspended by vortex and the optical density (550 nm) of the Agrobacterium suspension was adjusted to a reading of about 0.35 to 2.0.

### D. Maize Transformation.

[0198] Maize seed was surface-sterilized for 15-20 min in 20% (v/v) bleach (5.25% sodium hypochlorite) plus 1 drop of Tween 20 followed by 3 washes in sterile water, germinated and allowed to grow into seedlings for approximately 14 days, and then prepared to produce leaf segments/fragments as described above. Leaf segments were placed in the Agrobacterium infection medium (700A) with 200 μM acetosyringone solution+0.02% Break-Thru® surfactant (Plant Health Technologies, P.O. Box 70013, Boise, ID 83707-0113). The Agrobacterium infection medium was drawn off and 1 ml of the Agrobacterium suspension was added to the leaf segments and was allowed to stand for 20 min. The suspension of Agrobacterium and leaf segments were poured through a sterile metal sieve and the liquid was discarded. The leaf segments collected on the metal sieve were transferred using a spatula onto a stack of 3 sterile Whatman #2 filter papers, used to wick off excess Agrobacterium-containing liquid, and then again a spatula was used to transfer the leaf segments onto a filter paper lying on co-cultivation medium. The plate was incubated in the dark at 21° C. for 1-3 days of co-cultivation.

[0199] The filter papers supporting the leaf segments were then transferred to resting medium (605T medium) without selection. Seven days later, the filter papers supporting the leaf segments were transferred to selection medium for three weeks. After selection, healthy growing somatic embryos were transferred using forceps onto maturation medium for two weeks in the dark, at which point the maturation plates were transferred in toto (still containing the maturing somatic embryos) into the light for an addition week. After one week in the light, regenerating plantlets were transferred to rooting medium. After rooting, plantlets were ready for transplanting to the greenhouse.

### Example 5: Transformation of Maize Leaf Segments

[0200] Constitutive expression of WUS2 and ODP2 after Agrobacterium-mediated transformation of maize leaf segments resulted in production of embryogenic callus and/or rapidly formed somatic embryos which regenerate into healthy, fertile TO plants.

[0201] The general protocol for Agrobacterium-mediated maize transformation described in Example 4 was used, with the modifications described below for using leaf segments/tissue as the target explant.

### A. In Vitro Seed Germination to Produce Seedling Target Segments/Tissue

[0202] Mature seeds were surface sterilized by immersion in a series of solutions under agitation using a magnetic stir bar; first in an 80% ethanol solution for 3 minutes, the ethanol solution was decanted and replaced with a 30% Clorox bleach solution containing 0.1% Tween-20 for 20 minutes, the Clorox bleach solution was decanted, and the mature seeds were rinsed (three 5-minute rinses) in autoclaved sterile water. The sterilized seeds were transferred onto solid 900 medium after the final sterile water rinse. In vitro germination and seedling growth were carried out at 26° C. with a 16 h light/8 h dark photoperiod. The first 2.5 to 3 cm of leaf whorl above the mesocotyl was removed from each 12-18 day-old seedling for further processing for transformation.

[0203] Alternatively, seeds may be sterilized by exposure to chlorine gas. Chlorine gas can be generated using a variety of compounds (or agents), including bleaching powders, calcium hypochlorite, sodium hypochlorite, industrial bleach, household bleach, chlorine dioxide monochloramine, dichloramine, and trichloramine. In addition, oxidizing agents can be used for seed sterilization. Oxidizing agents that can be used in the methods disclosed herein include but are not limited to, ozone, hydrogen peroxide, hypochlorous acid, hypobromous acid, chlorine dioxide, and ethylene dioxide.

### B. Agrobacterium Preparation

[0204] Agrobacterium tumefaciens strain LBA4404 TD THY− harboring helper plasmid PHP71539 (SEQ ID NO: 4) (pVIR9, see US20190078106A1, herein incorporated by reference in its entirety) and a binary donor vector, PHP96037, containing a WUS2/ODP2 T-DNA with a selectable marker (ZM-ALS (HRA)) and a screenable marker (ZS-GREEN1) or a binary donor control vector containing a selectable marker and/or a screenable marker T-DNA (lacking WUS2/ODP2) was streaked out from a −80° C. frozen aliquot onto solid 12V medium and cultured at 28° C. in the dark for 2 days to make a master plate. A working plate was prepared by streaking 4-5 colonies from the 12V-grown master plate across fresh 810K media, incubating overnight in the dark at 28° C. prior to using for Agrobacterium infection. Additional helper plasmids (PHP70298, RV005393, and RV007497 (containing vir genes from A. rhizogenes)) useful in the methods of the disclosure are listed in Table 2.

[0205] Agrobacterium infection medium (700J medium, 10 ml) with the addition of 20 μL of acetosyringone and 20 μL of a previously 10-fold-diluted surfactant (Break Thru S 233, Evonik Industries GmbH, Goldschmidtstraße 100, 45127 Essen, Germany) was added to a 50 mL conical tube in a hood. About 5 full loops of Agrobacterium were collected from the working plate, transferred to the infection medium in the 50 ml tube, and then vortexed until uniformly suspended. The suspension (1 ml) was transferred to a spectrophotometer tube and the optical density (550 nm) of the suspension was adjusted to a reading of 0.6. The final Agrobacterium suspension was aliquoted into Corning six-well plates containing 0.4 μm permeable culture inserts (Falcon, Part Numbers 353046 and 353090, respectively) with each well containing about 8 mL of the Agrobacterium suspension.

[0206] Seed of maize inbred PH85E were surface sterilized as previously described, and then germinated at 28° C. under low light on solid 90B medium (½ strength MS salts plus 20 g/l sucrose and 50 mg/l benomyl). The leaf base segment (an approximate 2.5-3.0 cm section above the mesocotyl) was removed from each 12-18 day-old in vitro-germinated seedling with sterilized scissors. These leaf segments were placed into a 150 mm×15 mm Petri dish. Forceps were used to hold each leaf whorl section at the upper green end and the section was bisected longitudinally into 2 lengthwise halves using a sterile #10 scalpel blade. The outer leaf was removed and the inner leaves of the whorl were then cross-cut (diced) into smaller sections (approximately 1 to 3 mm in size, preferably 2.5-3.0 mm in size). Small leaf sections were collected and directly transferred into the permeable culture inserts containing the Agrobacterium suspension and incubated at room temperature (25° C.) for a 15-minute infection period.

[0207] After infection, the culture insert containing the Agrobacterium-infected leaf segments was removed from the 8-well plate and placed on an autoclaved dry filter paper to wick up and remove any residual Agrobacterium solution. The infected leaf segments were then transferred onto a fresh filter paper (VWR 7.5 CM) resting on 710N solid co-cultivation medium. Forceps were used to evenly disperse the leaf segments on the 710N plates and to ensure they have enough room to grow. The infected leaf segments/tissue was incubated at 21° C. in the dark for 2-3 days.

[0208] After 2-3d co-cultivation, the paper supporting the leaf segments/tissue was removed from the 710N medium and transferred onto 605B medium for 4 week resting culture. Leaf segments/tissue was sub-cultured every 2 weeks. After the 4 weeks culture on resting medium (605B) the plates were placed into a controlled temperature/humidity incubator (45° C./70% RH) for a 2-hour heat treatment. The plates were removed from the incubator and kept at room temperature (25° C.) for 1-2 hours until the plates had cooled down. Depending on the maize inbred, a single two-hour heat treatment, or two 2-hour heat treatments on two consecutive days, were applied to stimulate the drought-inducible RAB17 promoter and induce CRE-mediated excision of WUS2, ODP2, and CRE recombinase.

[0209] After the heat treatment and temperature equilibration at room temperature, leaf segments with newly-developed somatic embryos were transferred onto 13329B maturation medium without filter papers, cultured in the dark at 28° C. for 2 weeks, and then moved into a 26° C. light room for an additional week. Leaf segments that now supported small shoots were transferred onto 404J rooting medium for an additional 2-3 weeks until well formed roots had developed, at which point the plantlets were ready for transfer to the greenhouse.

[0210] Transformation efficiency (transformation frequency) was calculated as the number of independent transgenic TO plants produced per number of starting seedlings used for leaf fragment/segment preparation on a percentage basis. For example, 50 seedlings were used and separated into 5 groups (for five different treatments in an experiment) of 10 seedlings/treatment (or experimental replicates as shown in Table 15). For each seedling within a group, a 3 cm cylinder of wrapped leaf tissue above the mesocotyl was excised and each cylinder was bisected longitudinally. These lengths of bisected leaf tissue were then manually sliced with a scalpel or placed into liquid within a food processor and pulsed, both methods produced leaf fragments/segments of between 0.5-3.0 mm in length on average. The number of final leaf segments (fragments) used for transformation per starting seedling could be variable depending on the size and breadth of the seedling leaves, the physical cutting process which varied slightly from batch to batch, etc. It should also be noted that based on this procedure the leaf segments/fragments from each cohort of 10 seedlings within each treatment (or replicate) were pooled for Agrobacterium-mediated transformation.

[0211] An independent transgenic TO event identified by positive PCR analysis was tabulated as a molecularly unique TO plant produced from a single leaf segment/fragment, which precluded counting clonal events (the same transgenic integration pattern for example) as separate events. Once the final number of molecularly characterized transgenic events for a given treatment had been determined, the final number of transgenic TO plants (independent events) were totaled and divided by the number of starting seedlings for that replicate (10 in this Example 5) and the product was multiplied by 100 to provide a percentage. Thus, for experimental replicate 5 in Table 15, 30 TO plants were produced from 10 starting seedlings, for a transformation frequency (TO % in Table 15) of (30/10)×100=300%.

[0212] Results from five experiments are shown in Table 15, in which 10 starting seedlings per experiment (50 total) were used to produce the starting leaf segments for Agrobacterium infection, the number of transgenic TO plants recovered ranged from 18 (Exp. 1) to 51 (Exp. 4), resulting in a mean transformation frequency of 360%+/−112 (Standard Deviation (SD)). This is in contrast to experiments in which only a selectable marker gene and/or a screenable marker gene (fluorescent protein gene) were contained in the T-DNA, in which no culture response was observed and no TO plants were produced.

[0213] In addition to a high transformation frequency, a high percentage of the recovered TO plants were single-copy (SC) for the T-DNA (containing the selectable marker and/or the screenable marker) with no contaminating sequences from Agrobacterium being detected. Such SC/No-Agro events (TO plants) ranged from 23% to 37% with a mean of 31.4% (+/−5.2% SD). By comparing the number of high-quality transgenic TO plants (SC for the T-DNA with no contaminating Agrobacterium backbone sequences) to the number of starting seedlings used in these experiments provided a clear measure of overall efficiency, with a mean frequency of 114% (+/−44% SD). This method using WUS2/ODP2 obviated the need for growing mature maize plants for 90-120 days in the greenhouse to produce immature embryo explants for transformation and provided transgenic events from leaf explants generated from germinated seed in the lab.

TABLE 15

| | | | | # of SC | SC | SC | |
|---|---|---|---|---|---|---|---|
| | | # of T0 | | No- | No- | No- | |
| | # of | plants | | Agro | Agro | Agro | Escape |
| Exp | Seedlings | (events) | T0 % | Seq | %* | %** | Freq. |
| 1 | 10 | 18 | 180% | 5 | 28% | 50% | 39% |
| 2 | 10 | 41 | 410% | 14 | 34% | 140% | 32% |
| 3 | 10 | 40 | 400% | 9 | 23% | 90% | 45% |
| 4 | 10 | 51 | 510% | 18 | 35% | 180% | 40% |
| 5 | 10 | 30 | 300% | 11 | 37% | 110% | 43% |
| | 50 | 180 | 360% | 57 | 29% | 114% | 39% |

*Frequency of T0 plants with single-copy T-DNA and no plasmid sequences, relative to the total number of T0 plants
**Frequency of T0 plants with single-copy T-DNA and no plasmid sequences, relative to the starting number of seedlings

### Example 6: Transformation of Sorghum Leaf Segments

[0214] Constitutive expression of WUS2 and ODP2 after Agrobacterium-mediated transformation of sorghum leaf segments results in production of embryogenic callus and/or rapidly formed somatic embryos which regenerate into healthy, fertile TO plants.

[0215] Agrobacterium strain, constructs, growth of seedlings, preparation of leaf material for transformation, Agrobacterium infection, co-culture, resting culture, maturation and rooting for sorghum were all the same as the methods developed for maize in Example 5. The purpose here was to determine how transferable the method was without any sorghum-specific optimization.

[0216] Results from four experiments using a WUS2/ODP2 T-DNA, along with one experiment in which the control T-DNA contained only a selectable marker and a fluorescent marker (HRA+ZS-GREEN) are shown in Table 16. Each experiment also contained a comparison between two resting media, 13266P (605B medium plus 50 mg/l meropenem) which contained no additional cupric sulfate or BAP and medium 13265L (13266P medium plus 100 uM cupric sulfate and 0.5 mg/l BAP).

[0217] As demonstrated for maize, sorghum treatments that contained WUS2 and ODP2 expression cassettes in the T-DNA (PHP96037) also resulted in high transformation frequencies, calculated based on the number of transgenic TO plants recovered per starting seedling, with a mean (+/−SD) for 13266P and 13265L of 36.5% (+/−4.1%) and 35.5% (+/−9.6%) respectively, with no significant difference between the two media compositions (p=0.05). In contrast, the control treatment containing the selectable marker and/or the screenable marker with no WUS2/ODP2 in the T-DNA produced no transgenic events. The mean frequency of obtaining high-quality T0 sorghum plants (single copy with no Agrobacterium backbone (SC/NA %)) when transformed with PHP96037 was between 36% to 38% for the two media.

[0218] As with maize, this method obviated the need for growing mature sorghum plants for 90-120 days in the greenhouse to produce immature embryos explants for transformation and provided transgenic events from leaf explants generated from germinated seed in the lab.

TABLE 16

| | | | | | # | | | |
|---|---|---|---|---|---|---|---|---|
| | | | | | SC/No | | | |
| | # | Treatment | # T0 | | Agro | SC/NA | SC | # |
| Expt. No. | Seedlings | (Medium) | Plants | T0 % | (NA) | % | % | Escapes |
| 1 | 15 | 13265L | 65 | 433% | 26 | 40% | 30% | 2 |
| | 13 | 13266P | 18 | 138% | 7 | 39% | 7% | 2 |
| 2 | 15 | 13265L | 56 | 373% | 18 | 32% | 28% | 2 |
| | 15 | 13266P | 46 | 307% | 19 | 41% | 28% | 5 |
| 3 | 15 | 13265L | 32 | 213% | 7 | 22% | 7% | 0 |
| | 15 | 13266P | 14 | 93% | 5 | 36% | 13% | 0 |
| 4 | 16 | 13265L | 27 | 169% | 13 | 48% | 13% | 9 |
| | 16 | 13266P | 20 | 125% | 6 | 30% | 6% | 3 |
| Total | 61 | 13265L | 180 | 295% | 64 | 36% | 78% | 13 |
| Total | 59 | 13266P | 97 | 164% | 37 | 38% | 54% | 10 |
| No | 15 | 13265L | 0 | 0% | 0 | 0% | 0% | 0 |
| WUS/ODP2 | 15 | 13266P | 0 | 0% | 0 | 0% | 0% | 0 |
| Control | | | | | | | | |

### Example 7: Promoter, Additional Helpers, Excision Components, and Selectable Marker Combinations

[0219] Using a variety of promoter, additional helpers, excision components, and selectable marker combinations for expression of WUS2 and ODP2 after Agrobacterium-mediated transformation of leaf segments results/resulted in production of embryogenic callus and/or rapidly formed somatic embryos which regenerate/regenerated into healthy, fertile TO plants.

### A. Constitutive Promoters Combinations

[0220] As shown below numerous combinations of promoters, additional helpers, excision components, and selectable markers resulted in successful accelerated leaf transformation in maize.

[0221] Maize seedling-derived leaf segments were transformed using Agrobacterium strain LBA4404 TD THY− as described in Example 5. T-DNA delivery was evaluated based on transient expression of UBI-ZS-GREEN, which was present in all of the T-DNA variations tested. Fourteen to twenty-one days after transformation, growth responses were evaluated based on both the rate of growth and the morphology of the segments/tissue (see Table 17 for rating scale). Leaf transformation assay scoring (Transformation (TXN) Response (Resp.) Assay Score or Assay Score), as shown in Table 17, is based on morphology (early somatic embryo formation versus production of embryogenic callus) and growth rate, with increasing numerical scores indicating more rapid growth, and a concomitant progression from entirely callus growth (i.e., a score of 1) to rapidly producing single functional somatic embryos with no callus (i.e., 4).

TABLE 17

| TXN | | | Percentage | |
|---|---|---|---|---|
| Resp. | Growth | | of Leaf | |
| Assay | at <21 | | Segments | |
| Score | days | Morphology | Responding | Description |
| 0 | Single | NA | 0% | Good DNA delivery and transient |
| | Cells | | | expression, but no growth |
| 1 | Slow | Callus | < 20% | Slow growing embryogenic callus |
| 2 | Moderate | Callus | 30-50% | Faster growth but still mixed |
| | | | | embryogenic callus |
| 3 | Fast | SE | 60-80% | Some Early Somatic Embryos |
| | | | | (ESE) with rapid growth |
| 4 | Most | SE | 60-80% | Highest density of rapidly growing |
| | Rapid | | | Early Somatic Embryos (ESE) |

Table 18 shows the growth response after Agrobacterium-mediated transformation of maize leaf segments with T-DNAs from plasmids containing different construct combinations of promoters, additional helpers, excision components, and selectable markers.

[0222] Of the various constructs tested, 29 constructs resulted in an Assay Score of “2”, while 23 constructs resulted in the rapid production of early somatic embryos within 14-21 days of starting the Agrobacterium infection (an Assay Score of either 3 or 4). These results demonstrated that various promoters, additional helpers, excision components, and selectable marker combinations for WUS2 and ODP2 used in leaf transformations produced a callus growth response and/or a rapid embryo response and resulted in an increased transformation efficiency (percentage of leaf segments responding). However, a subset of 23 plasmids resulted in rapid somatic embryo formation and substantially shortened the duration of the transformation process. This was manifested as a shortened time in culture. Constructs with an Assay Score of two (2) typically produced embryogenic callus that was ready for the maturation phase (where embryo regeneration of shoots begins) within about 6-8 weeks after Agrobacterium infection, while for Assay Scores of three (3) and four (4) this duration was further reduced to 5-7 and 4-6 weeks, respectively. This was compared to the published method of Lowe et al. (2016, Plant Cell 28:1998-2015) for leaf segment transformation where the duration of culture was between 10-12 weeks before somatic embryo maturation was started.

[0223] Compared to the Lowe et al. construct, PHIP35648, and other constructs tested herein that produced a slow growing callus response requiring 10-12 weeks before somatic embryo maturation, many other constructs tested herein resulted in a shorter time frame to reach the somatic embryo maturation stage (8 weeks or less). Constructs that resulted in a shorter time frame to reach the somatic embryo maturation stage (8 weeks or less) included combinations containing various promoters driving WUS and ODP2 and additional helpers, excision components, and selectable marker combinations as shown in Table 18.

TABLE 18

| | | | | CRE | | |
|---|---|---|---|---|---|---|
| | | | | Position | | TXN |
| | | | | (Up- or | | Resp. |
| | WUS | BBM | Additional | down- | Selectable | Assay |
| Plasmid | Promoter | Promoter | Helper | stream) | Marker | Score |
| PHP46332 | NOS | 35SENH- | | RAB17—up | moPAT | 1 |
| | | UBI | | | | |
| PHP83652 | AXIG1 | PLTP | | HSP17— | HRA | 0 |
| | | | | down | | |
| PHP83475 | PLTP | | | HSP17— | HRA | 0 |
| | | | | down | | |
| PHP83621 | PLTP | PLTP | | GLAB1— | HRA | 0 |
| | | | | down | | |
| PHP81855 | 8 × ENH | PLTP:1 × | | RAB17—up | NPTII | 1 |
| | 35S 2 × op | OP | | | | |
| PHP81856 | AXIG1 | PLTP | | RAB17— | NPTII | 0 |
| | | | | down | | |
| PHP81857 | NOS | PLTP | | RAB17— | NPTII | 2 |
| | | | | down | | |
| PHP81858 | NOS | UBI | | RAB17— | NPTII | 2 |
| | | | | down | | |
| PHP92365 | PLTP | | UBI:LEC1 | NO CRE | HRA | 0 |
| PHP92765 | PLTP | | PLTP2:PKL- | RAB17— | no | 0 |
| | | | A | down | | |
| PHP92928 | 35S- | | UBI:LEC1 | NO CRE | HRA | 0 |
| | ENH:PLTP | | | | | |
| PHP93271 | PLTP | | UBI:REPA | NO CRE | HRA | 0 |
| PHP93559 | NOS | UBI | | RAB17—up | PMI | 1 |
| PHP93613 | ACTIN | | UBI:LEC1 | RAB17—up | HRA | 0 |
| PHP93696 | CAB:2 × EME | | excision | HSP17—up | HRA | 0 |
| | | | activate | | | |
| | | | ubi:2 × | | | |
| | | | EME:LEC1 | | | |
| PHP93586 | PLTP:WUS- | | PLTP:T2A- | None | HRA | NT |
| | T2A | | REPA | | | |
| pHP93742 | CAB:WUS- | T2A- | CAB:amiPKL- | None | HRA | 0 |
| | T2A | BBM | A | | | |
| PHP93743 | SCBV | | UBI:REP-A | HSP17—up | HRA | 1 |
| PHP93738 | ACTIN | UBI | | HSP17—up | HRA | 2 |
| PHP95385 | ACTIN | UBI | | HSP17— | HRA | 3 |
| | | | | down | | |
| PHP93766 | NOS | | UBI:LEC1 | HSP17—up | HRA | 0 |
| PHP93925 | UBI | 3 × ENH- | | NO CRE | HRA | 4 |
| | | UBI | | | | |
| PHP93926 | NOS | UBI | | HSP17—up | HRA | 1 |
| PHP93932 | 3 × ENH-CAB | | CAB- | NO CRE | HRA | 2 |
| | | | L:amiPKL-A | | | |
| PHP93933 | NOS | 3 × ENH- | | NO CRE | HRA | 4 |
| | | UBI | | | | |
| PHP93937 | CAB | | CAB- | | HRA | NT |
| | | | L:amiPKL-A | | | |
| PHP93739 | NOS | UBI | | HSP17—up | HRA | 2 |
| PHP94684 | UBI | BI-DIR- | | HSP17—up | HRA | 1 |
| | | UBI | | | | |
| PHP94685 | 3 × ENH-UBI | BI-DIR- | | HSP17—up | HRA | 1 |
| | | UBI | | | | |
| PHP94638 | UBI | B-DIR- | UBI:amiPKL- | HSP17—up | NO | 0 |
| | | UBI | A | | | |
| PHP94636 | 8 × DR5-35S | PLTP:1 × | | RAB17— | NPTII | 1 |
| | | op | | down | | |
| PHP94715 | 8 × DR5-35S | UBI | | RAB17— | NPTII | 2 |
| | | | | down | | |
| PHP94682 | SCBV | | UBI:LEC1 | RAB17— | HRA | 0 |
| | | | | down | | |
| PHP95067 | NOS | | UBI:CUC1-2 | HSP17— | HRA | 0 |
| | | | | down | | |
| PHP95068 | NOS | | UBI:CUC2 | HSP17— | HRA | 0 |
| | | | | down | | |
| PHP95069 | NOS | | UBI:CUC3-2 | HSP17— | HRA | 0 |
| | | | | down | | |
| PHP95070 | NOS | | UBI:zm- | HSP17— | HRA | 0 |
| | | | GPCNAC-1 | down | | |
| PHP95071 | NOS | | UBI:RKD4 | HSP17— | HRA | 0 |
| | | | | down | | |
| PHP95072 | FT-MEM1- | UBI | | HSP17— | HRA | 3 |
| | NOS | | | down | | |
| PHP95073 | PEPC1 | UBI | | HSP17— | HRA | 1 |
| | | | | down | | |
| PHP95074 | DIURNAL12 | UBI | | HSP17— | HRA | 1 |
| | | | | down | | |
| PHP95075 | NOS | | 3 × ENH- | HSP17— | HRA | 0 |
| | | | UBI:LEC2 | down | | |
| PHP95205 | RUBISCOSSU | UBI | | HSP17— | HRA | 1 |
| | | | | down | | |
| PHP94331 | NOS | UBI | CAB:zm- | HSP17—up | HRA | 1 |
| | | | MPKL-A | | | |
| PHP94332 | NOS | UBI | UBI:zm- | HSP17—up | HRA | 1 |
| | | | MPKL-A | | | |
| PHP95393 | CSVMV | UBI | | HSP17— | HRA | 1 |
| | | | | down | | |
| PHP95394 | CAB | UBI | | HSP17— | HRA | 1 |
| | | | | down | | |
| PHP95502 | NOS | 3 × EME- | | ins-HSP17— | HRA | 2 |
| | | UBI | | up | | |
| PHP95503 | NOS | 3 ×EME- | | ins HSP17— | HRA | 3 |
| | | UBI | | -down | | |
| PHP95499 | ACTIN | 3 × EME- | | HSP17—up | HRA | 1 |
| | | UBI | | | | |
| PHP96664 | 3 × EME-NOS | UBI | | HSP17—up | HRA | NT |
| PHP96695 | NOS | 3 × EME- | | HSP17— | HRA | 4 |
| | | UBI | | down | | |
| PHP97453 | UBI | 3 × EME- | | HSP17— | HRA | 3 |
| | | UBI | | down | | |
| PHP95886 | NOS | UBI | UBI:RKD4 | HSP17— | HRA | 1 |
| | | | | down | | |
| PHP95892 | NOS | UBI | UBI:RAP2.6L | HSP17— | HRA | 2 |
| | | | | down | | |
| PHP95881 | NOS | UBI | UBI:LEC2 | HSP17— | HRA | 0 |
| | | | | down | | |
| PHP95882 | NOS | UBI | UBI: LEC1V1 | HSP17— | HRA | 1 |
| | | | | down | | |
| PHP95893 | NOS | UBI | UBI:MIR156B | HSP17— | HRA | 1 |
| | | | | down | | |
| PHP95990 | NOS | | UBIRAP2.6L | HSP17— | HRA | 1 |
| | | | | down | | |
| PHP95989 | FT-PPCA1- | UBI | | HSP17— | HRA | 1 |
| | NOS | | | down | | |
| PHP95987 | SCBV | UBI | | HSP17— | HRA | 1 |
| | | | | down | | |
| PHP96037 | NOS | 3 × ENH- | AT-5-IV-2 | ins HSP17— | HRA | 4 |
| | | UBI | (two) | down | | |
| PHP96277 | ACTIN | 3 × ENH- | AT-5-IV-2 | ins HSP17— | HRA | 4 |
| | | UBI | (two) | down | | |
| PHP95904 | NOS | UBI | UBI:RLD1 | HSP17—up | HRA | 1 |
| PHP96030 | NOS | | UBI:RLD1 | HSP17—up | HRA | 0 |
| PHP96036 | NOS | | KN1 | HSP17—up | HRA | 0 |
| PHP96716 | NOS | UBI | KN1 | HSP17—up | HRA | 1 |
| PHP96031 | GOS2 | UBI | | HSP17— | HRA | 3 |
| | | | | down | | |
| PHP96730 | SWEET11 | UBI | | HSP17— | HRA | 0 |
| | | | | down | | |
| PHP96731 | DIURNAL10 | UBI | | HSP17— | HRA | 0 |
| | | | | down | | |
| PHP96032 | DIURNAL11 | UBI | | HSP17— | HRA | 1 |
| | | | | down | | |
| PHP96425 | NOS | 3 × ENH- | AT-5-IV-7 | ins-HSP17— | HRA | 4 |
| | | UBI | 1×* | down | | |
| PHP96751 | NOS | 3 × ENH- | AT-5-IV-2 | ins-HSP17— | HRA | 4 |
| | | UBI | 1×* | down | | |
| PHP96919 | 3 × EME-NOS | 3 × EME- | | HSP17— | HRA | 3 |
| | | UBI | | down | | |
| PHP97417 | UBI | 3 × ENH- | | ins-HSP17— | HRA | 3 |
| | | UBI | | down | | |
| PHP97334 | NOS | 3 × ENH- | AT-5-IV-2 | ins-HSP17— | NPTII— | 4 |
| | | UBI | 2×** | down | down | |
| PHP97335 | NOS | 3 × ENH- | | ins-HSP17— | NPTII— | 2 |
| | | UBI | | down | up | |
| PHP97458 | FT-MEM1-nos | 3 × EME- | | HSP17— | HRA | 1 |
| | | UBI | | down | | |
| PHP97725 | NOS-WUS-ins | 3 × ENH- | | ins-HSP17— | HRA | 1 |
| | | UBI | | up | | |
| PHP97726 | NOS-WUS-ins | 3 × ENH- | | ins-HSP17— | HRA | 1 |
| | | UBI | | up | | |
| PHP97933 | NOS | 3 × ENH- | AT-5-IV-2 | ins-HSP17— | NPTII | 4 |
| | | UBI | 2×** | down | | |
| | | | CAS9 + | | | |
| | | | gRNA *** | | | |
| PHP98784 | NOS | 3 × ENH- | AT-5-IV-2 | ins-HSP17— | NPTII | 4 |
| | | UBI | 2×** | down | | |
| | | | CAS9 + | | | |
| | | | gRNA | | | |
| PHP98407 | | | UBI:ZM- | HSP17— | HRA | 0 |
| | | | GRF5 | down | | |
| PHP98310 | NOS | | UBI:ZM- | HSP17— | HRA | 0 |
| | | | GRF5 | down | | |
| PHP98248 | NOS | UBI | UBI:ZM- | HSP17— | HRA | 1 |
| | | | GRF5 | down | | |
| PHP98283 | NOS | 3 × ENH- | UBI:ZM- | HSP17— | HRA | 2 |
| | | UBI | GRF5 | down | | |
| PHP98393 | 3 × ENH-UBI | 3 × ENH- | Excision- | HSP17— | HRA | 1 |
| | T2A | UBI | activate | down | | |
| | | | GRF5 | | | |
| PHP98392 | NOS | 3 × ENH- | UBI:GRF5 | HSP17— | HRA | 2 |
| | | UBI | | down | | |
| PHP98567 | 3 × EME-UBI | 3 × EME- | | HSP17— | HRA | 2 |
| | | UBI | | down | | |
| PHP97452 | 3 × EME-UBI | UBI | | HSP17— | HRA | 1 |
| | | | | down | | |
| PHP97456 | 3 × EME-UBI | UBI adh | | HSP17— | HRA | 2 |
| | | | | down | | |
| PHP97977 | 3 × EME-UBI | UBI TR | | HSP17— | HRA | 1 |
| | | | | down | | |
| PHP97453 | UBI Adh | 3 × EME- | | HSP17— | HRA | 2 |
| | | UBI | | down | | |
| PHP97449 | UBI TR | 3 × EME- | | HSP17— | HRA | 2 |
| | | UBI | | down | | |
| PHP98680 | 3 × ENH-UBI | 3 × ENH- | Excision- | INS- | HRA | 2 |
| | T2A | UBI T2A | activated | HSP17— | | |
| | | | MIR156B | down | | |
| PHP98681 | UBI-NOS- | 3 × ENH- | Excision- | INS- | HRA | 2 |
| | WUS | UBI-BBM | activated | HSP17— | | |
| | | | MIR156B | down | | |
| PHP98328 | BDCAB2- | UBI | | HSP17— | HRA | 1 |
| | 2 × EME | | | down | | |
| PHP98329 | ZMGOS2- | UBI | | HSP17— | HRA | 1 |
| | 2 × EME | | | down | | |
| PHP98327 | BDCAB2- | 3 × ENH- | | HSP17— | HRA | 2 |
| | 2 × EME | UBI | | down | | |
| PHP98370 | ZMGOS2- | 3 × ENH- | | HSP17— | HRA | 2 |
| | 2 × EME | UBI | | down | | |
| PHP98564 | PLTP | UBI | | HSP17— | HRA | 2 |
| | | | | down | | |
| PHP98565 | PLTP | 3 × ENH- | | HSP17— | HRA | 2 |
| | | UBI | | down | | |
| PHP96037 | NOS | 3 × ENH- | | HSP17— | HRA | 3 |
| | | UBI | | down | | |
| PHP97447 | UBI | 3 × EME- | | HSP17— | HRA | 1 |
| | | UBI | | UP | | |
| PHP97881 | UBI | 3 × EME- | | HSP17— | HRA | 3 |
| | | UBI | | down | | |
| PHP97417 | UBI | 3 × ENH- | | HSP17— | HRA | 3 |
| | | UBI | | down | | |
| PHP96037 | NOS | 3 × ENH- | | HSP17— | HRA | 3 |
| | | UBI | | down | | |
| PHP81858 | NOS | UBI | | HSP17— | HRA | 2 |
| | | | | down | | |
| PHP99676 | NOS | GRP1 | | HSP17— | HRA | 0 |
| | | | | down | | |
| PHP99677 | NOS | RPL1 | | HSP17— | HRA | 1 |
| | | | | down | | |
| PHP99678 | NOS | DNAJ | | HSP17— | HRA | 0 |
| | | | | down | | |
| PHP99679 | NOS | SAMDC2 | | HSP17— | HRA | 0 |
| | | | | down | | |
| PHP99680 | NOS | PPISO | | HSP17— | HRA | 0 |
| | | | | down | | |
| PHP99569 | NOS | EF1A | | HSP17— | HRA | 0 |
| | | | | down | | |
| PHP96037 | NOS | 3 × ENH- | | HSP17— | HRA | 3 |
| | | UBI | | down | | |
| PHP100011 | NOS | 3 × ENH- | | HSP17— | HRA | 1 |
| | | RPL1 | | down | | |
| PHP100012 | NOS | 3 × ENH- | | HSP17— | HRA | 0 |
| | | DNAJ | | down | | |
| PHP100013 | NOS | 3 × ENH- | | HSP17— | HRA | 1 |
| | | SAMDC2 | | down | | |
| PHP100056 | NOS | 3 × ENH- | | HSP17— | HRA | 1 |
| | | ZMPPISO | | down | | |
| PHP100057 | NOS | 3 × ENH- | | HSP17— | HRA | 1 |
| | | ZMEF1A | | down | | |
| PHP100158 | NOS | 3 × ENH- | | HSP17— | HRA | 1 |
| | | GRP1 | | down | | |
| PHP98229 | NOS | 3 × ENH- | | HSP17— | HRA | 3 |
| | | UBI:BBM | | down | | |
| PHP100159 | NOS | 3 × ENH- | UBI:CYCD2 | HSP17— | HRA | 2 |
| | | UBI | | down | | |
| PHP100160 | NOS | 3 × ENH- | UBI:REPA | HSP17— | HRA | 2 |
| | | UBI | | down | | |
| PHP100229 | ATPSYN | 3 × ENH- | | HSP17— | HRA | 2 |
| | | UBI | | down | | |
| PHP99971 | EIF4A | 3 × ENH- | | HSP17— | HRA | 2 |
| | | UBI | | down | | |
| PHP99809 | PABP | 3 × ENH- | | HSP17— | HRA | 2 |
| | | UBI | | down | | |
| PHP99810 | VDACIA | 3 × ENH- | | HSP17— | HRA | 2 |
| | | UBI | | down | | |
| PHP99716 | LEA14 | 3 × ENH- | | HSP17— | HRA | 2 |
| | | UBI | | down | | |

*Single Cross-Talk Blocker sequence upstream (5′) of the HSP17 promoter
**Two Cross-Talk Blocker sequences, one upstream and one downstream flanking the HSP17::CRE expression cassette
*** CRE-mediated excision of Cas9 and gRNA

### B. Configurations of WUS/BBM Expression Cassettes

[0224] A comparison of the following is performed:

[0225] i) PHP35648: UBI::CYAN+RAB17::CRE+NOS::WUS2+UBI::ODP2

[0226] The Ubiquitin (UBI) promoter from maize is a strong constitutive promoter, while the nopaline synthase (NOS) promoter derived from Agrobacterium is a constitutive promoter which in maize drives expression at approximately a 20% level compared to UBI. However, strong expression cassettes upstream of NOS::WUS (such as UBI::CYAN and RAB17::CRE) have the potential to down-regulate WUS expression, compared to a T-DNA where the strong upstream expression cassettes have been removed.

[0227] Transformation of maize seedling-derived leaf segments with Agrobacterium strain LBA4404 TD THY− and a T-DNA-containing plasmid with UBI::CYAN+RAB17::CRE+NOS::WUS2+UBI::ODP2 (PHP35648) expressing WUS2 and ODP2 resulted in slow initiation and growth of callus, which became increasingly embryogenic over time. Using this construct, 10-12 weeks of callus growth was required before RAB17::CRE-mediated excision and subsequent somatic embryo maturation and TO plant regeneration (Assay Score=1) were achieved.

[0228] ii) PHP81858: NOS::WUS2+UBI::ODP2+RAB17::CRE

[0229] When maize seedling-derived leaf segments were transformed using Agrobacterium strain LBA4404 TD THY− and PHP81858, in which the upstream strong expression cassettes were not present, the combination of NOS::WUS2+UBI::ODP2 resulted in a moderate rate of embryogenic callus growth, with a higher percentage of leaf segments producing positive responses. Using this construct, 6-8 weeks of callus growth was required before RAB17::CRE-mediated excision and subsequent somatic embryo maturation and TO plant regeneration (Assay Score=2).

[0230] iii) PHP95385: ACTIN::WUS+UBI:ODP2+HSP::CRE

[0231] When maize seedling-derived leaf segments were transformed using Agrobacterium strain LBA4404 TD THY− and PHP95385 containing ACTIN PRO::WUS2+UBI PRO::ODP2+HSP17 PRO::CRE resulted in a moderate rate of embryogenic callus growth, with a higher percentage of leaf segments producing positive responses. Using this construct, 6-8 weeks of callus growth was required before CRE-mediated excision and subsequent somatic embryo maturation and TO plant regeneration (Assay Score=2).

[0232] iv) PHP81856: AXIG1::WUS2+PLTP::ODP2+RAB17::CRE

[0233] In contrast to constitutive promoters NOS and UBI, the maize AXIG1 promoter is induced by the presence of auxin in the medium and is generally about 20% as strong as the maize UBI promoter (in the presence of our standard concentrations of 2,4-D). The PLTP promoter appeared to be strong relative to UBI but expression of the PLTP promoter is not as constitutive as the UBI promoter. When PHP81856, AXIG1::WUS2+PLTP::ODP2, was used for Agrobacterium-mediated transformation, in immature embryos and in leaf segments similar levels of transient ZS-GREEN expression were observed indicating that T-DNA delivery occurred at an equivalent extent in both explants. However, the subsequent growth response from these two explants was different. In immature embryos, expression of AXIG1::WUS2+PLTP::ODP2 resulted in rapid somatic embryo formation. In contrast, when AXIG1::WUS2+PLTP::ODP2 was used in leaf segments, no growth of transgenic (green fluorescent) callus or somatic embryos occurred and no TO plants were recovered because expression of WUS2 and ODP2 did not continue for a long enough duration (Assay Score=0).

[0234] v) PHP96037: NOS::WUS2+3×ENH::UBI::ODP2

[0235] When maize seedling-derived leaf segments were transformed using Agrobacterium strain LBA4404 TD THY− and PHP96037, containing NOS::WUS2+3×ENH::UBI PRO::UBI::ODP2+HSP17 PRO::CRE, somatic embryos formed rapidly, emerging directly from the leaf segments with no intervening callus stage. Direct somatic embryo formation was observed between 10-14 days after Agrobacterium infection. Thus the strength and longer duration of WUS2 and ODP2 expression provided by PHP96037 was sufficient to stimulate rapid somatic embryo formation. Using this construct, only 4-6 weeks of callus growth was required before CRE-mediated excision and subsequent somatic embryo maturation and TO plant regeneration (Assay Score=4).

### C. Testing New Promoters Driving Expression Of WUS2 And/Or ODP2

[0236] The results from experiments such as those summarized in Table 18 clearly demonstrated that strong constitutive promoters such as the maize UBI1ZM PRO (or enhanced versions of UBI1ZM PRO) driving expression of ODP2 in conjunction with various additional helpers, excision components, and selectable markers effectively stimulated rapid somatic embryo formation and TO plant regeneration, while a range of constitutive promoters such as GOS2 or NOS (both around 15-20% as strong as UBI1ZM) up to the UBI PRO itself, and including the ACTIN PRO, the 8×DR5-35S PRO, and the FT-MEM1-NOS PRO when used for driving WUS2 expression in conjunction with various additional helpers, excision components, and selectable markers were effective to stimulate rapid somatic embryo formation and TO plant regeneration. New promoter candidates were identified to be used in conjunction with various additional helpers, excision components, and selectable markers, resulting in the lists shown in Tables 18 and 19.

[0237] To test these potential promoter candidates, T-DNAs with the following configurations are constructed:

[0238] Configuration 1) RB+PRO-1::WUS1+3×ENH::UBI1ZM::ODP2+UBI::ZS-GREEN+UBI::NPTII+LB;

[0239] Configuration 2) RB+NOS::WUS1+3×ENH::PRO-2::ODP2+UBI::ZS-GREEN+UBI::NPTII+LB; and

[0240] Configuration 3) RB+NOS::WUS1+PRO-2::ODP2+UBI::ZS-GREEN+UBI::NPTII+LB.

[0241] Based on the experimental observations herein, the promoters in Table 19 are expected to produce positive results (Assay Scores of “2-4”) when used in the “PRO-1” position in Configuration 1 above to drive expression of WUS2. Promoters indicated in Table 19 by a single asterisk are expected to produce rapid embryogenic growth (scores of 2-4) when substituted for PRO-2 in Configuration 2, and promoters indicated by a double asterisk are expected to produce rapid embryo formation in Configurations 2 or 3. Likewise, the six new promoters listed in Table 20 are expected to perform equal to or better than UBI1ZM when substituted in Configurations 2 and 3 (driving expression of ODP2).

TABLE 19

| SEQ ID NO: | Promoter Alias | Gene Description |
|---|---|---|
| 94 | ATPeF1D ** | ATP synthase, delta/epsilon chain |
| 95 | EIF4a ** | EIF4a translation initiation factor |
| 96 | RRM ** | RNA Recognition Motif gene |
| 97 | EF1A * | Translation elongation factor |
| | | EF1A/initiation |
| 98 | RPL10A * | Ribosomal protein L10A |
| 99 | AXP2 ** | Ascorbate peroxidase2 |
| 100 | VDAC1a ** | Voltage-dependent anion channel1a |
| 101 | EF1A-Tu * | Elongation factor Tu GTP binding |
| | | domain protein |
| 102 | LEA-14 ** | Late embryogenesis abundant protein, |
| | | LEA-14 |
| 103 | RP-S7 * | Ribosomal protein S7 |
| 104 | RP-L5 * | Ribosomal protein L5 |
| 105 | ENO2 * | Enolase2 |
| 106 | RP-L28 * | Ribosomal protein L28 |
| 107 | OS-ACTIN ** | Actin |
| 108 | ZM-UBI2 ** | Ubiquitin2 |
| 109 | UBI1ZM * | Ubiquitin1 |

* Promoters being tested for WUS (Configuration 1) and/or ODP2 (Configuration 2)
** Promoters being tested for ODP2 in Configurations 2 and 3 above.

TABLE 20

| SEQ ID NO: | Gene_Alias | Description |
|---|---|---|
| 109 | UBI1ZM | Polyubiquitin containing |
| | | 7 ubiquitin monomers |
| 110 | GRP1 | glycine-rich protein 1 |
| 111 | RP-L1 | Ribosomal protein L1, 3- |
| | | layer alpha/beta- |
| | | sandwich |
| 112 | DNAJ2 | chaperone DNA J2 |
| | | 5NOC3 |
| 113 | SAMDC2 | S-adenosyl methionine |
| | | decarboxylase2 |
| 114 | CPPIase | Cyclophilin type |
| | | peptidyl-prolyl cis-trans |
| | | isomerase |

### Example 8: Leaf Transformation in Species and Varieties Across the Poaceae

[0242] Seed from various species within the Poaceae were surface sterilized and germinated under sterile conditions. Using the protocol developed for maize, leaf tissue from the resulting various seedlings within the Poaceae were harvested and manually cut into 2-3 mm segments or were prepared in a food processor as described above. Agrobacterium strain LBA4404 TD THY− containing both PHP71539 (pVIR9) and a plasmid with a T-DNA having the components NOS::WUS2+3×ENH::UBI PRO::ODP2+UBI::ZS-GREEN+HRA was used for transformation. All steps in the protocol and all media formulations used for these experiments were as described for maize, and the plasmids used (PHP54733, PHP81858, PHP93739, and PHP96037; SEQ ID NO: 93, 8, 23, and 66, respectively) contained maize promoters and maize WUS2/ODP2 genes.

[0243] For all species tested, seedling-derived leaf segments, whether manually-prepared or blender-prepared, were successfully used to recover somatic embryos and regenerate TO plants that were confirmed to contain the respective T-DNA of the plasmid used for transformation. The species successfully transformed using this leaf transformation method are indicated in bold in Table 21 below, and include corn, sorghum, pearl millet, rice, switchgrass, barley, rye, wheat, and teff. These species span four sub-families within the Poaceae (Chloridoideae, Panicoideae, Oryzoideae, and Pooideae) These sub-families span almost the entire phylogenetic breadth of the grass family (Poaceae). These various cereal crops, some of which are generally regarded as being recalcitrant or difficult to transform using conventional methods, were readily transformed through leaf transformation In addition, this method also produced somatic embryos and regenerated TO plants in Zea mays ssp Mexicana and Zea mays ssp parviglumis, two varieties of teosinte that have historically been very difficult to transform. When leaf segments were subjected to Agrobacterium infection with PHP96037 and subcultured as described above as in previous Examples, multiple transgenic plants were produced for both Zea mays ssp Mexicana and Zea mays ssp parviglumis, with 47 and 8 (respectively) TO plants being confirmed to contain the T-DNA with the components RB+LOXP+NOS::WUS2+3×ENH::UBIODP2+INS+HSP PRO::CRE+INS+LOXP+ZS-GREEN+HRA+LB.

TABLE 21

| | | | Common |
|---|---|---|---|
| Family | Sub-Family | Species | Name |
| Poaceae | Chloridoideae | Eragrostis tef | teff |
| | Danthonioideae | | |
| | Micrairoideae | | |
| | Arundinoideae | | |
| | Panicoideae | Zea mays | corn |
| | | Sorghum bicolor | sorghum |
| | | | (milo) |
| | | Pennisitum glaucum | pearl millet |
| | | Panicum virgatum | switchgrass |
| | Aristidoideae | | |
| | Oryzoideae | Oryza sativa cv Kataake | rice |
| | | Oryza sativa cv indica | indica rice |
| | | IRV94 | |
| | Bambusoideae | | |
| | Pooideae | Hordeum vulgare | barley |
| | | Secale cereale | rye |
| | | Triticum aestivum | wheat |
| | Puelioideae | | |
| | Pharoideae | | |
| | Anomochlooideae | | |

[0244] Transformation of these ten species, which span four sub-families within the grass family and cover the breadth of phylogenetic diversity within the family, while using our unmodified maize protocol, was surprising and unexpected. Further, it is expected that i) screening members of other sub-families such as the bamboos (Bambusoideae) will meet with similar success, and ii) further optimization, for example using the cognate orthologs for promoters, WUS2 and ODP2 for a given species, and using species-optimized media formulations will provide further improvements in transformation efficiency and breadth of transformable species.

### Example 9: Transformation of Maize Leaf Segments with ZM-ODP2 HOMOLOGS

[0245] A plasmid containing the following T-DNA, RB+NOS::WUS1+3×ENH::UBI1ZM::“BBM”+UBI::ZS-GREEN+UBI::NPTII+LB, is constructed, where “BBM” represents homologs of Zm-ODP2 (maize BBM) to be tested.

[0246] When Agrobacterium strain LBA4404 TD THY− with PHP71539 (SEQ ID NO: 4) and a second plasmid containing the above T-DNA (RB+NOS::WUS1+3×ENH::UBI1ZM::“BBM”+UBI::ZS-GREEN+UBI::NPTII+LB) is used to transform maize inbred PH85E leaf segments, it is expected that when the “BBM” gene is one of the following: ZM-ODP2 (ALT1); ZM-BBM2; ZM-BBM2 (ALT1); SB-BBM; SB-BBM2; MS-BBM; MS-BBM1; OS-ODP2 (MOD2); OS-BBM2; BD-BBM; BD-BBM2; SI-BBM; SI-BBM2; SV-BBM; SV-BBM2; TA-BBM-6A; or MA-BBML rapid somatic embryo formation and TO plant generation will be stimulated. For the above gene designations, ZM=Zea mays, SB=Sorghum bicolor, MS=Miscanthus sinensis, OS=Oryza sativa, BD=Brachypodium distachyon, SI=Setaria italica, SV=Setaria viridis, TA+Triticum aestivum, and MA=Muca acuminata.

### Example 10: Transformation of Maize Leaf Segments with ZM-WUS2 Homologs

[0247] A plasmid containing the following T-DNA, RB+NOS::“WUS”+3×ENH::UBI1ZM::ODP2+UBI::ZS-GREEN+UBI::NPTII+LB, is constructed, where “WUS” represents homologs of Zm-WUS (maize WUS) to be tested.

[0248] When Agrobacterium strain LBA4404 TD THY− with PHP71539 (SEQ ID NO: 4) and a second plasmid containing the above T-DNA (RB+NOS::“WUS”+3×ENH::UBI1ZM::ODP2+UBI::ZS-GREEN+UBI::NPTII+LB) is used to transform maize inbred PH85E leaf segments, it is expected that when the “WUS” gene (WUS/WOX family member) is one of the following: ZM-WUS1; ZM-WUS2; ZM-WOX2A; ZM-WOX5A; ZM-WOX4; ZM-WOXB; ZM-WOX9; SB-WUS; OS-WUS; SI-WUS; SV-WUS; PV-WUS; PH-WUS; MS-WUS; BD-WUS; or TA-WUS rapid somatic embryo formation and TO plant generation will be stimulated. For the above gene designations, ZM=Zea mays, SB=Sorghum bicolor, MS=Micanthus sinensis, OS=Oryza sativa, BD=Brachypodium distachyon, SI=Setaria italica, SV=Setaria viridis, TA+Triticum aestivum, PV=Panicum viridis, PH=Panicum halii, and MA=Muca acuminata.

### Example 11: Combinations of Enhancers for Promoters Driving Either WUS2 or ODP2

[0249] A plasmid containing the following T-DNA, RB+NOS::WUS2+“ENH”::UBI1ZM::ODP2+UBI::ZS-GREEN+UBI::NPTII+LB, is constructed, where “ENH” represents 1×, 2× or 3× combinations of viral enhancers to be tested.

[0250] When Agrobacterium strain LBA4404 TD THY− with PHP71539 (SEQ ID NO: 4) and a second plasmid containing the above T-DNA (RB+NOS::WUS2+“ENH”::UBI1ZM::ODP2+UBI::ZS-GREEN+UBI::NPTII+LB) is used to transform maize inbred PH85E leaf segments, it is expected that rapid somatic embryo formation and TO plant generation will be stimulated, for plasmids where the “ENH” are combinations of 1×, 2× or 3× viral enhancers, where the viral enhancer elements that are combined are selected from the Mirabilis Mosaic Virus Enhancer (MMV ENH), the FMV enhancer element from the Figwort Mosaic Virus, the PCSV enhancer from the Peanut Chlorotic Streak Caulimovirus promoter, the BSV(AY) enhancer element from the Banana Streak Virus Acuminata Yunnan strain, the CYMV enhancer from the Citrus Yellow Mosaic Virus promoter, and the CaMV35S enhancer from the Cauliflower Mosaic Virus promoter. When these single enhancers, a dimeric, or trimeric enhancer composed of two or three (respectively) of the same enhancer, or double- or triple-combinations of different enhancers are positioned upstream of the promoter used for either WUS2 or ODP2, it is expected that the transformation frequency, rapid formation of somatic embryos, and general growth rate will be stimulated, with one, two or three consecutive enhancers providing increasingly greater enhancements.

### Example 12: Different Surfactants Used During Agrobacterium Infection

[0251] The addition of a dilute surfactant during Agrobacterium infection of leaf explants of maize inbred HC69 increased T-DNA delivery, transient expression of screenable markers such as fluorescent proteins, and the ultimate recovery of transgenic TO plants. In these experiments, different surfactants were compared: Silwet-L-77 (LEHLE Seed Company, Cat. No. VIS-01); Break Thru S233 (EVONIK Company, Product Code 99982498, Lot #H219624078); and Surface (Alligare, Opelika, AL).

[0252] Maize inbred HC69 was transformed using Agrobacterium strain LBA4404 TD THY− with PHP71539 (SEQ ID NO: 4) and either:
[0253] a) PH1P93933 containing RB+NOS PRO::WUS2+3×ENH::UBI1ZM PRO::ODP2+SB-UBI PRO::ZS-GREEN+HRA (see Table 22); or
[0254] b) PH1P96942 containing RB+NOS PRO::WUS2+3×ENH::UBI1ZM PRO::ODP2+HSP17.7 PRO::CRE+SB-UBI PRO::ZS-GREEN+LB (see Table 23).

TABLE 22

| | Concentration | No. | No. | Transformation |
|---|---|---|---|---|
| Surfactant | (%) | Seedlings | Events* | Frequency (%) |
| Silwet | 0.04 | 12 | 44 | 367 |
| Break- | 0.005 | 12 | 36 | 300 |
| Thru S 233 | 0.01 | 12 | 31 | 258 |
| | 0.02 | 12 | 136 | 1133 |
| | 0.04 | 12 | 68 | 567 |

*Counted as multicellular somatic embryos scored between 14-21 days after Agrobacterium-infection

TABLE 23

| | Concentration | No. | No. | Transformation |
|---|---|---|---|---|
| Surfactant | (%) | Seedlings | Events* | Frequency (%) |
| Break- | 0.02 | 18 | 16 | 89 |
| Thru S 233 | | | | |
| Surface | 0.01 | 22 | 11 | 50 |
| | 0.02 | 20 | 12 | 60 |

*Counted as regenerating T0 plantlets after CRE-mediated excision, maturation and rooting

[0255] While the magnitude of the numbers differs between the results shown in Tables 21 and 22, all surfactant treatments were very effective at the concentrations tested and produced many transgenic events.

### Example 13: Agrobacterium-Mediated Site-Specific Integration (SSI) In Seedling-Derived Leaf Segments/Tissue of Maize Inbred HC69

[0256] A pre-integrated target site (target locus) in the maize inbred HC69 genome was used for site-specific integration, as described in U.S. Pat. Nos. 6,187,994, 6,262,341, 6,330,545, 6,331,661, and 8,586,361, each of which is herein incorporated by reference in its entirety. In this Example 13, target site 45 located on chromosome 1 (with 5′ and 3′ flanking positions of U.S. patent Ser. Nos. 16,507,617 and 16,509,427 bp, respectively) within the HC69 inbred genome was used and is comprised of the integrated components loxP+UBI1ZM PRO::UBI1ZM 5′UTR::UBI1ZM INTRON1::FRT1::NPTII::PINII TERM+FRT6 which had been previously introduced via Cas9-mediated homologous recombination to create this SSI landing pad. Seed was surface sterilized, germinated on 90B medium, and leaf segments were prepared from 16 day-old seedlings. Two Agrobacterium strains contained the helper plasmid PHP71539 (SEQ ID NO: 4), the first strain also contained PHP90842 (T-DNA with RB+FLP+FRT1+PMI+WUS+ODP2+CRE+LOXP+DsRED2+FRT6+LB) and the second strain also contained PH1P93925 (T-DNA with RB+UBI::WUS+3×ENH::UBI::ODP2+SB-UBI::ZS-GREEN+HRA+LB) at a ratio of 8:2. OD of both constructs was 0.4. The surfactant Break-Thru S 233 was diluted by adding sterile ddH2O to a produce a stock 10% concentration, and then adding the 10% Break-Thru S 223 to the Agrobacterium suspension to give a final concentration 0.02% (v/v).

[0257] Leaf tissue was processed by first dissecting out the 3 cm of whorl tissue immediately above the mesocotyl and placing it in a food processor along with 100 ml of the mixed Agrobacterium suspension in 700J medium plus acetosyringone. Short 1-2 second pulses were administered until the leaf fragments/segments were approximately 2-3 mm in size, and then the mixture (leaf segments and Agrobacterium mix suspended in infection medium was allowed to sit for 15 minutes in the blender. After 15 minutes of infection, the leaf segments/tissue was separated from the liquid by pouring through a stainless-steel sieve, and then the leaf segments/tissue was transferred to glass filter paper supports resting within 60×25 mm plates. The leaf tissue/segments resting on the dry filer papers, were allowed to stand for few minutes and then the filter paper (supporting the leaf segments) was transferred onto co-cultivation medium. The tissue/segments were then spread evenly across the filter using a sterile inoculation loop. Co-cultivation on 710N medium was done at 21° C. in the dark for 2 days, at which point the leaf segments were transferred to resting medium 605B (using forceps to lift and transfer the entire filter) and incubated at 28° C. in the dark for 14 days. At the end of the resting period, the filters were moved onto selection medium (6050=605J medium with sucrose removed and 15 g/l mannose added) and incubated at 28° C. in the dark, with transfers to fresh 6050 medium every two weeks. After 6 weeks on selection, the plates with filters and leaf segments/tissue were transferred to a 45° C./70% RH incubator for 2 hours, allowing this heat shock treatment to activate the HSP17.7 PRO::CRE expression cassette. After 2 hours in the heat treatment, plates were transferred back into the hood and allowed to cool to room temperature. The segments/tissue was then picked off the filters using forceps and transferred to maturation medium (13329B) for 18 days at 28° C. in the dark, and the plates were then moved into a culture room set at 26° C. with dim light. Healthy shoots were then selected and transferred to 272M (272X with 10 mg/l meropenem) rooting medium for an additional 2-3 weeks at 26° C. with light, before being transferred to the greenhouse.

[0258] As shown in Table 24, using the above method resulted in successful Site-Specific Integration. Starting with 30 seedlings to prepare the target tissue for Agrobacterium-mediated transformation, 127 leaf segments responded by producing somatic embryos. From this initial growth response, 44 embryogenic calli continued to grow on G418 selection. From this number of calli, seven regenerated into TO plants, of which site-specific integration was confirmed in 4 plants by molecular analysis and one of these 4 events had perfectly recombined junctions at both ends of the double-recombination product. This event, labeled as RMCE in Table 24, also contained no T-DNA sequences including no indications of FLP, WUS2, ODP2 or Agrobacterium backbone.

TABLE 24

| | Number of: | | | | | |
|---|---|---|---|---|---|---|
| | Leaf | | | | | |
| | segments | Putative | Events | RMCE | SSI | |
| Seedlings | responded | events | regenerated | events | events | Escapes |
| 30 | 127 | 44 | 7 | 1 | 3 | 3 |

### Example 14: Agrobacterium-Mediated Leaf Transformation and CAS9-Mediated Drop-Outs

[0259] Two constructs were used to test the position of the LOXP sites for CRE-mediated excision and the timing of selection for both plasmids. The first design has the LOXP sites positioned so that WUS2, ODP2, CRE, and Cas9 are all excised by the recombinase, as in PHP97933 (RB+LOXP+NOS PRO::WUS2+3×ENH:UBI1ZM PRO::ODP2+INS+HSP 17.7 PRO::CRE+UBI1ZM PRO::Cas9+ZM-U6 PRO::gRNA+LOXP+UBI1ZM::NPTII+UBI:ZS-GREEN+LB). The second T-DNA was designed so that only WUS2, ODP2, and CRE are excised by the recombinase, as in PHP98784 (RB+LOXP+NOS PRO::WUS2+3×ENH:UBI1ZM PRO::ODP2+INS+HSP 17.7 PRO::CRE+INS+LOXP+UBI1ZM PRO::Cas9+ZM-U6 PRO::gRNA+UBI1ZM::NPTII+UBI:ZS-GREEN+LB).

[0260] Agrobacterium preparation, leaf transformation, resting, selection, maturation and rooting were done as described in previous Examples, with the following specifics; 60 seed of inbred PH85E were used for each treatment (4 treatments total), with 120 seedling-derived leaf segments being transformed with PHP97933 and 120 seedling-derived leaf segments being transformed with PHP98784. After Agrobacterium infection and co-cultivation, the leaf segments were moved onto resting medium 605B for 7 days, and then all treatments were moved onto selection medium 13266N (13266P plus 150 mg/l G418) for 3 weeks. Tissue/segments from all four treatments was then subjected to heat treatment (45° C. for 2 hours). After the heat treatment, all somatic embryos were moved through the maturation and rooting steps.

[0261] Transformation frequencies and WAXY drop-out (Cas9-mediated deletion) frequencies are summarized in Table 25. Transformation frequencies for PHP97933 were 25% when selection was curtailed prior to maturation and rooting, and 15% when selection was continued, and in these two treatments only one WAXY drop-out was observed. Molecular analysis confirmed that this event in which the endogenous WAXY gene had been deleted, had also undergone CRE-mediated excision to remove WUS2, ODP2, CRE, Cas9, and the gRNA expression cassette.

[0262] Transformation frequencies for PHP98784 were 140% when selection was curtailed prior to maturation and rooting, and 95% when selection was continued, and in these two treatments two and one WAXY drop-outs were recovered, respectively. All three drop-outs also contained an integrated T-DNA from PHP98784 from which CRE-mediated excision had removed only WUS2, ODP2, and CRE. It should be noted that the duration for the composite culture steps in this protocol were: Agrobacterium infection—30 minutes; co-cultivation—2 days; resting culture—one week; selection culture—3 weeks; maturation—2 weeks; and rooting—2-3 weeks. At this point TO plants were sent to the greenhouse. This timeframe from Agrobacterium infection until the maturation stage was only 4 weeks, 2 days. This demonstration of Agrobacterium-mediated delivery of Cas9 for targeted genome modification represents a substantially more rapid process than the random integration method reported in the literature by Lowe et al. (2016, Plant Cell 28:1998-2015).

TABLE 25

| | | | | | | # | | # |
|---|---|---|---|---|---|---|---|---|
| | # | | | # | | WAXY | Drop- | CRE- |
| | Starting | Maturation | Rooting | T0 | TXN | Drop- | out | Excised |
| Vector | Seedlings | Medium | Medium | events | % | outs | % | (%) |
| PHP97933 | 60 | 13329B | 404J | 16 | 25% | 0 | 0% | 8 |
| | | | | | | | | (50%) |
| PHP97933 | 60 | 13329Z- | 404P- | 9 | 15% | 1 | 11.1% | 3 |
| | | selection | selection | | | | | (33%) |
| PHP98784 | 60 | 13329B | 404J | 84 | 140% | 2 | 2.4% | 82 |
| | | | | | | | | (98%) |
| PHP98784 | 60 | 13329Z- | 404P- | 57 | 95% | 1 | 1.8% | 55 |
| | | selection | selection | | | | | (96%) |

### Example 15: CAS9/Crispr-Mediated Genomic Modifications

[0263] Recovered after Particle Gun Delivery into Leaf Segments

[0264] CAS9-mediated cutting of the maize genome is used to introduce single codon changes to the maize ALS2 gene. To generate ALS2 edited alleles, a 794 bp fragment of homology (the repair template) is cloned into a plasmid vector and two 127 nt single-stranded DNA oligos are tested as repair templates, containing several nucleotide changes in comparison to the native sequence. The 794 bp repair templates include a single nucleotide change which will direct editing of DNA sequences corresponding to the proline at amino acid position 165 changing to a serine (P165S), as well as three additional changes within the ALS-CR4 target site and PAM sequence. Modification of the PAM sequence within the repair template alters the methionine codon (AUG) to isoleucine (AUU), which naturally occurs in the ALS1 gene. Using the maize inbred HC69, leaf segments from 30 seedlings per treatment are bombarded with the two oligo or single plasmid repair templates, UBI PRO:UBI1ZM INTRON:CAS9::PINII, POLIII PRO::ALS˜CR4 gRNA, UBI PRO:UBI1ZM INTRON:NPTII˜ZS-GREEN::PINII TERM, 3×ENH:UBI1ZM PRO::ZM-ODP2::PINII TERM and ACTIN PRO::ZM-WUS2::PINII TERM. After particle bombardment, the leaf segments from 30 seedlings are placed on resting media. After a resting period of 7 days, the leaf segments resting on filter paper supports are transferred onto selection medium containing 150 mg/l G418 for 21 days to select for antibiotic-resistant somatic embryos, and then are moved onto maturation medium (with selective pressure) for 2-3 weeks, and then onto rooting medium for 14-17 days (until the roots were large enough for transplanting into soil). At this time, two hundred (per treatment) randomly selected independent young plantlets growing on selective media are transferred to fresh G418 media in sterile plastic containers that can accommodate plants up to 6″ in height. The remaining plantlets (approximately 800 per treatment) are transferred to the solid media within the containers containing 100 ppm of chlorosulfuron as direct selection for an edited ALS2 gene. Two weeks later, 100 of the randomly chosen plantlets, and 10 plantlets that survived chrlorsulfuron selection are sampled for analysis. Edited ALS2 alleles are detected in 12 plantlets: two derived from the randomly-selected plantlets growing on G418 and generated using the 794 bp repair DNA template, and the remaining 10 derived from chlorosulfuron resistant plantlets edited using the 127 nt single-stranded oligos. Analysis of the ALS1 gene reveals only wild-type sequence confirming high specificity of the ALS-CR4 gRNA.

[0265] All 12 plants containing edited ALS2 alleles are sent to the greenhouse and sampled for additional molecular analysis and progeny testing. DNA sequence analysis of ALS2 alleles confirms the presence of the P165S modification as well as the other nucleotide changes associated with the respective repair templates. T1 and T2 progeny of two TO plants are analyzed to evaluate the inheritance of the edited ALS2 alleles. Progeny plants derived from crosses using pollen from wild type HC69 plants are analyzed by sequencing and demonstrate sexual transmission of the edited alleles observed in the parent plant with expected 1:1 segregation ratio (57:56 and 47:49, respectively). To test whether the edited ALS sequence confers herbicide resistance, selected four-week old segregating T1 plants with edited and wild-type ALS2 alleles are sprayed with four different concentrations of chlorsulfuron (50, 100 (1×), 200, and 400 mg/liter). Three weeks after treatment, plants with an edited allele show normal phenotype, while plants with only wild-type alleles demonstrate strong signs of senescence. In addition, embryos isolated from seed derived from plants pollinated with wild-type HC69 pollen are germinated on media with 100 ppm of chlorsulfuron. Fourteen days after germination, plants with edited alleles show normal height and a well-developed root system, while plants with wild-type alleles are short and do not develop roots.

[0266] In the above experiment, if ODP2 and WUS2 expression cassettes (on two separate plasmids) are not included with the plasmids containing the repair templates, Cas9, ALS-CR4 gRNA, and MoPAT-DsRED, no events are recovered after particle bombardment of leaf segments from 30 seedlings and selection on bialaphos in the Pioneer inbred PHH5G. By comparison, when plasmids containing PLTP PRO::ODP2::PINII and AXIG1 PRO::WUS2::PINII TERM are added to the plasmid mixture for gold particle preparation and particle bombardment, events containing CAS/CRISPR-mediated gene edits to the ALS gene are readily recovered. After particle bombardment of leaf segments from 30 seedlings from the Pioneer inbred PHH5G, over 1000 bialaphos-resistant plantlets are recovered, and of these, greater than 15 are determined to contain edits to the genomic ALS2 gene conferring resistance to the herbicide chlorsulfuron.

### Example 16: Homology-Dependent Recombination (Hdr)

[0267] Agrobacterium strain LBA4404 THY− TN-harboring both PHP71539 (the super-virulence plasmid) and PHP99721 (the T-DNA plasmid) was used for leaf transformation. The T-DNA of PHP99721 (SEQ ID NO: 283) contained the components RB+LOXP+NOS::WUS2::IN2 TERM+3×ENH::UBI1ZM PRO::ODP2::OS-T28 TERM+HSP17.7 PRO::MO-CRE::PINII TERM+UBI1ZM PRO::CAS9::ZM-UBI TERM+ZM-U6 PRO::gRNA-CHR1-53.66+ZM-ALS PRO::HRA::SB-UBI TERM+CHR1-53.66 TARGET SITE+HOMOLOGY SEQ1+SI-UBI PRO::NPTII:SI-UBI TERM+HOMOLOGY SEQ2+CHR1-53.66 TARGET SITE+SB-UBI PRO::ZS-GREEN1::OS-UBI TERM+LB.

[0268] Seed of maize inbred PHH5E were surface sterilized and pressed lightly into solid germination medium (90AE=900 medium+2 mg/l ancymidol) with the embryo axis-side upward, with subsequent germination and seedling growth occurring under light (120 μE m−2 s−1) using an 18-hour photoperiod at 28° C. for 14 days. On the morning the seedlings were to be used for transformation, half the seedlings were allowed to remain at 28° C. (Control Treatment) while the remaining half of the seedlings were transferred into an incubator at 45° C., 70% RH for 3 hours (Heat Treatment). All the seedlings were then used to prepare leaf explants for transformation as described below.

[0269] First, the seedlings were cut above the mesocotyl (removing the aerial portions from the roots) and the first 3 cm of leaf whorl was harvested, discarding the remainder of the more mature leaf tissue. The 3-cm long leaf whorl was bisected longitudinally using a scalpel, and the halves were put into 100 ml of Agrobacterium suspension (OD=0.5-0.6 measured at 550 nm, with the bacterium suspended in medium 700J+200 mM AS+0.02% Break-Thru-233® surfactant) in a food processor. The leaf tissue was pulse-blended on low speed (10 pulses) until the average size of leaf segments/fragments were approximately 0.5-3 mm in length/depth. The suspended segments/tissue in the Agrobacterium suspension remained in the blender bowl for 20 minutes at room temperature with gentle swirling every 1-2 minutes, which constituted the “Agrobacterium Infection” step. After infection, the suspension was poured through a sterile stainless-steel screen, catching the leaf segment/fragments from the liquid that passed through for disposal. The leaf segments were then transferred from the screen onto three layers of dry Whatman's #2 filter papers which wicked away excess Agrobacterium suspension (but not being washed) so that a thin layer of bacterium remained on the surface of the leaf segments/pieces. The leaf segments/pieces were again transferred onto a single layer of Whatman's filter paper resting on solid co-cultivation medium (710N) and were then cultured in the dark at 21° C. for 24 hours. After co-cultivation, the filter papers with the supported leaf segments/pieces were transferred onto resting medium 605B and cultured in the dark at 28° C. for one week, at which point the filter papers were again transferred onto selection medium 13266N and cultured in the dark at 28° C. for 3 weeks. After selection, the selection plated (held in a translucent culture box, typically holding 12 plates in 6 stacks of 2 plates) was transferred into a 45° C., 70% relative humidity incubator for two hours, then removed and the box placed on a benchtop at 25° C. for 1.5 hours for the temperature to re-equilibrate to room temperature. After heat treatment (which activated HSP17.7 PRO::CRE expression for excision of WUS/BBM/CRE from the T-DNA) healthy somatic embryos were transferred from the subtending filter papers onto fresh maturation medium 13329B and cultured for 2 weeks at 28° C. in the dark, then the plates were transferred into the light (120 μE m−2 s−1, 18-hour photoperiod) at 25° C. for one additional week. Healthy mature somatic embryos that had begun producing shoots were then transferred onto rooting medium 404J for an additional 203 weeks of culture under lights. Plantlets were then transferred to soil in the greenhouse. When regenerated TO plants were large enough for sampling, leaf tissue was punched for qPCR analysis for T-DNA and Agrobacterium plasmid backbone sequences. PCR analysis for both HR junctions, and Long-PCR analysis that spanned from the flanking endogenous Chromosome 1 sequences across the entire sequence that had integrated via Homology-Dependent Repair (SDN3) were used to confirm targeted integration.

[0270] A total of 9 repeat experiments were carried out and for each transformation experiment, using 15-30 seedlings for either the control or the “heat-pre-treated seedling” treatments for each experiment. For gene editing designed specifically for gene insertion, the same construct PHP99721 was used.

[0271] The relative efficiency of T-DNA delivery was assessed by scoring transient expression of ZS-GREEN in leaf segments 3-4 days after Agrobacterium infection. Scores ranged from “0” in which no leaf segments/pieces within a given treatment expressed ZS-GREEN, with scores of 1, 2, 3, or 4, being used when approximately 25%, 50%, 75%, or 90-100% f the leaf segments/pieces within a treatment showed ZS-GREEN expression, respectively. Thus, we used transient expression of the visual marker as a relative indication of the efficiency of Agrobacterium T-DNA delivery. Using this scale, for all 9 experiments the T-DNA Delivery Score for the control treatments was consistently rated as “3” while for the Heat Treatment the score was consistently rated as “4”. Based on this observation, it was concluded that Heat Pretreatment of seedlings in an incubator at 45° C., 70% RH for 3 hours prior to leaf segmentation and Agrobacterium infection resulted in increased efficiency of T-DNA delivery.

[0272] The results summarized in Table 25 demonstrate that Agrobacterium-mediated transformation of maize seedlings using the combination of NOS::WUS+3×ENH:UBI::ODP2+UBI::CAS9 resulted in highly efficient HDR frequencies across the many replicates of this experiment. After TO plants were produced, leaf samples were collected for PCR analysis to identify gene insertion events with NPTII gene. From 204 seedlings used in 9 completed transformation experiments, a total of 1150 TO plants were produced, which gave an overall TO transformation frequency of 563% (based on number of seedlings used for transformation). From the 1150 TO plants, 32 gene insertion events were confirmed using PCR that spanned each ofthe two-integrationjunctions and a long-PCR reaction that spanned the entire integration locus (both confirming correct respective insertion sizes), which yielded a 2.800 gene insertion frequency. Highly efficient HIDR frequencies were observed for both the control and the “heat-pre-treated seedling” treatments. Heat shock treatment doubled the TO transformation frequency and the gene editing (gene insertion) frequency in the TO population, thus heat shock treatment increased the overall process efficiency of gene editing (see Table 25).

TABLE 25

| | Seedling | | No. | | | T0 | HDR % |
|---|---|---|---|---|---|---|---|
| Expt. | Pre- | No. | T0 | Txn | HDR | HDR | by |
| No. | Treat | Seedling | Plants | % | Confirm | % | seedling |
| 1 | Control | 25 | 61 | 244% | 2 | 7.7 | 8.0 |
| 1 | Heat | 25 | 138 | 552% | 2 | 3.4 | 8.0 |
| | Trt. | | | | | | |
| 2 | Control | 25 | 48 | 192% | 0 | 0.0 | 0.0 |
| 2 | Heat | 23 | 112 | 487% | 3 | 5.6 | 13.0 |
| | Trt. | | | | | | |
| 3 | Control | 25 | 111 | 444% | 4 | 7.4 | 16.0 |
| 3 | Heat | 22 | 159 | 723% | 6 | 7.8 | 27.3 |
| | Trt. | | | | | | |
| 4 | Control | 23 | 34 | 148% | 0 | 0.0 | 0.0 |
| 4 | Heat | 25 | 134 | 536% | 7 | 11.5 | 28.0 |
| | Trt. | | | | | | |
| 5 | Control | 25 | 68 | 272% | 3 | 12.5 | 12.0 |
| 5 | Heat | 18 | 90 | 500% | 0 | 0.0 | 0.0 |
| | Trt. | | | | | | |
| 6 | Control | 25 | 59 | 236% | 2 | 5.7 | 8.0 |
| 6 | Heat | 15 | 114 | 760% | 5 | 10.4 | 33.3 |
| | Trt. | | | | | | |
| 7 | Control | 25 | 57 | 228% | 0 | 0.0 | 0.0 |
| 7 | Heat | 22 | 134 | 609% | 4 | 6.6 | 18.2 |
| | Trt. | | | | | | |
| 8 | Control | 25 | 65 | 260% | 4 | 11.8 | 16.0 |
| 8 | Heat | 22 | 136 | 618% | 3 | 4.1 | 13.6 |
| | Trt. | | | | | | |
| 9 | Control | 25 | 54 | 216% | 3 | 9.4 | 12.0 |
| 9 | Heat | 32 | 133 | 415% | 2 | 3.5 | 6.3 |
| | Trt. | | | | | | |
| Sum | Control | 223 | 557 | 250% | 18 | 3.2 | 8.1 |
| Sum | Heat | 204 | 1150 | 564% | 32 | 2.8 | 15.7 |
| | Trt. | | | | | | |

### Example 17: Seedling Pre-Treatment with Ancymidol Improved Transformation

[0273] Methods for Agrobacterium-mediated transformation of maize leaf segments/tissue were followed as outlined in Examples 4 and 5. Specifically, seed of inbred PHH5E were surface sterilized and sown onto germination medium containing either no ancymidol (0 mg/l ancymidaol=control medium 900 medium), 2 mg/l ancymidol (70AE medium) or 4 mg/l ancymidol. The germination and growth period under 120 μmol m−2 s−1 light intensity using an 18-hour photoperiod at 28° C. was 14 days for seedlings used in all replicate experiments and treatments. Fourteen-day seedlings were dissected and processed in the blender with Agrobacterium strain LBA4404 THY− TN-harboring PHP71539 plus PHP97334 (SEQ ID NO: 4 and 77, respectively) to produce 0.5-3 mm leaf segments for transformation. Leaf segments/pieces were cultured through the stages of infection, resting, selection, embryo maturation and regeneration as described in Example 4.

[0274] For three replicates of this experiment performed using three separate plantings of seedlings on the three different media (summarized in Table 26), the control medium produced a mean transformation frequency of 103%, while seedlings grown on either 2 mg/l or 4 mg/l ancymidol resulted in subsequent transformation frequencies of 302% and 246%, respectively. All three treatments produced TO plants in which a similar proportion were single copy for the integrated T-DNA, ranging for the 0, 2, and 4 mg/l pre-treatments from 57%, to 52%, to 62%, respectively.

TABLE 26

| Exp. | Ancymidol | No. | T-DNA | No. T0 | Txn | # SC | SC |
|---|---|---|---|---|---|---|---|
| No. | Conc. | Seedlings | Delivery* | Plants | %** | T0s*** | % |
| 1 | 2 mg/l | 33 | 4 | 118 | 358% | 51 | 43% |
| | 4 mg/l | 33 | 4 | 83 | 252% | 45 | 54% |
| | 0 mg/l | 33 | 3 | 36 | 109% | 19 | 53% |
| 2 | 2 mg/l | 32 | 4 | 97 | 303% | 67 | 69% |
| | 4 mg/l | 32 | 4 | 81 | 253% | 51 | 63% |
| | 0 mg/l | 32 | 3 | 31 | 97% | 19 | 61% |
| 3 | 2 mg/l | 28 | 4 | 66 | 236% | 27 | 41% |
| | 4 mg/l | 32 | 4 | 75 | 234% | 51 | 68% |
| | 0 mg/l | 0 | n/a | n/a | n/a | n/a | n/a |
| Totals | 2 mg/l | 93 | 4 | 281 | 302% | 145 | 52% |
| | 4 mg/l | 97 | 4 | 239 | 246% | 147 | 62% |
| | 0 mg/l | 65 | 3 | 67 | 103% | 38 | 57% |

*Txn % = Transformation Frequency (%)
**Relative T-DNA delivery as assessed by transient ZS-GREEN expression (0 = None to 4 = almost all embryos expressing)
**SC = single copy of the integrated T-DNA

[0275] Both 2% and 1% ancymidol pretreatments during seed germination and seedling growth were tested (using medium 900 plus 1 mg/l or 2 mg/l ancymidol) on three cereals Japonica rice (Oryza sativa var Kitaake), teff (Eragrostis tef), and pearl millet (Pennisetum glaucum). For each of Japonica rice (Oryza sativa var Kitaake), teff (Eragrostis tef), and pearl millet (Pennisetum glaucum), seedling growth on 900 medium without additional ancymidol resulted in very thin elongated seedlings with little biomass due to the thin leaf-whorl region above the mesocotyl. When seed from all three species were germinated and grown on 900 medium plus 2 mg/l ancymodiol, the seedlings only grew to a height of 1-2 cm after 14 days and although the leaf-whorl region was thicker (due to wider leaves), processing these small seedlings to produce leaf segments followed by transformation was more difficult.

[0276] In contrast, for all three cereal crops, seed germination and seedling growth on 900 plus 1 mg/l ancymidol produced an intermediate growth rate, with thicker stems and wider leaves than the control (with no ancymidol). These whorl segments were readily processed in a food processor to produce appropriately sized leaf segments, showed good Agrobacterium-mediated T-DNA delivery (abundant transient ZS-GREEN expression), and produced the highest number of transgenic TO plantlets (compared to the other two treatments). Thus, compared to maize and sorghum in which 2 mg/l ancymidol pretreatment during seedling growth is optimal for leaf transformation, a lower concentration of 1 mg/l ancymidol produced optimal results in rice, tef, and pearl millet.

### Example 18: Exposure of Seedlings to High Temperature Prior to Agrobacterium Infection Improved Transformation

[0277] Methods for Agrobacterium-mediated transformation of maize leaf segments/tissue were followed as outlined in Examples 4 and 5. Specifically, seed of Pioneer inbred PHH5E was surface sterilized and sown on germination medium containing 2 mg/l ancymidol (medium 70AE) with a 14-day growth period under 120 μmol m−2 s−1 light intensity using an 18-hour photoperiod at 28° C. At this point, the seedlings were divided into two treatments; 1) either remaining at 28° C. for an additional 3 hours, or 2) incubated at 45° C. for 3 hours, at which time all seedlings were mechanically processed in the presence of Agrobacterium suspension to produce suspended leaf segments/pieces for transformation. Seedling leaf whorl tissue was isolated and mechanically processed to produce 0.5-3 mm leaf segments for transformation as described, using Agrobacterium strain LBA4404 THY− TN-harboring PHP71539 plus PHP97334 (SEQ ID NO: 4 and 77, respectively).

[0278] As shown in Table 27, the control treatment resulted in a mean (+/−standard deviation) transformation frequency of 260% (101%). In comparison, pretreating seedlings at 45° C. for 3 hours before processing the leaf tissue for transformation resulted in a transformation frequency of 559% (85%). Using a confidence interval of p=0.05, these results demonstrate that heat pre-treatment produced a significantly higher transformation frequency when compared to seedlings maintained at normal growth chamber temperature of 28° C., using a Paired Student's T-Test.

TABLE 27

| Expt. | Seedling | No. | T-DNA | No. T0 | |
|---|---|---|---|---|---|
| No. | Treatment | Seedling | Delivery | plants | Txn % |
| 1 | Control | 25 | 2 | 61 | 244% |
| | 45 C. 3 hr* | 25 | 3 | 138 | 552% |
| 2 | Control | 25 | 2 | 48 | 192% |
| | 45 C. 3 hr | 23 | 3 | 112 | 487% |
| 3 | Control | 25 | 2 | 111 | 444% |
| | 45 C. 3 hr | 22 | 3 | 159 | 723% |
| 4 | Control | 23 | 2 | 34 | 148% |
| | 45 C. 3 hr | 25 | 3 | 134 | 536% |
| 5 | Control | 25 | 2 | 68 | 272% |
| | 45 C. 3 hr | 18 | 3 | 90 | 500% |

[0279] In a separate set of four experiments, PHH5E seedlings were grown for two weeks at 28° C. and then moved into a 37° C. growth chamber overnight before processing leaf tissue for Agrobacterium transformation using PHP71539 plus PHP97334 (SEQ ID NO: 4 and 77, respectively). As shown in Table 28, these experiments produced a consistently high transformation frequency of 315% (82%), with a single copy frequency in regenerated TO plants of 54% (8%). These results demonstrate that a different high-temperature pretreatment regime also produced high transformation frequencies.

TABLE 28

| Expt. | No. | No. T0 | | No. SC | |
|---|---|---|---|---|---|
| No. | Seedling | plants | TXN % | T0s | SC % |
| 1 | 10 | 33 | 330% | 21 | 64% |
| 2 | 10 | 19 | 190% | 9 | 47% |
| 3 | 10 | 32 | 320% | 14 | 44% |
| 4 | 10 | 42 | 420% | 24 | 57% |
| Average | 40 | 126 | 315% | 68 | 54% |

### Example 19: Auxin Pre-Treatment Prior to Agrobacterium Infection Improved Transformation

[0280] Methods for Agrobacterium-mediated transformation of maize leaf segments/tissue were followed as outlined in Examples 4 and 5. Specifically, seed of Pioneer inbred PHH5E was surface sterilized and sown on germination medium containing no auxin for 14 days. At this point, the seedlings were divided into four treatments; 1) remaining on 90O medium (0 mg/l 2,4-D=control), 2) being transferred onto 900 medium plus 3 mg/l 2,4-D, 3) being transferred onto 90O medium plus 10 mg/l 2,4-D, or 4) being transferred onto 900 medium plus 30 mg/l 2,4-D mg/l. All seedlings remained on these media for 24 hours under 120 μmol m−2 s−1 light intensity using an 18-hour photoperiod at 28° C., at which time all seedlings were mechanically processed in the presence of Agrobacterium suspension to produce suspended leaf segments/pieces for transformation.

[0281] Seedling leaf whorl tissue was isolated and mechanically processed to produce 0.5-3 mm leaf segments for transformation as described, using Agrobacterium strain LBA4404 THY− TN-harboring PHP71539 plus PHP97334 (SEQ ID NO: 4 and 77, respectively).

[0282] Table 29 shows that growing seedlings on 10 mg/l 2,4-D resulted in improved leaf transformation, as demonstrated through both an increased transformation frequency (Txn %) and frequency of single-copy T-DNA integrations compared to the control treatment. P_{GP}-5₁,T₂

TABLE 29

| 2,4-D | No. | T-DNA | No. T0 | Txn | No. SC | SC |
|---|---|---|---|---|---|---|
| (mg/l) | Seedlings | Delivery | Plants | %* | Clean** | %*** |
| 0 | 60 | 3 | 55 | 92% | 27 | 45% |
| 3 | 60 | 3 | 45 | 75% | 18 | 30% |
| 10 | 60 | 4 | 72 | 120% | 40 | 67% |
| 30 | 60 | 4 | 28 | 47% | 19 | 32% |

*Transformation frequency = (No. T0 plants/No. Seedlings) × 100
**Single-copy T-DNA integration with no extraneous Agrobacterium sequences
***Single-copy Frequency = (No. Single-copy T0 plants/No. T0 plants) × 100

### Example 20: Germination and Growth of Seedlings Under Increased-Spectrum Light Prior to Agrobacterium Infection Improved Transformation

[0283] Methods for Agrobacterium-mediated transformation of maize leaf segments/tissue were followed as outlined in Examples 4 and 5. Specifically, seed of Pioneer inbred PHH5E was surface sterilized and sown on germination medium containing no auxin for 14 days, being grown under 120 μmol m−2 s−1 light intensity using an 18-hour photoperiod at 28° C. While light intensity remained consistent between treatments, the quality of the light was varied by growing seedlings under either fluorescent light (Phillips High-Performance Alto II, #F32T8/Plant), Valoya LED lights (Valoya NS12/C65 #LE17051487), or RAZR LED lights (Fluence Bioengineering, Inc. #4009716). The differences between these light sources were readily apparent when the output across the visible light spectrum was compared. The Phillips fluorescent lamp produced its broadest peak in the blue range (400-500 nm) with numerous sharp spikes and intervening gaps of weak illumination in the green, yellow, and red portions of the spectrum (500-700 nm). In comparison, the Razor LED array produced a sharp peak roughly in the middle of the blue (˜560-570 nm) with a broader peak extending across the green into the red (˜530-650 nm) portion of the spectrum, while the Valoya produced a sharp peak roughly in the middle of the blue (˜560-570 nm) with a broader peak across the green and yellow (˜530-630 nm) with a shoulder in the red (˜660-670 nm) portion of the spectrum.

[0284] Seedlings were transferred into an incubator at 37° C., 50% relative humidity for 24 hours being mechanically processed. Seedling leaf whorl tissue was isolated and mechanically processed to produce 0.5-3 mm leaf segments for transformation as described, using Agrobacterium strain LBA4404 THY− TN-harboring PHP71539 plus PHP97334 (SEQ ID NO: 4 and 77, respectively).

[0285] Table 30 shows that growing seedlings under different light spectra resulted in improved leaf transformation, as demonstrated through an increased transformation frequency (Txn %) under the RAZR LED lights, relative to those grown under either fluorescent or Valoya LED lighting.

TABLE 30

| | | | T-DNA | | |
|---|---|---|---|---|---|
| | Light | No. | delivery | No. T0 | |
| Expt No. | Source | Seedlings | score | Plants | Txn % |
| 1 | Fluorescent | 10 | 3 | 36 | 360% |
| | Valoya | 10 | 3 | 27 | 270% |
| | RAZR | 10 | 4 | 63 | 630% |
| 2 | Fluorescent | 10 | 3 | 35 | 350% |
| | Valoya | 10 | 3 | 29 | 290% |
| | RAZR | 10 | 4 | 52 | 520% |
| 3 | Fluorescent | 11 | 2 | 73 | 627% |
| | Valoya | 11 | 2 | 71 | 582% |
| | RAZR | 11 | 3 | 91 | 818% |
| Totals and | Fluorescent | 31 | 3 | 144 | x = 465% |
| mean % (x) | Valoya | 31 | 3 | 127 | x = 410% |
| | RAZR | 31 | 4 | 206 | x = 665% |

### Example 21: Soil-Sown Greenhouse-Grown Seedlings Under Full Sunlight Produce High Transformation Frequencies

[0286] Potted soil or other suitable matrix such as vermiculite is sterilized in pots and seed of inbred PHH5E are sown, germinated, and allowed to grow in pre-sterilized greenhouse. Seedlings are harvested after two weeks and transformed as described in Example 4. When compared to seedlings grown under growth room conditions at lower light levels (i.e. 80-120 uMol m−2 s−1), seedlings grown under full-strength sunlight (approx. 2400 uMol m−2 s−1) are expected to produce higher transformation frequencies.

[0287] Methods for Agrobacterium-mediated transformation of maize leaf segments/tissue are followed as outlined in Examples 4 and 5. Specifically, seed of Pioneer inbred PHH5E are surface sterilized and sown in soil and grown under greenhouse conditions for 21 days. Seedling leaf tissue is harvested by cutting at soil level, brought into a sterile hood, sprayed with 70% ethanol, and then the outer three successive leaves were pealed back and removed, spraying and wiping with a 70% ethanol-soaked paper towel in between peeling off each leaf. Once the outer leaves are removed, the remaining inner leaf whorl is prepared as normal. The bottom 3 cm of surface-sterilized whorl is removed, bisected and then mechanically processed in the presence of Agrobacterium suspension to produce suspended 0.5-3 mm leaf segments for transformation as described, using Agrobacterium strain LBA4404 THY− TN-harboring PHP71539 plus PHP97334 (SEQ ID NO: 4 and 77, respectively). When compared to seedlings grown under artificial lighting in growth chambers, it is expected that seedling health under full-spectrum sunlight in the greenhouse will be optimal. Further, it is expected that seedlings grown under full-spectrum light in the greenhouse will produce leaf segments that exhibit improved frequencies of T-DNA delivery, improved somatic embryo response (more rapid growth and higher numbers), and increased production of TO plants, and increased single-copy integration frequencies.

[0288] It is also expected that such additional treatments such as addition of ancymidol, 2,4-D, and either overnight or 3-hour heat treatment will have an additive effect, boosting transformation frequencies to even higher levels.

### Example 22: Corngrass1 Expression

[0289] Corngrass1 (Cg1) expression improves transformation frequency and promotes meristem formation and shoot formation and TO plant regeneration.

[0290] Agrobacterium strain LBA4404 TD THY− harboring a T-DNA with i) a ZM-MIR156B (Corngrass1) (SEQ ID NO: 123) expression cassette ii) a heat-inducible CRE cassette, iii) an HRA expression cassette, and iv) a ZS-GREEN expression cassette is used. The Agrobacterium strain is used to transform segments of leaf tissue cut from in vitro-grown, sterile, maize leaves. Agrobacterium methods, transformation, and media progression through co-cultivation, resting, and maturation are as previously described above. Bacterial culture is adjusted to OD550 of 0.6 for infection and 8 ml aliquoted into a screen-cup on a 6-well plate. Small leaf base sections are placed directly into the Agrobacterium suspension, infected for 15 minutes, and transferred to an autoclaved filter paper resting on top of 710N co-cultivation medium for 2-3 days at 21° C. in the dark. After co-cultivation the paper supporting the leaf segments/tissue is transferred to 605B medium for a 4-week resting period and sub-cultured every 2 weeks. Following the resting period, the plates are placed in an incubator set at 45° C. and 70% RH for 2 hours after which the leaf segments/tissue are transferred onto 13329B maturation medium and cultured in the dark at 28° C. for 2 weeks. The segments/tissue on maturation medium are then moved to a light room set at 26° C. for 1 week. Tissues/segments with small shoots are transferred onto 404J rooting medium for 2-3 weeks until well-formed roots are developed. It is expected that transformation with the T-DNA containing the Corngrass1 expression cassette results in increased transformation frequency and regenerates multiple green and healthy shoots. Agrobacterium infection of leaf segments/tissue with the Corngrass1 expression cassette is expected to produce healthy fertile plants in which the Corngrass1 expression cassette is excised.

### Example 23: Expression of Growth Regulation Factors and Fusions

[0291] Expression of the maize Growth Regulation Factor 5 (GRF5) gene, or the maize Growth Regulation Factor 4 (GRF4) gene, or the maize GRF-Interacting Factor 1 (ZM-GIF1) gene, or a fusion between the maize Growth Regulation Factor 4 (ZM-GRF4) gene and the maize GRF-Interacting Factor 1 (ZM-GIF1) gene (ZM-GRF4˜GIF1), or a fusion between the maize Growth Regulation Factor 5 (ZM-GRF5) gene and the maize GRF-Interacting Factor 1 (ZM-GIF1) gene (ZM-GRF5-GIF1) improves regeneration of transgenic shoots.

[0292] Agrobacterium strain LBA4404 TD THY− harboring a T-DNA with i) a maize Growth Regulation Factor 5 (ZM-GRF5) (SEQ ID NO:115) expression cassette, or a maize Growth Regulation Factor 4 (ZM-GRF4) (SEQ ID NO:117) expression cassette, or a maize GRF-Interacting Factor 1 (ZM-GIF1) (SEQ ID NO:119) expression cassette, or a fusion between maize Growth Regulation Factor 4 (ZM-GRF4) (SEQ ID NO:117) and maize GRF-Interacting Factor 1 (SEQ ID NO:119) (ZM-GRF4˜GIF1) (SEQ ID NO:121) expression cassette, or a fusion between maize Growth Regulation Factor 5 (ZM-GRF5) (SEQ ID NO:115) and maize GRF-Interacting Factor 1 (SEQ ID NO:119) (ZM-GRF5-GIF1) (SEQ ID NO:140) expression cassette, ii) a heat-inducible CRE cassette, iii) an HRA expression cassette, and iv) a ZS-GREEN expression cassette is used. The Agrobacterium strain is used to transform segments of tissue cut from in vitro-grown, sterile, maize leaves. Agrobacterium methods, transformation, and media progression through co-cultivation, resting, and maturation are as previously described above. Bacterial culture is adjusted to OD550 of 0.6 for infection and 8 ml aliquoted into a screen-cup on a 6-well plate. Small leaf base sections are placed directly into the Agrobacterium suspension, infected for 15 minutes, and transferred to an autoclaved filter paper resting on top of 710N co-cultivation medium for 2-3 days at 21° C. in the dark. After co-cultivation the paper supporting the leaf segments/tissue is transferred to 605B medium for a 4-week resting period and sub-cultured every 2 weeks. Following the resting period, the plates are placed in an incubator set at 45° C. and 70% RH for 2 hours after which the leaf segments/tissue are transferred onto 13329B maturation medium and cultured in the dark at 28° C. for 2 weeks. The segments/tissue on maturation medium are then moved to a light room set at 26° C. for 1 week. Segments/tissue with small shoots are transferred onto 404J rooting medium for 2-3 weeks until well-formed roots are developed. It is expected that transformation with the T-DNA containing the GRF5 expression cassette, or the GRF4 expression cassette, or the GIF1 expression cassette, or the GRF5˜GIF1 gene fusion expression cassette, or the GRF4˜GIF1 gene fusion expression cassette results in increased transformation frequency and regenerates multiple green and healthy shoots. Agrobacterium infection of leaf segments/tissue with the GRF5 expression cassette, or the GRF4 expression cassette, or the GIF1 expression cassette, or the GRF5˜GIF1 gene fusion expression cassette, or the GRF4˜GIF1 gene fusion expression cassette is expected to produce healthy fertile plants in which the GRF5 expression cassette, or the GRF4 expression cassette, or the GIF1 expression cassette, or the GRF5˜GIF1 gene fusion expression cassette, or the GRF4˜GIF1 gene fusion expression cassette is excised.

### Example 24: Stem Cell Inducing Factor 1 (Stemin1) Expression

[0293] Expression of the maize Stem Cell Inducing Factor 1 (STEMIN1) gene improves transformation frequency and promotes meristem formation and shoot formation.

[0294] Agrobacterium strain LBA4404 TD THY− harboring a T-DNA with i) a Stem Cell Inducing Factor 1 (ZM-STEMIN1) (SEQ ID NO: 124) expression cassette, ii) a heat-inducible CRE cassette, iii) an HRA expression cassette, and iv) a ZS-GREEN expression cassette is used. The Agrobacterium strain is used to transform segments of tissue cut from in vitro-grown, sterile, maize leaves. Agrobacterium methods, transformation, and media progression through co-cultivation, resting, and maturation are as previously described above. Bacterial culture is adjusted to OD550 of 0.6 for infection and 8 ml aliquoted into a screen-cup on a 6-well plate. Small leaf base sections are placed directly into the Agrobacterium suspension, infected for 15 minutes, and transferred to an autoclaved filter paper resting on top of 710N co-cultivation medium for 2-3 days at 21° C. in the dark. After co-cultivation the paper supporting the leaf segments/tissue is transferred to 605B medium for a 4-week resting period and sub-cultured every 2 weeks. Following the resting period, the plates are placed in an incubator set at 45° C. and 70% RH for 2 hours after which the leaf segments/tissue are transferred onto 13329B maturation medium and cultured in the dark at 28° C. for 2 weeks. The segments/tissue on maturation medium are then moved to a light room set at 26° C. for 1 week. Segments/tissue with small shoots are transferred onto 404J rooting medium for 2-3 weeks until well-formed roots are developed. It is expected that transformation with T-DNA containing the STEMIN1 expression cassette results in increased transformation frequency and regenerates multiple green and healthy shoots. Agrobacterium infection of leaf segments/tissue with the STEMIN1 expression cassette is expected to produce healthy fertile plants in which the STEMIN1 expression cassette is excised.

### Example 25: Expression of Maize Orthologs of Arabidopsis Revoluta (AT-REV)

[0295] Expression of maize orthologs of the Arabidopsis REVOLUTA (AT-REV) gene improves transformation frequency and promotes meristem formation and shoot formation.

[0296] Agrobacterium strain LBA4404 TD THY− harboring a T-DNA with i) a maize REVOLUTA (ZM-REV) (SEQ ID NO:125) expression cassette, ii) a heat-inducible CRE cassette, iii) an HRA expression cassette, and iv) a ZS-GREEN expression cassette is used. The Agrobacterium strain is used to transform segments of tissue cut from in vitro-grown, sterile, maize leaves. Agrobacterium methods, transformation, and media progression through co-cultivation, resting, and maturation are as previously described above. Bacterial culture is adjusted to OD550 of 0.6 for infection and 8 ml aliquoted into a screen-cup on a 6-well plate. Small leaf base sections are placed directly into the Agrobacterium suspension, infected for 15 minutes, and transferred to an autoclaved filter paper resting on top of 710N co-cultivation medium for 2-3 days at 21° C. in the dark. After co-cultivation the paper supporting the leaf segments/tissue is transferred to 605B medium for a 4-week resting period and sub-cultured every 2 weeks. Following the resting period, the plates are placed in an incubator set at 45° C. and 70% RH for 2 hours after which the leaf segments/tissue are transferred onto 13329B maturation medium and cultured in the dark at 28° C. for 2 weeks. The segments/tissue on maturation medium are then moved to a light room set at 26° C. for 1 week. Segments/tissue with small shoots are transferred onto 404J rooting medium for 2-3 weeks until well-formed roots are developed. It is expected that transformation with T-DNA containing the ZM-REV expression cassette results in increased transformation frequency and regenerates multiple green and healthy shoots. Agrobacterium infection of leaf segments/tissue with the ZM-REV expression cassette is expected to produce healthy fertile plants in which the ZM-REV expression cassette is excised.

### Example 26: Expression of Maize Orthologs of Arabidopsis Enhancer of Shoot Regeneration 1 (AT-ESR1)

[0297] Expression of maize orthologs of the Arabidopsis Enhancer Of Shoot Regeneration 1 (AT-ESR1) gene improves transformation frequency and promotes meristem formation and shoot formation.

[0298] Agrobacterium strain LBA4404 TD THY− harboring a T-DNA with i) a maize Enhancer of Shoot Regeneration 1 (ZM-ESR1) (SEQ ID NO:126) expression cassette, ii) a heat-inducible CRE cassette, iii) an HRA expression cassette, and iv) a ZS-GREEN expression cassette is used. The Agrobacterium strain is used to transform segments of tissue cut from in vitro-grown, sterile, maize leaves. Agrobacterium methods, transformation, and media progression through co-cultivation, resting, and maturation are as previously described above. Bacterial culture is adjusted to OD550 of 0.6 for infection and 8 ml aliquoted into a screen-cup on a 6-well plate. Small leaf base sections are placed directly into the Agrobacterium suspension, infected for 15 minutes, and transferred to an autoclaved filter paper resting on top of 710N co-cultivation medium for 2-3 days at 21° C. in the dark. After co-cultivation the paper supporting the leaf segments/tissue is transferred to 605B medium for a 4-week resting period and sub-cultured every 2 weeks. Following the resting period, the plates are placed in an incubator set at 45° C. and 70% RH for 2 hours after which the leaf segments/tissue are transferred onto 13329B maturation medium and cultured in the dark at 28° C. for 2 weeks. The segments/tissue on maturation medium are then moved to a light room set at 26° C. for 1 week. Segments/tissue with small shoots are transferred onto 404J rooting medium for 2-3 weeks until well-formed roots are developed. It is expected that transformation with T-DNA containing the ZM-ESR1 expression cassette results in increased transformation frequency and regenerates multiple green and healthy shoots. Agrobacterium infection of leaf segments/tissue with the ZM-ESR1 expression cassette is expected to produce healthy fertile plants in which the ZM-ESR1 expression cassette is excised.

### Example 27: Expression of Maize Orthologs of Arabidopsis Lateral Suppressor (AT-LAS)

[0299] Expression of maize orthologs of the Arabidopsis Lateral Suppressor (AT-LAS) gene improves transformation frequency and promotes meristem formation and shoot formation.

[0300] Agrobacterium strain LBA4404 TD THY− harboring a T-DNA with i) a maize Lateral Suppressor (ZM-LAS) (SEQ ID NO:127) expression cassette, ii) a heat-inducible CRE cassette, iii) an HRA expression cassette, and iv) a ZS-GREEN expression cassette is used. The Agrobacterium strain is used to transform segments of tissue cut from in vitro-grown, sterile, maize leaves. Agrobacterium methods, transformation, and media progression through co-cultivation, resting, and maturation are as previously described above. Bacterial culture is adjusted to OD550 of 0.6 for infection and 8 ml aliquoted into a screen-cup on a 6-well plate. Small leaf base sections are placed directly into the Agrobacterium suspension, infected for 15 minutes, and transferred to an autoclaved filter paper resting on top of 710N co-cultivation medium for 2-3 days at 21° C. in the dark. After co-cultivation the paper supporting the leaf segments/tissue is transferred to 605B medium for a 4-week period resting and sub-cultured every 2 weeks. Following the resting period, the plates are placed in an incubator set at 45° C. and 70% RH for 2 hours after which the leaf segments/tissue are transferred onto 13329B maturation medium and cultured in the dark at 28° C. for 2 weeks. The segments/tissue on maturation medium are then moved to a light room set at 26° C. for 1 week. Segments/tissue with small shoots are transferred onto 404J rooting medium for 2-3 weeks until well-formed roots are developed. It is expected that transformation with T-DNA containing the ZM-LAS expression cassette results in increased transformation frequency and regenerates multiple green and healthy shoots. Agrobacterium infection of leaf segments/tissue with the ZM-LAS expression cassette is expected to produce healthy fertile plants in which the ZM-LAS expression cassette is excised.

### Example 28: Expression of Maize Orthologs of Arabidopsis Cup-Shaped Cotyledon (AT-CUC)

[0301] Expression of maize orthologs of the Arabidopsis Cup-Shaped Cotyledon (AT-CUC) genes improves transformation frequency and promotes meristem formation and shoot formation.

[0302] Agrobacterium strain LBA4404 TD THY− harboring a T-DNA with i) a maize Cup-Shaped Cotyledon 3 (ZM-CUC3) (SEQ ID NO:128) expression cassette, or a maize Cup-Shaped Cotyledon1 (ZM-CUC1) (SEQ ID: 135) expression cassette, or a maize Cup-Shaped Cotyledon2 (ZM-CUC2) (SEQ ID: 142) expression cassette, ii) a heat-inducible CRE cassette, iii) an HRA expression cassette, and iv) a ZS-GREEN expression cassette is used. The Agrobacterium strain is used to transform segments of tissue cut from in vitro-grown, sterile, maize leaves. Agrobacterium methods, transformation, and media progression through co-cultivation, resting, and maturation are as previously described above. Bacterial culture is adjusted to OD550 of 0.6 for infection and 8 ml aliquoted into a screen-cup on a 6-well plate. Small leaf base sections are placed directly into the Agrobacterium suspension, infected for 15 minutes, and transferred to an autoclaved filter paper resting on top of 710N co-cultivation medium for 2-3 days at 21° C. in the dark. After co-cultivation the paper supporting the leaf segments/tissue is transferred to 605B medium for a 4-week resting period and sub-cultured every 2 weeks. Following the resting period, the plates are placed in an incubator set at 45° C. and 70% RH for 2 hours after which the leaf segments/tissue are transferred onto 13329B maturation medium and cultured in the dark at 28° C. for 2 weeks. The segments/tissue on maturation medium are then moved to a light room set at 26° C. for 1 week. Segments/tissue with small shoots are transferred onto 404J rooting medium for 2-3 weeks until well-formed roots are developed. It is expected that transformation with T-DNA containing the ZM-CUC3 expression cassette, or the ZM-CUC1 expression cassette, or the ZM-CUC2 expression cassette results in increased transformation frequency and regenerates multiple green and healthy shoots. Agrobacterium infection of leaf segments/tissue with the ZM-CUC3 expression cassette, or the ZM-CUC1 expression cassette, or the ZM-CUC2 expression cassette is expected to produce healthy fertile plants in which the ZM-CUC3 expression cassette, or the ZM-CUC1 expression cassette, or the ZM-CUC2 expression cassette is excised.

### Example 29: Downregulation of Maize Orthologs of Arabidopsis Supershoot 1 (AT-SPS1)

[0303] Downregulation of maize orthologs of the Arabidopsis Supershoot 1 (AT-SPS1) gene improves transformation frequency and promotes meristem formation and shoot formation.

[0304] Agrobacterium strain LBA4404 TD THY− harboring a T-DNA with i) a microRNA (ZM-MIR-SPS1) (SEQ ID NO:132) expression cassette targeting the transcript of the Maize Supershoot 1 gene (ZM-SPS1) (SEQ ID NO:129), ii) a heat-inducible CRE cassette, iii) an HRA expression cassette, and iv) a ZS-GREEN expression cassette is used. The Agrobacterium strain is used to transform segments of tissue cut from in vitro-grown, sterile, maize leaves. Agrobacterium methods, transformation, and media progression through co-cultivation, resting, and maturation are as previously described above. Bacterial culture is adjusted to OD550 of 0.6 for infection and 8 ml aliquoted into a screen-cup on a 6-well plate. Small leaf base sections are placed directly into the Agrobacterium suspension, infected for 15 minutes, and transferred to an autoclaved filter paper resting on top of 710N co-cultivation medium for 2-3 days at 21° C. in the dark. After co-cultivation the paper supporting the leaf segments/tissue is transferred to 605B medium for a 4-week resting period and sub-cultured every 2 weeks. Following the resting period, the plates are placed in an incubator set at 45° C. and 70% RH for 2 hours after which the leaf segments/tissue are transferred onto 13329B maturation medium and cultured in the dark at 28° C. for 2 weeks. The segments/tissue on maturation medium are then moved to a light room set at 26° C. for 1 week. Segments/tissue with small shoots are transferred onto 404J rooting medium for 2-3 weeks until well-formed roots are developed. It is expected that transformation with T-DNA containing the ZM-MIR-SPS1 expression cassette results in increased transformation frequency and regenerates multiple green and healthy shoots. Agrobacterium infection of leaf segments/tissue with the ZM-MIR-SPS1 expression cassette is expected to produce healthy fertile plants in which the ZM-MIR-SPS1 expression cassette is excised.

### Example 30: Downregulation of Maize Orthologs of Arabidopsis More Axillary Growth1 (AT-MAX1)

[0305] Downregulation of maize orthologs of the Arabidopsis More Axillary Growth1 (AT-MAX1) gene improves transformation frequency and promotes meristem formation and shoot formation.

[0306] Agrobacterium strain LBA4404 TD THY− harboring a T-DNA with i) a microRNA (ZM-MIR-MAX1) (SEQ ID NO:133) expression cassette targeting the transcript of the maize More Axillary Growth1 gene (ZMMAX1) (SEQ ID NO:130), ii) a heat-inducible CRE cassette, iii) an HRA expression cassette, and iv) a ZS-GREEN expression cassette is used. The Agrobacterium strain is used to transform segments of tissue cut from in vitro-grown, sterile, maize leaves. Agrobacterium methods, transformation, and media progression through co-cultivation, resting, and maturation are as previously described above. Bacterial culture is adjusted to OD550 of 0.6 for infection and 8 ml aliquoted into a screen-cup on a 6-well plate. Small leaf base sections are placed directly into the Agrobacterium suspension, infected for 15 minutes, and transferred to an autoclaved filter paper resting on top of 710N co-cultivation medium for 2-3 days at 21° C. in the dark. After co-cultivation the paper supporting the leaf segments/tissue is transferred to 605B medium for a 4-week resting period and sub-cultured every 2 weeks. Following the resting period, the plates are placed in an incubator set at 45° C. and 70% RH for 2 hours after which the leaf segments/tissue are transferred onto 13329B maturation medium and cultured in the dark at 28° C. for 2 weeks. The segments/tissue on maturation medium are then moved to a light room set at 26° C. for 1 week. Segments/tissue with small shoots are transferred onto 404J rooting medium for 2-3 weeks until well-formed roots are developed. It is expected that transformation with T-DNA containing the ZM-MIR-MAX1 expression cassette results in increased transformation frequency and regenerates multiple green and healthy shoots. Agrobacterium infection of leaf segments/tissue with the ZM-MIR-MAX1 expression cassette is expected to produce healthy fertile plants in which the ZM-MIR-MAX1 expression cassette is excised.

### Example 31: Downregulation of Maize Orthologs of Arabidopsis More Axillary Growth4 (AT-MAX4)

[0307] Downregulation of maize orthologs of the Arabidopsis More Axillary Growth4 (AT-MAX4) gene improves transformation frequency and promotes meristem formation and shoot formation.

[0308] Agrobacterium strain LBA4404 TD THY− harboring a T-DNA with i) a microRNA (ZM-MIR-MAX4) (SEQ ID NO:134) expression cassette targeting the transcript of the maize More Axillary Growth4 gene (ZMMAX4) (SEQ ID NO:131), ii) a heat-inducible CRE cassette, iii) an HRA expression cassette, and iv) a ZS-GREEN expression cassette is used. The Agrobacterium strain is used to transform segments of tissue cut from in vitro-grown, sterile, maize leaves. Agrobacterium methods, transformation, and media progression through co-cultivation, resting, and maturation are as previously described above. Bacterial culture is adjusted to OD550 of 0.6 for infection and 8 ml aliquoted into a screen-cup on a 6-well plate. Small leaf base sections are placed directly into the Agrobacterium suspension, infected for 15 minutes and transferred to an autoclaved filter paper resting on top of 710N co-cultivation medium for 2-3 days at 21° C. in the dark. After co-cultivation the paper supporting the leaf segments/tissue is transferred to 605B medium for a 4-week resting period and sub-cultured every 2 weeks. Following the resting period, the plates are placed in an incubator set at 45° C. and 70% RH for 2 hours after which the leaf segments/tissue are transferred onto 13329B maturation medium and cultured in the dark at 28° C. for 2 weeks. The segments/tissue on maturation medium are then moved to a light room set at 26° C. for 1 week. Segments/tissue with small shoots are transferred onto 404J rooting medium for 2-3 weeks until well-formed roots are developed. It is expected that transformation with T-DNA containing the ZM-MIR-MAX4 expression cassette results in increased transformation frequency and regenerates multiple green and healthy shoots. Agrobacterium infection of leaf segments/tissue with the ZM-MIR-MAX4 expression cassette is expected to produce healthy fertile plants in which the ZM-MIR-MAX4 expression cassette is excised.

### Example 32: Leaf Transformation of Maize by Particle Bombardment Using Different Promoters, WUS, ODP2 and BBM Genes

[0309] Maize leaf explants were subjected to particle bombardment as described previously. Individual plasmids for WUS and ODP2 (BBM) were bombarded together to deliver the test combinations described in Table 31. There were plasmids with different promoters regulating WUS and ODP2, as well as plasmids with WUS and ODP2 genes from different monocot plant species. In addition, there were plasmids with BBM2 genes from different plant species. After bombardment the explants were placed on resting media for 10 days and scored for the formation of somatic embryos (SE). The SE response was scored relative to the response seen for the combination NOS::WUS+3XEN5-UB1::ODP2 for which the response was set at 10000. The responses were ranked from 0-5 as follows. 0: 0-15% (no to very low SE response); 1: 15-25% (low SE response); 2: 25-50% (moderate SE response); 3: 50-80% (moderately high SE response); 4: 80-100% (high SE response); 5: >100% (prolific SE response).

TABLE 31

| | Relative SE | |
|---|---|---|
| Test combination | Response % | Rank |
| NOS-WUS + 3XENH-UBI-BBM | 100 | 4 |
| NOS-WUS + UBI-BBM | 36 | 2 |
| NOS-WUS + CSVMV-PRO-BBM | 13 | 0 |
| NOS-WUS + SCBV-PRO-BBM | 36 | 2 |
| NOS-WUS + 3XENH-ZMGRP1-BBM | 12 | 0 |
| NOS-WUS + 3XENH-ZMRPL1-BBM | 55 | 3 |
| NOS-WUS + 3XENH-ZMDNAJ-BBM | 36 | 2 |
| UBI-WUS + 3XENH-UBI-BBM | 533 | 5 |
| ACTIN-WUS + 3XENH-UBI-BBM | 567 | 5 |
| ZMATPSYN-WUS + 3XENH-UBI-BBM | 333 | 5 |
| ZMEIF4A-WUS + 3XENH-UBI-BBM | 250 | 5 |
| ZMPABP-WUS + 3XENH-UBI-BBM | 150 | 5 |
| ZMVDAC1A-WUS + 3XENH-UBI-BBM | 233 | 5 |
| NOS-WUS + BD-CAB2-2XEME-BBM | 123 | 5 |
| NOS-WUS + ZM-PLTP-3XEME-BBM | 26 | 2 |
| NOS-WUS + 3XENH-ZMSAMDC2-BBM | 10 | 1 |
| NOS-WUS + 3XEME-UBI-BBM | 104 | 5 |
| UBI-WUS + 3XEME-UBI-BBM | 52 | 3 |
| ACT-WUS + 3XEME-UBI-BBM | 22 | 1 |
| 3XEME-UBI-WUS + 3XEME-UBI-BBM | 36 | 2 |
| 3XEME-NOS-WUS + 3XEME-UBI-BBM | 24 | 1 |
| NOS-WUS + 3XENH-ZMPPISO-BBM | 48 | 2 |
| NOS-WUS + 3XENH-ZMEF1A-BBM | 55 | 3 |
| NOS-WUS + ZMGRP1-BBM | 55 | 3 |
| NOS-WUS + ZMRPL1-BBM | 12 | 0 |
| NOS-WUS + ZMDNAJ-BBM | 40 | 2 |
| NOS-WUS + ZMSAMDC2-BBM | 7 | 0 |
| NOS-WUS + ZMPPISO-BBM | 47 | 2 |
| NOS-WUS + ZMEF1A-BBM | 100 | 4 |
| NOS-WUS + 3XENH-BDUBI1-BBM | 117 | 5 |
| NOS-WUS + 3XENH-BDUBI1C-BBM | 167 | 5 |
| NOS-WUS + 3XENH-SIUBI1-BBM | 76 | 3 |
| NOS-WUS + 3XENH-SBUBI1-BBM | 162 | 5 |
| NOS-WUS + 3XENH-OSUBI3-BBM | 57 | 3 |
| NOS-WUS + 3XENH-BSV(AY)-BBM | 53 | 3 |
| NOS-WUS + BSV(AY)-BBM | 67 | 3 |
| NOS-WUS + 3XENH-RUBISCO-BBM | 40 | 2 |
| NOS-OsWUS + 3XENH-UBI-BBM | 44 | 2 |
| NOS-SiWUS + 3XENH-UBI-BBM | 44 | 2 |
| NOS-SvWUS + 3XENH-UBI-BBM | 22 | 1 |
| NOS-PviWUS + 3XENH-UBI-BBM | 67 | 3 |
| NOS-PhaWUS + 3XENH-UBI-BBM | 27 | 2 |
| NOS-MsWUS + 3XENH-UBI-BBM | 67 | 3 |
| NOS-BdWUS + 3XENH-UBI-BBM | 80 | 4 |
| NOS-WUS + 3XENH-UBI-SB-BBM | 200 | 5 |
| NOS-WUS + 3XENH-UBI-OS-BBM | 53 | 3 |
| NOS-WUS + 3XENH-UBI-BD-BBM | 167 | 5 |
| NOS-WUS + 3XENH-UBI-SV-BBM | 89 | 4 |
| NOS-WUS + 3XENH-UBI-SI-BBM | 122 | 5 |
| NOS-WUS + 3XENH-UBI-TA-BBM | 88 | 4 |
| NOS-WUS + 3XENH-UBI-MA-BBML | 21 | 1 |
| NOS-WUS + 3XENH-UBI-MS-BBM | 17 | 1 |
| NOS-WUS + 3XENH-UBI-ZM-BBM2 | 138 | 5 |
| NOS-WUS + 3XENH-UBI-SB-BBM2 | 21 | 1 |
| NOS-WUS + 3XENH-UBI-OS-BBM2 | 87 | 4 |
| NOS-WUS + 3XENH-UBI-BD-BBM2 | 75 | 3 |
| NOS-WUS + 3XENH-UBI-SV-BBM2 | 100 | 4 |
| NOS-WUS + 3XENH-UBI-SI-BBM2 | 104 | 5 |
| NOS-WUS + 3XENH-UBI-MS-BBM2 | 118 | 5 |
| NOS-WUS + UBI-SB-BBM | 67 | 3 |
| NOS-WUS + UBI-OS-BBM | 36 | 2 |
| NOS-WUS + UBI-BD-BBM | 31 | 2 |
| NOS-WUS + UBI-SV-BBM | 31 | 2 |
| NOS-WUS + UBI-SI-BBM | 53 | 3 |

[0310] The results summarized in Table 31 above demonstrate that a variety of promoters driving expression of either WUS2 or BBM, and a variety of WUS2 and/or BBM homologs (and BBM2 homologs) are effective in stimulating rapid somatic embryo formation in maize leaf cells (any score of 3 and above) at levels above that shown for the combination of NOS:WUS+UBI:BBM. It should be noted that using particle bombardment for this assay provided an extra stimulation of the growth response simply due to the artifactual nature of particle bombardment delivering many copies of each plasmid, artificially elevating the growth response above that normally seen during Agrobacterium transformation (typically low copy number of introduced T-DNAs compared to the higher titers delivered with particle bombardment. Due to this uniformly elevated expression in this assay, the NOS:WUS+UBI:BBM combination produced a very low level of rapid somatic embryos—a response that is not observed after Agrobacterium delivery (typically no rapid somatic embryos). Nonetheless, the assay summarized in Table 31 demonstrate many combinations that stimulated rapid somatic embryo formation above the level of the NOS:WUS+UBI:BBM control.

### Example 33: Transcript Levels of Wus and Odp2 in Leaf Segments/Tissue Transformed by Plasmids with Different Promoters Regulating these Genes

[0311] Maize leaf explants were prepared as described in the preceeding Examples and were transformed by Agrobacterium containing the plasmids listed in Table 32 and placed on resting medium. Transformed leaf explants were sampled 7 days after infection and the levels of the WUS2 and the ODP2 transcripts were analyzed by quantitative reverse-transcription PCR (qRT-PCR). Transcript levels were normalized to native WUS2 and ODP2 transcripts from non-transformed wild-type tissue to generate relative WUS and ODP transcript levels. Five replicates for each construct were analyzed.

TABLE 32

| | | | Relative | Relative |
|---|---|---|---|---|
| | | TXN Resp. | WUS2 | ODP2 |
| | | Assay | Transcript | Transcript |
| Plasmid | Treatment | Score | Levels | Levels |
| PHP97978 | NOS-WUS2/UBI- | 1 | 10 ± 3 | 142 ± 43 |
| | ODP2/HSP:CRE/ZS-GREEN/HRA | | | |
| PHP97334 | NOS-WUS2/3XENH-UBI- | 4 | 27 ± 5* | 243 ± 30** |
| | ODP2/INS-HSP:CRE/ZS- | | | |
| | GREEN/NPTII | | | |
| PHP96695 | NOS-WUS2/3XEME-UBI- | 4 | 15 ± 3 | 335 ± 78** |
| | ODP2/INS-HSP:CRE/ZS- | | | |
| | GREEN/HRA | | | |
| PHP102481 | NOS-WUS2-BDCAB2-2XEME- | 4 | 21 ± 5* | 294 ± 75** |
| | ODP2-INS-CRE-ZSG-NPTII | | | |
| PHP96277 | ACTIN-WUS2-3XENH-UBI- | 4 | 133 ± 40* | 284 ± 78** |
| | ODP2/INS-HSP:CRE/ZS- | | | |
| | GREEN/HRA | | | |
| PHP97417 | UBI-WUS2/3XENH-UBI- | 3 | 35 ± 13* | 205 ± 51** |
| | ODP2/INS-HSP:CRE/ZS- | | | |
| | GREEN/HRA | | | |
| PHP99971 | ZMEIF4A:WUS2/3XENH-UBI- | 2 | 8 ± 3 | 161 ± 27 |
| | ODP2/INS-HSP:CRE/ZS- | | | |
| | GREEN/HRA | | | |
| PHP95385 | ACTIN-WUS2/UBI-ODP2/INS- | 3 | 33 ± 14* | 158 ± 49 |
| | HSP:CRE/ZS-GREEN/HRA | | | |
| PHP101270 | NOS-WUS2/SCBV-ODP2/INS- | 2 | 11 ± 7 | 208 ± 48** |
| | HSP:CRE/ZS-GREEN/HRA | | | |
| PHP100011 | NOS-WUS2/3XENH-RPL1- | 1 | 14 ± 1 | 32 ± 4** |
| | ODP2/INS-HSP:CRE/ZS- | | | |
| | GREEN/HRA | | | |
| PHP100013 | NOS-WUS2/3XENH-SAMDC2- | 1 | 16 ± 3* | 188 ± 62 |
| | ODP2/INS-HSP:CRE/ZS- | | | |
| | GREEN/HRA | | | |
| PHP100057 | NOS-WUS2/3XENH-EF1A- | 1 | 14 ± 8 | 106 ± 38 |
| | ODP2/INS-HSP:CRE/ZS- | | | |
| | GREEN/HRA | | | |

*Significantly different than WUS2 levels in PHP97978
**Significantly different than ODP2 levels in PHP97978

[0312] Data in Table 32 are reported as Mean relative transcript levels±STD (expression) for both genes. Expression is defined as the individual WUS2 or ODP2 mRNA transcript level produced by expression cassettes with specific promoters driving expression of the transgenic WUS2 or ODP2 coding sequences, respectively. Combined expression is defined as the expression (Mean relative transcript levels±STD) for both WUS2 and ODP2 in a transgenic cell. The TXN Resp. Assay Score was as defined in Table 17. The gene combination of NOS:WUS2+UB1:ODP2 that resulted in a callus response had an Assay Score of 1. WUS2 and ODP2 transcript levels using this construct (PT1P97978; SEQ TD NO: 284) produced embryogenic callus. With PU1P97334 (SEQ TD NO: 77; NOS:WUS2+3XENH-UB1:ODP2) both WUS2 and ODP2 transcript levels increased significantly (P<0.05) compared to NOS:WUS+UB1:ODP2 and resulted in the formation of early somatic embryos without first forming embryogenic callus (Assay Score of 4). Similarly, PHP96277 (SEQ TD NO: 67; ACTIN:WUS2+3XENH-UB1:ODP2) showed significantly higher WUS2 and ODP2 transcript levels and had a TXN Resp. Assay Score of 4, whereas, PHP95385 (SEQ TD NO: 47; ACTIN:WUS2+UBI:ODP2) showed significantly higher WUS2 transcript levels but similar ODP2 transcript levels than PHP97978 and had an Assay Score of 3 (some early somatic embryos with rapid growth). In contrast, PHP100011 (SEQ ID NO: 269; NOS:WUS2+3XENH-RPL1:ODP2) had significantly lower ODP2 transcript levels than PHP97978 and had an Assay Score of 1 (no early somatic embryos, embryogenic callus only), while PHP100057 (SEQ ID NO: 273; NOS:WUS2+3XENH-EF1A:ODP2) had transcript levels of WUS2 and ODP2 similar to PHP97978 and also had an Assay Score of 1 (no early somatic embryos, embryogenic callus only).

### Example 34: Transformation of Leaf Segments Derived from Haploid Seedlings Generate Transgenic Events with Mixture of Haploids and Diploids

### A. In Vitro Haploid Embryo Rescue to Produce Seedling Derived Target Tissue

[0313] Haploid embryos were generated as described in U.S. Pat. No. 8,859,846 B2, incorporated herein by reference in its entirety, with the following modifications in this Example 34, an inbred line instead of a F1 hybrid was used as a pollen receiver and the medium used for embryo rescue/germination did not contain colchicine or any other chromosome doubling agents. The identification of haploid embryos from diploid embryos was performed by observing color expression in the embryo tissue assisted by flow cytometry. No significant difference of haploid induction rate was found among different sets of experiments and ranged from 17% to 20%.

### B. Transformation Using Haploid Seedling Derived Leaf Segments

[0314] The procedure of Agrobacterium-mediated maize transformation described in Example 5 using Agrobacterium strain LBA4404 THY− TN-harboring PHP71539 plus PHP97334 (SEQ ID NO: 4 and 77, respectively) was followed for the haploid seedling derived leaf segments in this Example 34, this included Agrobacterium preparation, inoculation of the haploid leaf segments, co-cultivation, resting, selection, and regeneration. The overall transformation efficiency varied from experiment to experiment, with an average of 42%, ranging from 100% at the highest to 12.5% at the lowest. Seedlings germinated from the transformed haploid leaf segments grew slower and thinner compared to seedlings germinated from diploid mature seeds, and the overall transformation efficiency was lower than that from leaf segments from diploid seedlings. The quality of seedlings from the same set of material was consistent. However, the quality of Exp. haploid-2 material was compromised due to light condition changes in the growth room, and those light condition changes were reflected in a decrease in transformation efficiency to (19%) which was considerably lower than the average transformation efficiency of (42%). Exp. haploid-4 was negatively impacted due to an accidental prolonged heat shock treatment that resulted in damaged calli and poor recovery and regeneration of T0 plants (8). See Table 34.

TABLE 34

| | | | | | | # | |
|---|---|---|---|---|---|---|---|
| | | | | | | DevGene | |
| | # of | | | | | Excised | |
| | transgenic | # of T0 | | # | % of | & BBF* | |
| Exp. | seedlings | plants | T0 % | Escapes | Escapes | event | Excision % |
| haploid-1 | 27 | 27 | 100 | 1 | 3.7 | 21 | 78 |
| haploid-2 | 32 | 6 | 19 | 0 | 0 | 3 | 50 |
| haploid-3 | 80 | 33 | 41 | 4 | 12.1 | 28 | 85 |
| haploid-4 | 67 | 8 | 12 | 1 | 12.5 | 1 | 13 |
| haploid-5 | 42 | 25 | 60 | 2 | 8 | 18 | 72 |
| haploid-6 | 41 | 23 | 56 | 0 | 0 | 19 | 83 |
| Total/Average | 289 | 122 | 42 | 8 | 6.6 | 90 | 74 |

*BBF = Backbone free

[0315] As shown in Table 35, transgenic events derived from transformation of haploid leaf segments derived from haploid seedlings displayed a high percentage of diploid TO plants. Specifically, from a total of 122 TO plants regenerated (Table 34), 102 TO plants from 4 representative experiments (Exp. haploid-1, haploid-3, haploid-5, and haploid-6) were sampled for ploidy confirmation using flow cytometry. Exp. haploid-2 and Exp. haploid-4 were excluded from this analysis due to the experimental abnormalities described above. The results shown in Table 35 demonstrated a high frequency of spontaneous doubling in transgenic TO plants generated from haploid leaf segments derived from haploid seedlings. The ploidy of the transgenic TO plants regenerated from the transformed haploid leaf segments had gone through chromosome doubling (without exposure to chemical doubling agents), with almost half of the transgenic TO plants being diploid (average 48.1%, ranging from 34.8 to 55.9%).

TABLE 35

| | # T0 | # T0- | % T0 - | # T0- | % T0- |
|---|---|---|---|---|---|
| Exp. | sampled | Haploid | Haploid | Diploid | Diploid |
| haploid-1 | 24 | 13 | 54.2% | 11 | 45.8% |
| haploid-3 | 34 | 15 | 44.1% | 19 | 55.9% |
| haploid-5 | 23 | 11 | 47.8% | 12 | 52.2% |
| haploid-6 | 23 | 15 | 65.2% | 8 | 34.8% |
| Total/Average | 104 | 54 | 51.9% | 50 | 48.1% |

### Example 35: Use of Chlorine Gas for Seed Sterilization

[0316] Inbred PHH5E seed were placed in a monolayer within a sealed chamber that included a reservoir containing 100 ml of household bleach (8.25% (w/v) sodium hypochlorite) that was immediately below a stopcock valve in the top of the chamber. A glass pipette was used to add 3.5 ml of 12N HCL to the reaction container slowly through the open Valve-1 and the Valve-1 was immediately closed which sealed the chamber containing the seed. As the two solutions came into contact, chlorine gas was released from the reaction reservoir. The chamber remained closed to allow sterilization to proceed overnight (16-18 hrs). Two valves were then opened, Valve-2 was opened to allow chlorine gas to flow out of the seed-containing chamber and into a second scrubbing chamber containing 150 ml of 0.5M NaOH (that traps the chlorine) before the vented air was released into a chemical flow hood. Opening another Valve-3 in the seed-containing chamber allowed fresh air to flow into the chamber, allowing chlorine gas to evacuate and be replaced by fresh air. In this manner, the chamber was purged of chlorine gas for 1.5-2 hours before being opened to remove the seed.

[0317] The gas-sterilized seed were germinated on 90AE solid medium under (120 μE m−2 s−1) lights using an 18-hour photoperiod at 25° C. After 14 days on germination medium, the percentage of seed that germinated and the percentage exhibiting microbial contamination (fungal or bacterial) was evaluated. The results are shown in Table 36. Our standard aqueous sterilization method (described above) was also performed on the same batch of seed as a control (labeled as “Diluted Bleach” in Table 36).

TABLE 36

| | | # | % | # Seed | % |
|---|---|---|---|---|---|
| Sterilization | # | Germi- | Germi- | Contami- | Contami- |
| Method | Seed | nated | nated | nated | nated |
| Chlorine Gas | 50 | 43 | 86% | 30 | 60% |
| Chlorine Gas | 50 | 44 | 88% | 30 | 60% |
| Chlorine Gas | 50 | 46 | 92% | 15 | 30% |
| Chlorine Gas | 50 | 48 | 96% | 15 | 30% |
| Diluted Bleach | 50 | 48 | 96% | 0 | 0% |

[0318] The batch of PHH5E inbred seed used for this experiment typically resulted in 100% contamination if not sterilized before placing on the high-sucrose germination medium used in this experiment. As shown in Table 36, chlorine gas sterilization reduced contamination rates by 40% to 70%, and germination frequencies were in a similar range relative to the control treatment (aqueous diluted bleach sterilization). Noting that the aqueous bleach sterilization method is a product of careful parameter optimization (concentrations, time, temperature, etc), it is accordingly expected that optimization of parameters in the gas sterilization protocol will produce a similar highly-efficient result.

### Example 36: Transformation of Maize Leaf Segments with ZM-ODP2 Alone

### A. Use Of 3×ENH:UBI1ZM PRO

[0319] A plasmid containing the following T-DNA, RB+LOXP+FMV ENH::PSCV ENH::MMV ENH::UBI1ZM PRO::ZM-ODP2+HSP17.7 PRO::CRE+LOXP+SB-UBI::ZS-GREEN+SI-UBI:NPTII+LB, is constructed (PHV00001, SEQ ID NO: 341), where the 3×ENH:UBI1ZM PRO results in expression levels of ZM-ODP2 that are substantially higher than when using the UBI1ZM PRO alone.

[0320] When Agrobacterium strain LBA4404 TD THY− with PHP71539 (SEQ ID NO: 4) and a second plasmid PHV00001 (SEQ ID NO: 341) is used to transform maize inbred PH85E leaf segments, it is expected the strongly expressed ZM-ODP2 will result in rapid somatic embryo formation and TO plant generation will be stimulated.

[0321] It is also expected that use of other viral or plant enhancer sequences, or EME sequences, such as those disclosed in WO2018/183878 which is incorporated herein by reference in its entirety, added to the ZM-UBI promoter, or substituting other strong promoters for ZM-UBI (homologous promoters from other species for example) along with enhancers or EMEs, will produce similar results, with high levels of ZM-ODP2 expression, rapid somatic embryo formation, and generation of T0 plants.

### B. Use of a Two-Component Transactivation System

[0322] A plasmid containing the following T-DNA, RB+LOXP+ZM-GOS2 PRO::SB-UBI INTRON1::MO-LEXA:MO-CBF1A+6×REC:MIN35S PRO:OMEGA 5UTR::ZM-ODP2+HSP17.7 PRO::CRE+LOXP+SB-UBI::ZS-GREEN+SI-UBI::NPTII+LB, is constructed (PHV00003, SEQ ID NO: 343), where a two-component transactivation system results in expression levels of ZM-ODP2 that are substantially higher than when using UBI1ZM PRO::ODP2.

[0323] When Agrobacterium strain LBA4404 TD THY− with PHP71539 (SEQ ID NO: 4) and a second plasmid PHV0003 (SEQ ID NO: 343) is used to transform maize inbred PH85E leaf segments, it is expected that the strongly expressed ZM-ODP2 will result in rapid somatic embryo formation and TO plant generation will be stimulated.

[0324] It is also expected that modification to the components of the two-component transactivation system, such as (but not limited to) i) substituting a stronger promoter such as ZM-ACTIN PRO in place of ZM-GOS2, ii) substituting new activation domains in place of CBF1A, iii) altering the number of activation domains fused to the DNA binding domain, iv) and altering the number of LEXA-binding sequences (REC), can all be used to further increase expression of ZM-ODP2. It is also expected that substituting dCAS-alpha10 in place of LEXA and using gRNA sequences targeting the endogenous ZM-ODP2 promoter sequence can stimulate ODP2 activity and thus promote rapid somatic embryos from transformed leaf cells.

### Example 37: Transformation of Maize Leaf Segments with ZM-WUS2 Alone

### A. Use Of 3×ENH:UBI1ZM PRO

[0325] A plasmid containing the following T-DNA, RB+LOXP+FMV ENH::PSCV ENH::MMV ENH::UBI1ZM PRO::ZM-WUS2+HSP17.7 PRO::CRE+LOXP+SB-UBI::ZS-GREEN+SI-UBI:NPTII+LB, is constructed (PHV00002, SEQ ID NO: 342), where the 3×ENH:UBI1ZM PRO results in expression levels of ZM-WUS2 that are substantially higher than when using UBI1ZM PRO::WUS2.

[0326] When Agrobacterium strain LBA4404 TD THY− with PHP71539 (SEQ ID NO: 4) and a second plasmid PHV00002 (SEQ ID NO: 342) is used to transform maize inbred PH85E leaf segments, it is expected that when the strongly expressed ZM-WUS2 will result in rapid somatic embryo formation and TO plant generation will be stimulated.

[0327] It is also expected that use of other viral or plant enhancer sequences, or EME sequences added to the ZM-UBI promoter, or substituting other strong promoters for ZM-UBI (homeologous promoters from other species for example) along with enhancers or EMEs, will produce similar results, with high levels of ZM-WUS2 expression, rapid somatic embryo formation, and generation of TO plants.

### B. Use of a Two-Component Transactivation System

[0328] A plasmid containing the following T-DNA, RB+LOXP+ZM-GOS2 PRO::SB-UBI INTRON1::MO-LEXA:MO-CBF1A+6×REC:MIN35S PRO:OMEGA 5UTR::ZM-WUS2+HSP17.7 PRO::CRE+LOXP+SB-UBI::ZS-GREEN+SI-UBI:NPTII+LB, is constructed (PHV00004, SEQ ID NO: 344), where a two-component transactivation system results in expression levels of ZM-WUS2 that are substantially higher than when using UBI1ZM PRO::WUS2.

[0329] When Agrobacterium strain LBA4404 TD THY− with PHP71539 (SEQ ID NO: 4) and a second plasmid PHV0004 (SEQ ID NO: 344) is used to transform maize inbred PH85E leaf segments, it is expected that the strongly expressed ZM-WUS2 will result in rapid somatic embryo formation and TO plant generation will be stimulated.

[0330] It is also expected that modification to the components of the two-component transactivation system, such as (but not limited to) i) substituting a stronger promoter such as ZM-ACTIN PRO in place of ZM-GOS2, ii) substituting new activation domains in place of CBF1A, iii) altering the number of activation domains fused to the DNA binding domain, iv) and altering the number of LEXA-binding sequences (REC), can all be used to further increase expression of ZM-WUS2. It is also expected that substituting dCAS-alpha10 in place of LEXA and using gRNA sequences targeting the endogenous ZM-WUS2 promoter sequence can stimulate WUS2 activity and thus promote rapid somatic embryos from transformed leaf cells.

[0331] It is also expected that modification to the components of the two-component transactivation system, such as (but not limited to) i) substituting a stronger promoter such as ZM-ACTIN PRO in place of ZM-GOS2, ii) substituting new activation domains in place of CBF1A, iii) altering the number of activation domains fused to the DNA binding domain, iv) and altering the number of LEXA-binding sequences (REC), can all be used to further increase expression of ZM-WUS2. It is also expected that substituting dCAS-alpha10 in place of LEXA and using gRNA sequences targeting the endogenous ZM-WUS2 promoter sequence can stimulate WUS2 activity and thus promote rapid somatic embryos from transformed leaf cells.

[0332] As used herein the singular forms “a”, “an”, and “the” include plural referents unless the context clearly dictates otherwise. Thus, for example, reference to “a cell” includes a plurality of such cells and reference to “the protein” includes reference to one or more proteins and equivalents thereof known to those skilled in the art, and so forth. All technical and scientific terms used herein have the same meaning as commonly understood to one of ordinary skill in the art to which this disclosure belongs unless clearly indicated otherwise.

[0333] All patents, publications and patent applications mentioned in the specification are indicative of the level of those skilled in the art to which this disclosure pertains. All patents, publications and patent applications are herein incorporated by reference in the entirety to the same extent as if each individual patent, publication or patent application was specifically and individually indicated to be incorporated by reference in its entirety.

[0334] Although the foregoing disclosure has been described in some detail by way of illustration and example for purposes of clarity of understanding, certain changes and modifications may be practiced within the scope of the appended claims.

The application's sequence listing, which the Patent Office published only in electronic form, follows.

SEQUENCE LISTING (348 sequences)

SEQ ID NO: 1 - DNA, 17373 bp, Artificial sequence
  PHP35648
gtttacccgccaatatatcctgtcaaacactgatagtttaaactgaaggcgggaaacgacaatctgatcatgagcggagaattaagggagtcacgttatgacccccgccgatgacgcgggacaagccgttttacgtttggaactgacagaaccgcaacgttgaaggagccactcagcaagctggtacgattgtaatacgactcactatagggcgaattgagcgctgtttaaacgctcttcaactggaagagcggttaccagagctggtcacctttgtccaccaagatggaactgcggccgctcattaattaagtcaggcgcgcctctagttgaagacacgttcatgtcttcatcgtaagaagacactcagtagtcttcggccagaatggccatctggattcagcaggcctagaaggccatttaaatcctgaggatctggtcttcctaaggacccgggatatcgctatcaactttgtatagaaaagttgggccgaattcgagctcggtacggccagaatggcccggaccgggttaccgaattcgagctcggtaccctgggatccggtgcgggcctcttcgctattacgccagctggcgaaagggggatgtgctgcaaggcgattaagttgggtaacgccagggttttcccagtcacgacgttgtaaaacgacggccagtgccaagctcagatcagcttgcatgcctgcagtgcagcgtgacccggtcgtgcccctctctagagataatgagcattgcatgtctaagttataaaaaattaccacatattttttttgtcacacttgtttgaagtgcagtttatctatctttatacatatatttaaactttactctacgaataatataatctatagtactacaataatatcagtgttttagagaatcatataaatgaacagttagacatggtctaaaggacaattgagtattttgacaacaggactctacagttttatctttttagtgtgcatgtgttctcctttttttttgcaaatagcttcacctatataatacttcatccattttattagtacatccatttagggtttagggttaatggtttttatagactaatttttttagtacatctattttattctattttagcctctaaattaagaaaactaaaactctattttagtttttttatttaataatttagatataaaatagaataaaataaagtgactaaaaattaaacaaataccctttaagaaattaaaaaaactaaggaaacatttttcttgtttcgagtagataatgccagcctgttaaacgccgtcgacgagtctaacggacaccaaccagcgaaccagcagcgtcgcgtcgggccaagcgaagcagacggcacggcatctctgtcgctgcctctggacccctctcgagagttccgctccaccgttggacttgctccgctgtcggcatccagaaattgcgtggcggagcggcagacgtgagccggcacggcaggcggcctcctcctcctctcacggcacggcagctacgggggattcctttcccaccgctccttcgctttcccttcctcgcccgccgtaataaatagacaccccctccacaccctctttccccaacctcgtgttgttcggagcgcacacacacacaaccagatctcccccaaatccacccgtcggcacctccgcttcaaggtacgccgctcgtcctccccccccccccctctctaccttctctagatcggcgttccggtccatggttagggcccggtagttctacttctgttcatgtttgtgttagatccgtgtttgtgttagatccgtgctgctagcgttcgtacacggatgcgacctgtacgtcagacacgttctgattgctaacttgccagtgtttctctttggggaatcctgggatggctctagccgttccgcagacgggatcgatttcatgattttttttgtttcgttgcatagggtttggtttgcccttttcctttatttcaatatatgccgtgcacttgtttgtcgggtcatcttttcatgcttttttttgtcttggttgtgatgatgtggtctggttgggcggtcgttctagatcggagtagaattctgtttcaaactacctggtggatttattaattttggatctgtatgtgtgtgccatacatattcatagttacgaattgaagatgatggatggaaatatcgatctaggataggtatacatgttgatgcgggttttactgatgcatatacagagatgctttttgttcgcttggttgtgatgatgtggtgtggttgggcggtcgttcattcgttctagatcggagtagaatactgtttcaaactacctggtgtatttattaattttggaactgtatgtgtgtgtcatacatcttcatagttacgagtttaagatggatggaaatatcgatctaggataggtatacatgttgatgtgggttttactgatgcatatacatgatggcatatgcagcatctattcatatgctctaaccttgagtacctatctattataataaacaagtatgttttataattattttgatcttgatatacttggatgatggcatatgcagcagctatatgtggatttttttagccctgccttcatacgctatttatttgcttggtactgtttcttttgtcgatgctcaccctgttgtttggtgttacttctgcaggtcgactctagaggatccaccatggctagcataacttcgtatagcatacattatacgaagttatccagatctgccctgtccaacaagttcatcggcgacgacatgaagatgacctaccacatggacggctgcgtgaacggccactacttcaccgtgaagggcgagggcagcggcaagccctacgagggcacccagacctccaccttcaaggtgaccatggccaacggcggccccctggccttctccttcgacatcctgtccaccgtgttcatgtacggcaaccgctgcttcaccgcctaccccaccagcatgcccgactacttcaagcaggccttccccgacggcatgtcctacgagagaaccttcacctacgaggacggcggcgtggccaccgccagctgggagatcagcctgaagggcaactgcttcgagcacaagtccaccttccacggcgtgaacttccccgccgacggccccgtgatggccaagaagaccaccggctgggacccctccttcgagaagatgaccgtgtgcgacggcatcttgaagggcgacgtgaccgccttcctgatgctgcagggcggcggcaactacagatgccagttccacacctcctacaagaccaagaagcccgtgaccatgccccccaaccacgtggtggagcaccgcatcgccagaaccgacctggacaagggcggcaacagcgtgcagctgaccgagcacgccgtggcccacatcacctccgtggtgcccttctgaagcggccgcaacctagacttgtccatcttctggattggccaacttaattaatgtatgaaataaaaggatgcacacatagtgacatgctaatcactataatgtgggcatcaaagttgtgtgttatgtgtaattactagttatctgaataaaagagaaagagatcatccatatttcttatcctaaatgaatgtcacgtgtctttataattctttgatgaaccagatgcatttcattaaccaaatccatatacatataaatattaatcatatataattaatatcaattgggttagcaaaacaaatctagtctaggtgtgttttgcgaattcgtaatcatggtcatagctgtttcctgtgtgaaattgttatccgctcacaattccacacaacatacgagccggaagcataaagtgtaaagcctggggtgcctaatgagtgagctaactcacattaattgcgttgcgctcactgcccgctttccagtcgggaaacctgtcgtgccagctgcattaatgaatcggccaacgcgcggggagaggcggtttgcgtattgggcgctcttccgctgatccgatatcgatgggccctggccgaagcttggtcacccggtccgggcctagaaggccagcttcaagtttgtacaaaaaagcaggctccggccagaatggcccggaccgggttaccgaattcgagctcggtaccctgggatccgatatcgatgggccctggccgaagctgggatatcgctatcaactttgtatagaaaagttgggccgaattcgagctcggtacggccagaatggcccggaccgggttaccgaattcgagctcggtaccctggggatccctatagtattttaaaattgcattaacaaacatgtcctaattggtactcctgagatactataccctcctgttttaaaatagttggcattatcgaattatcattttactttttaatgttttctcttcttttaatatattttatgaattttaatgtattttaaaatgttatgcagttcgctctggacttttctgctgcgcctacacttgggtgtactgggcctaaattcagcctgaccgaccgcctgcattgaataatggatgagcaccggtaaaatccgcgtacccaactttcgagaagaaccgagacgtggcgggccgggccaccgacgcacggcaccagcgactgcacacgtcccgccggcgtacgtgtacgtgctgttccctcactggccgcccaatccactcatgcatgcccacgtacacccctgccgtggcgcgcccagatcctaatcctttcgccgttctgcacttctgctgcctataaatggcggcatcgaccgtcacctgcttcaccaccggcgagccacatcgagaacacgatcgagcacacaagcacgaagactcgtttaggagaaaccacaaaccaccaagccgtgcaagcaccaagcttggtcacccggtccgggcctagaaggccagcttcaagtttgtacaaaaaagcaggcttcgaaggagatagaaccgatccaccatgtccaacctgctcacggttcaccagaaccttccggctcttccagtggacgcgacgtccgatgaagtcaggaagaacctcatggacatgttccgcgacaggcaagcgttcagcgagcacacctggaagatgctgctctccgtctgccgctcctgggctgcatggtgcaagctgaacaacaggaagtggttccccgctgagcccgaggacgtgagggattaccttctgtacctgcaagcgcgaggtttgtttctgcttctacctttgatatatatataataattatcattaattagtagtaatataatatttcaaatatttttttcaaaataaaagaatgtagtatatagcaattgcttttctgtagtttataagtgtgtatattttaatttataacttttctaatatatgaccaaaacatggtgatgcctaggtctggcagtgaagaccatccagcaacaccttggacaactgaacatgcttcacaggcgctccggcctcccgcgccccagcgactcgaacgccgtgagcctcgtcatgcgccgcatcaggaaggaaaacgtcgatgccggcgaaagggcaaagcaggccctcgcgttcgagaggaccgatttcgaccaggtccgcagcctgatggagaacagcgacaggtgccaggacattaggaacctggcgttcctcggaattgcatacaacacgctcctcaggatcgcggaaattgcccgcattcgcgtgaaggacattagccgcaccgacggcggcaggatgcttatccacattggcaggaccaagacgctcgtttccaccgcaggcgtcgaaaaggccctcagcctcggagtgaccaagctcgtcgaacgctggatctccgtgtccggcgtcgcggacgacccaaacaactacctcttctgccgcgtccgcaagaacggggtggctgcccctagcgccaccagccaactcagcacgagggccttggaaggtattttcgaggccacccaccgcctgatctacggcgcgaaggatgacagcggtcaacgctacctcgcatggtccgggcactccgcccgcgttggagctgctagggacatggcccgcgccggtgtttccatccccgaaatcatgcaggcgggtggatggacgaacgtgaacattgtcatgaactacattcgcaaccttgacagcgagacgggcgcaatggttcgcctcctggaagatggtgactgagctagacccagctttcttgtacaaagtggccgttaacggatccagacttgtccatcttctggattggccaacttaattaatgtatgaaataaaaggatgcacacatagtgacatgctaatcactataatgtgggcatcaaagttgtgtgttatgtgtaattactagttatctgaataaaagagaaagagatcatccatatttcttatcctaaatgaatgtcacgtgtctttataattctttgatgaaccagatgcatttcattaaccaaatccatatacatataaatattaatcatatataattaatatcaattgggttagcaaaacaaatctagtctaggtgtgttttgcgaattgcggcaagcttgcggccgccccagcttggtcacccggtccgggcctagaaggccgatctcccgggcacccagctttcttgtacaaagtggccgttaacggatcggccagaatggcccggaccgggttaccgaattcgagctcggtaccctgggatcgaccgaagctgaccgaagcttgcggccgcacactgatagtttaaactgaaggcgggaaacgacaatctgatcatgagcggagaattaagggagtcacgttatgacccccgccgatgacgcgggacaagccgttttacgtttggaactgacagaaccgcaacgattgaaggagccactcagccgcgggtttctggagtttaatgagctaagcacatacgtcagaaaccattattgcgcgttcaaaagtcgcctaaggtcactatcagctagcaaatatttcttgtcaaaaatgctccactgacgttccataaattcccctcggtatccaattagagtctcatattcactctcccgggggatctcgactctagaggatcgctcaggaaggccgctgagatagaggcatggcggccaatgcgggcggcggtggagcgggaggaggcagcggcagcggcagcgtggctgcgccggcggtgtgccgccccagcggctcgcggtggacgccgacgccggagcagatcaggatgctgaaggagctctactacggctgcggcatccggtcgcccagctcggagcagatccagcgcatcaccgccatgctgcggcagcacggcaagatcgagggcaagaacgtcttctactggttccagaaccacaaggcccgcgagcgccagaagcgccgcctcaccagcctcgacgtcaacgtgcccgccgccggcgcggccgacgccaccaccagccaactcggcgtcctctcgctgtcgtcgccgccgccttcaggcgcggcgcctccctcgcccaccctcggcttctacgccgccggcaatggcggcggatcggctgtgctgctggacacgagttccgactggggcagcagcggcgctgccatggccaccgagacatgcttcctgcaggactacatgggcgtgacggacacgggcagctcgtcgcagtggccacgcttctcgtcgtcggacacgataatggcggcggccgcggcgcgggcggcgacgacgcgggcgcccgagacgctccctctcttcccgacctgcggcgacgacggcggcagcggtagcagcagctacttgccgttctggggtgccgcgtccacaactgccggcgccacttcttccgttgcgatccagcagcaacaccagctgcaggagcagtacagcttttacagcaacagcaacagcacccagctggccggcaccggcaaccaagacgtatcggcaacagcagcagcagccgccgccctggagctgagcctcagctcatggtgctccccttaccctgctgcagggagtatgtgagagcaacgcgagctgccactgctcttcactgatgtctctggaatggaaggaggaggaagtgagcatagcgttggtgcgttgctgtcaagggcgaattgtaccacatggttaacctagacttgtccatcttctggattggccaacttaattaatgtatgaaataaaaggatgcacacatagtgacatgctaatcactataatgtgggcatcaaagttgtgtgttatgtgtaattactagttatctgaataaaagagaaagagatcatccatatttcttatcctaaatgaatgtcacgtgtctttataattctttgatgaaccagatgcatttcattaaccaaatccatatacatataaatattaatcatatataattaatatcaattgggttagcaaaacaaatctagtctaggtgtgttttgcgaattgcggccgccaccgcggtggagctcgaattccggtcagcttgcatgcctgcagtgcagcgtgacccggtcgtgcccctctctagagataatgagcattgcatgtctaagttataaaaaattaccacatattttttttgtcacacttgtttgaagtgcagtttatctatctttatacatatatttaaactttactctacgaataatataatctatagtactacaataatatcagtgttttagagaatcatataaatgaacagttagacatggtctaaaggacaattgagtattttgacaacaggactctacagttttatctttttagtgtgcatgtgttctcctttttttttgcaaatagcttcacctatataatacttcatccattttattagtacatccatttagggtttagggttaatggtttttatagactaatttttttagtacatctattttattctattttagcctctaaattaagaaaactaaaactctattttagtttttttatttaataatttagatataaaatagaataaaataaagtgactaaaaattaaacaaataccctttaagaaattaaaaaaactaaggaaacatttttcttgtttcgagtagataatgccagcctgttaaacgccgtcgacgagtctaacggacaccaaccagcgaaccagcagcgtcgcgtcgggccaagcgaagcagacggcacggcatctctgtcgctgcctctggacccctctcgagagttccgctccaccgttggacttgctccgctgtcggcatccagaaattgcgtggcggagcggcagacgtgagccggcacggcaggcggcctcctcctcctctcacggcaccggcagctacgggggattcctttcccaccgctccttcgctttcccttcctcgcccgccgtaataaatagacaccccctccacaccctctttccccaacctcgtgttgttcggagcgcacacacacacaaccagatctcccccaaatccacccgtcggcacctccgcttcaaggtacgccgctcgtcctcccccccccccctctctaccttctctagatcggcgttccggtccatgcatggttagggcccggtagttctacttctgttcatgtttgtgttagatccgtgtttgtgttagatccgtgctgctagcgttcgtacacggatgcgacctgtacgtcagacacgttctgattgctaacttgccagtgtttctctttggggaatcctgggatggctctagccgttccgcagacgggatcgatttcatgattttttttgtttcgttgcatagggtttggtttgcccttttcctttatttcaatatatgccgtgcacttgtttgtcgggtcatcttttcatgcttttttttgtcttggttgtgatgatgtggtctggttgggcggtcgttctagatcggagtagaattctgtttcaaactacctggtggatttattaattttggatctgtatgtgtgtgccatacatattcatagttacgaattgaagatgatggatggaaatatcgatctaggataggtatacatgttgatgcgggttttactgatgcatatacagagatgctttttgttcgcttggttgtgatgatgtggtgtggttgggcggtcgttcattcgttctagatcggagtagaatactgtttcaaactacctggtgtatttattaattttggaactgtatgtgtgtgtcatacatcttcatagttacgagtttaagatggatggaaatatcgatctaggataggtatacatgttgatgtgggttttactgatgcatatacatgatggcatatgcagcatctattcatatgctctaaccttgagtacctatctattataataaacaagtatgttttataattattttgatcttgatatacttggatgatggcatatgcagcagctatatgtggatttttttagccctgccttcatacgctatttatttgcttggtactgtttcttttgtcgatgctcaccctgttgtttggtgttacttctgcaggtcgactctagaggatccatggccactgtgaacaactggctcgctttctccctctccccgcaggagctgccgccctcccagacgacggactccacactcatctcggccgccaccgccgaccatgtctccggcgatgtctgcttcaacatcccccaagattggagcatgaggggatcagagctttcggcgctcgtcgcggagccgaagctggaggacttcctcggcggcatctccttctccgagcagcatcacaaggccaactgcaacatgatacccagcactagcagcacagtttgctacgcgagctcaggtgctagcaccggctaccatcaccagctgtaccaccagcccaccagctcagcgctccacttcgcggactccgtaatggtggcctcctcggccggtgtccacgacggcggtgccatgctcagcgcggccgccgctaacggtgtcgctggcgctgccagtgccaacggcggcggcatcgggctgtccatgattaagaactggctgcggagccaaccggcgcccatgcagccgagggtggcggcggctgagggcgcgcaggggctctctttgtccatgaacatggcggggacgacccaaggcgctgctggcatgccacttctcgctggagagcgcgcacgggcgcccgagagtgtatcgacgtcagcacagggtggagccgtcgtcgtcacggcgccgaaggaggatagcggtggcagcggtgttgccggcgctctagtagccgtgagcacggacacgggtggcagcggcggcgcgtcggctgacaacacggcaaggaagacggtggacacgttcgggcagcgcacgtcgatttaccgtggcgtgacaaggcatagatggactgggagatatgaggcacatctttgggataacagttgcagaagggaagggcaaactcgtaagggtcgtcaagtctatttaggtggctatgataaagaggagaaagctgctagggcttatgatcttgctgctctgaagtactggggtgccacaacaacaacaaattttccagtgagtaactacgaaaaggagctcgaggacatgaagcacatgacaaggcaggagtttgtagcgtctctgagaaggaagagcagtggtttctccagaggtgcatccatttacaggggagtgactaggcatcaccaacatggaagatggcaagcacggattggacgagttgcagggaacaaggatctttacttgggcaccttcagcacccaggaggaggcagcggaggcgtacgacatcgcggcgatcaagttccgcggcctcaacgccgtcaccaacttcgacatgagccgctacgacgtgaagagcatcctggacagcagcgccctccccatcggcagcgccgccaagcgcctcaaggaggccgaggccgcagcgtccgcgcagcaccaccacgccggcgtggtgagctacgacgtcggccgcatcgcctcgcagctcggcgacggcggagccctggcggcggcgtacggcgcgcactaccacggcgccgcctggccgaccatcgcgttccagccgggcgccgccagcacaggcctgtaccacccgtacgcgcagcagccaatgcgcggcggcgggtggtgcaagcaggagcaggaccacgcggtgatcgcggccgcgcacagcctgcaggacctccaccacctgaacctgggcgcggccggcgcgcacgactttttctcggcagggcagcaggccgccgccgctgcgatgcacggcctgggtagcatcgacagtgcgtcgctcgagcacagcaccggctccaactccgtcgtctacaacggcggggtcggcgacagcaacggcgccagcgccgtcggcggcagtggcggtggctacatgatgccgatgagcgctgccggagcaaccactacatcggcaatggtgagccacgagcaggtgcatgcacgggcctacgacgaagccaagcaggctgctcagatggggtacgagagctacctggtgaacgcggagaacaatggtggcggaaggatgtctgcatgggggactgtcgtgtctgcagccgcggcggcagcagcaagcagcaacgacaacatggccgccgacgtcggccatggcggcgcgcagctcttcagtgtctggaacgacacttaagcgtacgtgccggcctggctctccgaaagggcgaattccagcacactggcggccgttactagacccaacctagacttgtccatcttctggattggccaacttaattaatgtatgaaataaaaggatgcacacatagtgacatgctaatcactataatgtgggcatcaaagttgtgtgttatgtgtaattactagttatctgaataaaagagaaagagatcatccatatttcttatcctaaatgaatgtcacgtgtctttataattctttgatgaaccagatgcatttcattaaccaaatccatatacatataaatattaatcatatataattaatatcaattgggttagcaaaacaaatctagtctaggtgtgttttgcgaatgcggccgccaccgcggtggagctcgaattccggtcgatccgatgatcctgagcttctagcataacttcgtatagcatacattatacgaagttatccagatctgcccacagcaagcacggcctgaaggaggagatgaccatgaagtaccacatggagggctgcgtgaacggccacaagttcgtgatcaccggcgagggcatcggctaccccttcaagggcaagcagaccatcaacctgtgcgtgatcgagggcggccccctgcccttcagcgaggacatcctgagcgccggcttcaagtacggcgaccggatcttcaccgagtacccccaggacatcgtggactacttcaagaacagctgccccgccggctacacctggggccggagcttcctgttcgaggacggcgccgtgtgcatctgtaacgtggacatcaccgtgagcgtgaaggagaactgcatctaccacaagagcatcttcaacggcgtgaacttccccgccgacggccccgtgatgaagaagatgaccaccaactgggaggccagctgcgagaagatcatgcccgtgcctaagcagggcatcctgaagggcgacgtgagcatgtacctgctgctgaaggacggcggccggtaccggtgccagttcgacaccgtgtacaaggccaagagcgtgcccagcaagatgcccgagtggcacttcatccagcacaagctgctgcgggaggaccggagcgacgccaagaaccagaagtggcagctgaccgagcacgccatcgccttccccagcgccctggcctgaagcggccgcaacctagacttgtccatcttctggattggccaacttaattaatgtatgaaataaaaggatgcacacatagtgacatgctaatcactataatgtgggcatcaaagttgtgtgttatgtgtaattactagttatctgaataaaagagaaagagatcatccatatttcttatcctaaatgaatgtcacgtgtctttataattctttgatgaaccagatgcatttcattaaccaaatccatatacatataaatattaatcatatataattaatatcaattgggttagcaaaacaaatctagtctaggtgtgttttgcgaattagcttggtcacccggtccgggcctagaaggccagcttgcggccgccccgggcaactttattatacaaagttgatagatatcggaccgattaaactttaattcggtccgaagcttgcatgcctgcagtgcagcgtgacccggtcgtgcccctctctagagataatgagcattgcatgtctaagttataaaaaattaccacatattttttttgtcacacttgtttgaagtgcagtttatctatctttatacatatatttaaactttactctacgaataatataatctatagtactacaataatatcagtgttttagagaatcatataaatgaacagttagacatggtctaaaggacaattgagtattttgacaacaggactctacagttttatctttttagtgtgcatgtgttctcctttttttttgcaaatagcttcacctatataatacttcatccattttattagtacatccatttagggtttagggttaatggtttttatagactaatttttttagtacatctattttattctattttagcctctaaattaagaaaactaaaactctattttagtttttttatttaataatttagatataaaatagaataaaataaagtgactaaaaattaaacaaataccctttaagaaattaaaaaaactaaggaaacatttttcttgtttcgagtagataatgccagcctgttaaacgccgtcgacgagtctaacggacaccaaccagcgaaccagcagcgtcgcgtcgggccaagcgaagcagacggcacggcatctctgtcgctgcctctggacccctctcgagagttccgctccaccgttggacttgctccgctgtcggcatccagaaattgcgtggcggagcggcagacgtgagccggcacggcaggcggcctcctcctcctctcacggcaccggcagctacgggggattcctttcccaccgctccttcgctttcccttcctcgcccgccgtaataaatagacaccccctccacaccctctttccccaacctcgtgttgttcggagcgcacacacacacaaccagatctcccccaaatccacccgtcggcacctccgcttcaaggtacgccgctcgtcctcccccccccccctctctaccttctctagatcggcgttccggtccatgcatggttagggcccggtagttctacttctgttcatgtttgtgttagatccgtgtttgtgttagatccgtgctgctagcgttcgtacacggatgcgacctgtacgtcagacacgttctgattgctaacttgccagtgtttctctttggggaatcctgggatggctctagccgttccgcagacgggatcgatttcatgattttttttgtttcgttgcatagggtttggtttgcccttttcctttatttcaatatatgccgtgcacttgtttgtcgggtcatcttttcatgcttttttttgtcttggttgtgatgatgtggtctggttgggcggtcgttctagatcggagtagaattctgtttcaaactacctggtggatttattaattttggatctgtatgtgtgtgccatacatattcatagttacgaattgaagatgatggatggaaatatcgatctaggataggtatacatgttgatgcgggttttactgatgcatatacagagatgctttttgttcgcttggttgtgatgatgtggtgtggttgggcggtcgttcattcgttctagatcggagtagaatactgtttcaaactacctggtgtatttattaattttggaactgtatgtgtgtgtcatacatcttcatagttacgagtttaagatggatggaaatatcgatctaggataggtatacatgttgatgtgggttttactgatgcatatacatgatggcatatgcagcatctattcatatgctctaaccttgagtacctatctattataataaacaagtatgttttataattattttgatcttgatatacttggatgatggcatatgcagcagctatatgtggatttttttagccctgccttcatacgctatttatttgcttggtactgtttcttttgtcgatgctcaccctgttgtttggtgttacttctgcaggtcgactttaacttagcctaggatccacacgacaccatgtcccccgagcgccgccccgtcgagatccgcccggccaccgccgccgacatggccgccgtgtgcgacatcgtgaaccactacatcgagacctccaccgtgaacttccgcaccgagccgcagaccccgcaggagtggatcgacgacctggagcgcctccaggaccgctacccgtggctcgtggccgaggtggagggcgtggtggccggcatcgcctacgccggcccgtggaaggcccgcaacgcctacgactggaccgtggagtccaccgtgtacgtgtcccaccgccaccagcgcctcggcctcggctccaccctctacacccacctcctcaagagcatggaggcccagggcttcaagtccgtggtggccgtgatcggcctcccgaacgacccgtccgtgcgcctccacgaggccctcggctacaccgcccgcggcaccctccgcgccgccggctacaagcacggcggctggcacgacgtcggcttctggcagcgcgacttcgagctgccggccccgccgcgcccggtgcgcccggtgacgcagatctgagtcgaaacctagacttgtccatcttctggattggccaacttaattaatgtatgaaataaaaggatgcacacatagtgacatgctaatcactataatgtgggcatcaaagttgtgtgttatgtgtaattactagttatctgaataaaagagaaagagatcatccatatttcttatcctaaatgaatgtcacgtgtctttataattctttgatgaaccagatgcatttcattaaccaaatccatatacatataaatattaatcatatataattaatatcaattgggttagcaaaacaaatctagtctaggtgtgttttgcgaattgcggccgccaccgcggtggagctcgaattcattccgattaatcgtggcctcttgctcttcaggatgaagagctatgtttaaacgtgcaagcgctactagacaattcagtacattaaaaacgtccgcaatgtgttattaagttgtctaagcgtcaatttgtttacaccacaatatatcctgccac

SEQ ID NO: 2 - DNA, 18360 bp, Artificial sequence
  PHP46332
gtttacccgccaatatatcctgtcaaacactgatagtttaaactgaaggcgggaaacgacaatctgatcatgagcggagaattaagggagtcacgttatgacccccgccgatgacgcgggacaagccgttttacgtttggaactgacagaaccgcaacgttgaaggagccactcagcaagctggtacgattgtaatacgactcactatagggcgaattgagcgctgtttaaacgctcttcaactggaagagcggttaccagagctggtcacctttgtccaccaagatggaactgcggccgctcattaattaagtcaggcgcgcctctagttgaagacacgttcatgtcttcatcgtaagaagacactcagtagtcttcggccagaatggccatctggattcagcaggcctagaaggccatttaaatcctgaggatctggtcttcctaaggacccgggatatcgctatcaactttgtatagaaaagttgggccgaattcgagctcggtacggccagaatggcccggaccgggttaccgaattcgagctcggtaccctgggatccggtgcgggcctcttcgctattacgccagctggcgaaagggggatgtgctgcaaggcgattaagttgggtaacgccagggttttcccagtcacgacgttgtaaaacgacggccagtgccaagctcagatcagcttgcatgcctgcagtgcagcgtgacccggtcgtgcccctctctagagataatgagcattgcatgtctaagttataaaaaattaccacatattttttttgtcacacttgtttgaagtgcagtttatctatctttatacatatatttaaactttactctacgaataatataatctatagtactacaataatatcagtgttttagagaatcatataaatgaacagttagacatggtctaaaggacaattgagtattttgacaacaggactctacagttttatctttttagtgtgcatgtgttctcctttttttttgcaaatagcttcacctatataatacttcatccattttattagtacatccatttagggtttagggttaatggtttttatagactaatttttttagtacatctattttattctattttagcctctaaattaagaaaactaaaactctattttagtttttttatttaataatttagatataaaatagaataaaataaagtgactaaaaattaaacaaataccctttaagaaattaaaaaaactaaggaaacatttttcttgtttcgagtagataatgccagcctgttaaacgccgtcgacgagtctaacggacaccaaccagcgaaccagcagcgtcgcgtcgggccaagcgaagcagacggcacggcatctctgtcgctgcctctggacccctctcgagagttccgctccaccgttggacttgctccgctgtcggcatccagaaattgcgtggcggagcggcagacgtgagccggcacggcaggcggcctcctcctcctctcacggcacggcagctacgggggattcctttcccaccgctccttcgctttcccttcctcgcccgccgtaataaatagacaccccctccacaccctctttccccaacctcgtgttgttcggagcgcacacacacacaaccagatctcccccaaatccacccgtcggcacctccgcttcaaggtacgccgctcgtcctccccccccccccctctctaccttctctagatcggcgttccggtccatggttagggcccggtagttctacttctgttcatgtttgtgttagatccgtgtttgtgttagatccgtgctgctagcgttcgtacacggatgcgacctgtacgtcagacacgttctgattgctaacttgccagtgtttctctttggggaatcctgggatggctctagccgttccgcagacgggatcgatttcatgattttttttgtttcgttgcatagggtttggtttgcccttttcctttatttcaatatatgccgtgcacttgtttgtcgggtcatcttttcatgcttttttttgtcttggttgtgatgatgtggtctggttgggcggtcgttctagatcggagtagaattctgtttcaaactacctggtggatttattaattttggatctgtatgtgtgtgccatacatattcatagttacgaattgaagatgatggatggaaatatcgatctaggataggtatacatgttgatgcgggttttactgatgcatatacagagatgctttttgttcgcttggttgtgatgatgtggtgtggttgggcggtcgttcattcgttctagatcggagtagaatactgtttcaaactacctggtgtatttattaattttggaactgtatgtgtgtgtcatacatcttcatagttacgagtttaagatggatggaaatatcgatctaggataggtatacatgttgatgtgggttttactgatgcatatacatgatggcatatgcagcatctattcatatgctctaaccttgagtacctatctattataataaacaagtatgttttataattattttgatcttgatatacttggatgatggcatatgcagcagctatatgtggatttttttagccctgccttcatacgctatttatttgcttggtactgtttcttttgtcgatgctcaccctgttgtttggtgttacttctgcaggtcgactctagaggatccaccatggctagcataacttcgtatagcatacattatacgaagttatccagatctgccctgtccaacaagttcatcggcgacgacatgaagatgacctaccacatggacggctgcgtgaacggccactacttcaccgtgaagggcgagggcagcggcaagccctacgagggcacccagacctccaccttcaaggtgaccatggccaacggcggccccctggccttctccttcgacatcctgtccaccgtgttcatgtacggcaaccgctgcttcaccgcctaccccaccagcatgcccgactacttcaagcaggccttccccgacggcatgtcctacgagagaaccttcacctacgaggacggcggcgtggccaccgccagctgggagatcagcctgaagggcaactgcttcgagcacaagtccaccttccacggcgtgaacttccccgccgacggccccgtgatggccaagaagaccaccggctgggacccctccttcgagaagatgaccgtgtgcgacggcatcttgaagggcgacgtgaccgccttcctgatgctgcagggcggcggcaactacagatgccagttccacacctcctacaagaccaagaagcccgtgaccatgccccccaaccacgtggtggagcaccgcatcgccagaaccgacctggacaagggcggcaacagcgtgcagctgaccgagcacgccgtggcccacatcacctccgtggtgcccttctgaagcggccgcaacctagacttgtccatcttctggattggccaacttaattaatgtatgaaataaaaggatgcacacatagtgacatgctaatcactataatgtgggcatcaaagttgtgtgttatgtgtaattactagttatctgaataaaagagaaagagatcatccatatttcttatcctaaatgaatgtcacgtgtctttataattctttgatgaaccagatgcatttcattaaccaaatccatatacatataaatattaatcatatataattaatatcaattgggttagcaaaacaaatctagtctaggtgtgttttgcgaattcgtaatcatggtcatagctgtttcctgtgtgaaattgttatccgctcacaattccacacaacatacgagccggaagcataaagtgtaaagcctggggtgcctaatgagtgagctaactcacattaattgcgttgcgctcactgcccgctttccagtcgggaaacctgtcgtgccagctgcattaatgaatcggccaacgcgcggggagaggcggtttgcgtattgggcgctcttccgctgatccgatatcgatgggccctggccgaagcttggtcacccggtccgggcctagaaggccagcttcaagtttgtacaaaaaagcaggctccggccagaatggcccggaccggaattcgagctcggatccactagtaacggccgccagtgtgctggaattcgcccttgacggcccgggctggtatttcaaaactatagtattttaaaattgcattaacaaacatgtcctaattggtactcctgagatactataccctcctgttttaaaatagttggcattatcgaattatcattttactttttaatgttttctcttcttttaatatattttatgaattttaatgtattttaaaatgttatgcagttcgctctggacttttctgctgcgcctacacttgggtgtactgggcctaaattcagcctgaccgaccgcctgcattgaataatggatgagcaccggtaaaatccgcgtacccaactttcgagaagaaccgagacgtggcgggccgggccaccgacgcacggcaccagcgactgcacacgtcccgccggcgtacgtgtacgtgctgttccctcactggccgcccaatccactcatgcatgcccacgtacacccctgccgtggcgcgcccagatcctaatcctttcgccgttctgcacttctgctgcctataaatggcggcatcgaccgtcacctgcttcaccaccggcgagccacatcgagaacacgatcgagcacacaagcacgaagactcgtttaggagaaaccacaaaccaccaagccgtgcaagcaccaagcttggtcacccggtccgggcctagaaggccagcttcaagtttgtacaaaaaagcaggcttcgaaggagatagaaccgatccaccatgtccaacctgctcacggttcaccagaaccttccggctcttccagtggacgcgacgtccgatgaagtcaggaagaacctcatggacatgttccgcgacaggcaagcgttcagcgagcacacctggaagatgctgctctccgtctgccgctcctgggctgcatggtgcaagctgaacaacaggaagtggttccccgctgagcccgaggacgtgagggattaccttctgtacctgcaagcgcgaggtttgtttctgcttctacctttgatatatatataataattatcattaattagtagtaatataatatttcaaatatttttttcaaaataaaagaatgtagtatatagcaattgcttttctgtagtttataagtgtgtatattttaatttataacttttctaatatatgaccaaaacatggtgatgcctaggtctggcagtgaagaccatccagcaacaccttggacaactgaacatgcttcacaggcgctccggcctcccgcgccccagcgactcgaacgccgtgagcctcgtcatgcgccgcatcaggaaggaaaacgtcgatgccggcgaaagggcaaagcaggccctcgcgttcgagaggaccgatttcgaccaggtccgcagcctgatggagaacagcgacaggtgccaggacattaggaacctggcgttcctcggaattgcatacaacacgctcctcaggatcgcggaaattgcccgcattcgcgtgaaggacattagccgcaccgacggcggcaggatgcttatccacattggcaggaccaagacgctcgtttccaccgcaggcgtcgaaaaggccctcagcctcggagtgaccaagctcgtcgaacgctggatctccgtgtccggcgtcgcggacgacccaaacaactacctcttctgccgcgtccgcaagaacggggtggctgcccctagcgccaccagccaactcagcacgagggccttggaaggtattttcgaggccacccaccgcctgatctacggcgcgaaggatgacagcggtcaacgctacctcgcatggtccgggcactccgcccgcgttggagctgctagggacatggcccgcgccggtgtttccatccccgaaatcatgcaggcgggtggatggacgaacgtgaacattgtcatgaactacattcgcaaccttgacagcgagacgggcgcaatggttcgcctcctggaagatggtgactgagctagacccagctttcttgtacaaagtggccgttaacggatccagacttgtccatcttctggattggccaacttaattaatgtatgaaataaaaggatgcacacatagtgacatgctaatcactataatgtgggcatcaaagttgtgtgttatgtgtaattactagttatctgaataaaagagaaagagatcatccatatttcttatcctaaatgaatgtcacgtgtctttataattctttgatgaaccagatgcatttcattaaccaaatccatatacatataaatattaatcatatataattaatatcaattgggttagcaaaacaaatctagtctaggtgtgttttgcgaatgcggccgcgactctagatcataatcagccataccacattcgaatgtgagttgatccccggcggtgtcccccactgaagaaactatgtgctgtagtatagccgctggctagctagctagttgagtcatttagcggcgatgattgagtaataatgtgtcacgcatcaccatgcatgggtggcagtctcagtgtgagcaatgacctgaatgaacaattgaaatgaaaagaaaaaagtattgttccaaattaaacgttttaaccttttaataggtttatacaataattgatatatgttttctgtatatgtctaatttgttatcatccatttagatatagacgaaaaaaaatctaagaactaaaacaaatgctaatttgaaatgaagggagtatatattgggataatgtcgatgagatccctcgtaatatcaccgacatcacacgtgtccagttaatgtatcagtgatacgtgtattcacatttgttgcgcgtaggcgtacccaacaattttgatcgactatcagaaagtcaacggaagcgagtcgacctcgagggggggcccggtaccaagatatcaaccgcggaaagatctaagcatgcaagggcccaagtcgacctgcagaagcttcggtccgggcctagaaggccgatctcccgggcacccagctttcttgtacaaagtggccgttaacggatcggccagaatggcccggaccgggttaccgaattcgagctcggtaccctgggatcgaccgaagctgaccgaagcttgcggccgcacactgatagtttaaactgaaggcgggaaacgacaatctgatcatgagcggagaattaagggagtcacgttatgacccccgccgatgacgcgggacaagccgttttacgtttggaactgacagaaccgcaacgattgaaggagccactcagccgcgggtttctggagtttaatgagctaagcacatacgtcagaaaccattattgcgcgttcaaaagtcgcctaaggtcactatcagctagcaaatatttcttgtcaaaaatgctccactgacgttccataaattcccctcggtatccaattagagtctcatattcactctcccgggggatctcgactctagaggatcgctcaggaaggccgctgagatagaggcatggcggccaatgcgggcggcggtggagcgggaggaggcagcggcagcggcagcgtggctgcgccggcggtgtgccgccccagcggctcgcggtggacgccgacgccggagcagatcaggatgctgaaggagctctactacggctgcggcatccggtcgcccagctcggagcagatccagcgcatcaccgccatgctgcggcagcacggcaagatcgagggcaagaacgtcttctactggttccagaaccacaaggcccgcgagcgccagaagcgccgcctcaccagcctcgacgtcaacgtgcccgccgccggcgcggccgacgccaccaccagccaactcggcgtcctctcgctgtcgtcgccgccgccttcaggcgcggcgcctccctcgcccaccctcggcttctacgccgccggcaatggcggcggatcggctgtgctgctggacacgagttccgactggggcagcagcggcgctgccatggccaccgagacatgcttcctgcaggactacatgggcgtgacggacacgggcagctcgtcgcagtggccacgcttctcgtcgtcggacacgataatggcggcggccgcggcgcgggcggcgacgacgcgggcgcccgagacgctccctctcttcccgacctgcggcgacgacggcggcagcggtagcagcagctacttgccgttctggggtgccgcgtccacaactgccggcgccacttcttccgttgcgatccagcagcaacaccagctgcaggagcagtacagcttttacagcaacagcaacagcacccagctggccggcaccggcaaccaagacgtatcggcaacagcagcagcagccgccgccctggagctgagcctcagctcatggtgctccccttaccctgctgcagggagtatgtgagagcaacgcgagctgccactgctcttcactgatgtctctggaatggaaggaggaggaagtgagcatagcgttggtgcgttgctgtcaagggcgaattgtaatacgactcactagtgggtaccagagctccctaggcttaagctagacttgtccatcttctggattggccaacttaattaatgtatgaaataaaaggatgcacacatagtgacatgctaatcactataatgtgggcatcaaagttgtgtgttatgtgtaattactagttatctgaataaaagagaaagagatcatccatatttcttatcctaaatgaatgtcacgtgtctttataattctttgatgaaccagatgcatttcattaaccaaatccatatacatataaatattaatcatatataattaatatcaattgggttagcaaaacaaatctagtctaggtgtgttttgcgggatccacgatatcctgcaggaattcccatggagtcaaagattcaaatagaggacctaacagaactcgccgtaaagactggcgaacagttcatacagagtctcttacgactcaatgacaagaagaaaatcttcgtcaacatggtggagcacgacacgcttgtctactccaaaaatatcaaagatacagtctcagaagaccaaagggcaattgagacttttcaacaaagggtaatatccggaaacctcctcggattccattgcccagctatctgtcactttattgtgaagatagtggaaaaggaaggtggctcctacaaatgccatcattgcgataaaggaaaggccatcgttgaagatgcctctgccgacagtggtcccaaagatggacccccacccacgaggagcatcgtggaaaaagaagacgttccaaccacgtcttcaaagcaagtggattgatgtgatatctccactgacgtaagggatgacgcacaatcccactaagcttgcatgcctgcagtgcagcgtgacccggtcgtgcccctctctagagataatgagcattgcatgtctaagttataaaaaattaccacatattttttttgtcacacttgtttgaagtgcagtttatctatctttatacatatatttaaactttactctacgaataatataatctatagtactacaataatatcagtgttttagagaatcatataaatgaacagttagacatggtctaaaggacaattgagtattttgacaacaggactctacagttttatctttttagtgtgcatgtgttctcctttttttttgcaaatagcttcacctatataatacttcatccattttattagtacatccatttagggtttagggttaatggtttttatagactaatttttttagtacatctattttattctattttagcctctaaattaagaaaactaaaactctattttagtttttttatttaataatttagatataaaatagaataaaataaagtgactaaaaattaaacaaataccctttaagaaattaaaaaaactaaggaaacatttttcttgtttcgagtagataatgccagcctgttaaacgccgtcgacgagtctaacggacaccaaccagcgaaccagcagcgtcgcgtcgggccaagcgaagcagacggcacggcatctctgtcgctgcctctggacccctctcgagagttccgctccaccgttggacttgctccgctgtcggcatccagaaattgcgtggcggagcggcagacgtgagccggcacggcaggcggcctcctcctcctctcacggcaccggcagctacgggggattcctttcccaccgctccttcgctttcccttcctcgcccgccgtaataaatagacaccccctccacaccctctttccccaacctcgtgttgttcggagcgcacacacacacaaccagatctcccccaaatccacccgtcggcacctccgcttcaaggtacgccgctcgtcctcccccccccccctctctaccttctctagatcggcgttccggtccatgcatggttagggcccggtagttctacttctgttcatgtttgtgttagatccgtgtttgtgttagatccgtgctgctagcgttcgtacacggatgcgacctgtacgtcagacacgttctgattgctaacttgccagtgtttctctttggggaatcctgggatggctctagccgttccgcagacgggatcgatttcatgattttttttgtttcgttgcatagggtttggtttgcccttttcctttatttcaatatatgccgtgcacttgtttgtcgggtcatcttttcatgcttttttttgtcttggttgtgatgatgtggtctggttgggcggtcgttctagatcggagtagaattctgtttcaaactacctggtggatttattaattttggatctgtatgtgtgtgccatacatattcatagttacgaattgaagatgatggatggaaatatcgatctaggataggtatacatgttgatgcgggttttactgatgcatatacagagatgctttttgttcgcttggttgtgatgatgtggtgtggttgggcggtcgttcattcgttctagatcggagtagaatactgtttcaaactacctggtgtatttattaattttggaactgtatgtgtgtgtcatacatcttcatagttacgagtttaagatggatggaaatatcgatctaggataggtatacatgttgatgtgggttttactgatgcatatacatgatggcatatgcagcatctattcatatgctctaaccttgagtacctatctattataataaacaagtatgttttataattattttgatcttgatatacttggatgatggcatatgcagcagctatatgtggatttttttagccctgccttcatacgctatttatttgcttggtactgtttcttttgtcgatgctcaccctgttgtttggtgttacttctgcaggtcgactctagaggatccatggccactgtgaacaactggctcgctttctccctctccccgcaggagctgccgccctcccagacgacggactccacactcatctcggccgccaccgccgaccatgtctccggcgatgtctgcttcaacatcccccaagattggagcatgaggggatcagagctttcggcgctcgtcgcggagccgaagctggaggacttcctcggcggcatctccttctccgagcagcatcacaaggccaactgcaacatgatacccagcactagcagcacagtttgctacgcgagctcaggtgctagcaccggctaccatcaccagctgtaccaccagcccaccagctcagcgctccacttcgcggactccgtaatggtggcctcctcggccggtgtccacgacggcggtgccatgctcagcgcggccgccgctaacggtgtcgctggcgctgccagtgccaacggcggcggcatcgggctgtccatgattaagaactggctgcggagccaaccggcgcccatgcagccgagggtggcggcggctgagggcgcgcaggggctctctttgtccatgaacatggcggggacgacccaaggcgctgctggcatgccacttctcgctggagagcgcgcacgggcgcccgagagtgtatcgacgtcagcacagggtggagccgtcgtcgtcacggcgccgaaggaggatagcggtggcagcggtgttgccggcgctctagtagccgtgagcacggacacgggtggcagcggcggcgcgtcggctgacaacacggcaaggaagacggtggacacgttcgggcagcgcacgtcgatttaccgtggcgtgacaaggcatagatggactgggagatatgaggcacatctttgggataacagttgcagaagggaagggcaaactcgtaagggtcgtcaagtctatttaggtggctatgataaagaggagaaagctgctagggcttatgatcttgctgctctgaagtactggggtgccacaacaacaacaaattttccagtgagtaactacgaaaaggagctcgaggacatgaagcacatgacaaggcaggagtttgtagcgtctctgagaaggaagagcagtggtttctccagaggtgcatccatttacaggggagtgactaggcatcaccaacatggaagatggcaagcacggattggacgagttgcagggaacaaggatctttacttgggcaccttcagcacccaggaggaggcagcggaggcgtacgacatcgcggcgatcaagttccgcggcctcaacgccgtcaccaacttcgacatgagccgctacgacgtgaagagcatcctggacagcagcgccctccccatcggcagcgccgccaagcgcctcaaggaggccgaggccgcagcgtccgcgcagcaccaccacgccggcgtggtgagctacgacgtcggccgcatcgcctcgcagctcggcgacggcggagccctggcggcggcgtacggcgcgcactaccacggcgccgcctggccgaccatcgcgttccagccgggcgccgccagcacaggcctgtaccacccgtacgcgcagcagccaatgcgcggcggcgggtggtgcaagcaggagcaggaccacgcggtgatcgcggccgcgcacagcctgcaggacctccaccacctgaacctgggcgcggccggcgcgcacgactttttctcggcagggcagcaggccgccgccgctgcgatgcacggcctgggtagcatcgacagtgcgtcgctcgagcacagcaccggctccaactccgtcgtctacaacggcggggtcggcgacagcaacggcgccagcgccgtcggcggcagtggcggtggctacatgatgccgatgagcgctgccggagcaaccactacatcggcaatggtgagccacgagcaggtgcatgcacgggcctacgacgaagccaagcaggctgctcagatggggtacgagagctacctggtgaacgcggagaacaatggtggcggaaggatgtctgcatgggggactgtcgtgtctgcagccgcggcggcagcagcaagcagcaacgacaacatggccgccgacgtcggccatggcggcgcgcagctcttcagtgtctggaacgacacttaagcgtacgtgccggcctggctctccgaaagggcgaattccagcacactggcggccgttactagacccaacctagacttgtccatcttctggattggccaacttaattaatgtatgaaataaaaggatgcacacatagtgacatgctaatcactataatgtgggcatcaaagttgtgtgttatgtgtaattactagttatctgaataaaagagaaagagatcatccatatttcttatcctaaatgaatgtcacgtgtctttataattctttgatgaaccagatgcatttcattaaccaaatccatatacatataaatattaatcatatataattaatatcaattgggttagcaaaacaaatctagtctaggtgtgttttgcgaatgcggccgccaccgcggtggagctcgaattccggtcgatccgatgatcctgagcttctagcataacttcgtatagcatacattatacgaagttatccagatctgcccacagcaagcacggcctgaaggaggagatgaccatgaagtaccacatggagggctgcgtgaacggccacaagttcgtgatcaccggcgagggcatcggctaccccttcaagggcaagcagaccatcaacctgtgcgtgatcgagggcggccccctgcccttcagcgaggacatcctgagcgccggcttcaagtacggcgaccggatcttcaccgagtacccccaggacatcgtggactacttcaagaacagctgccccgccggctacacctggggccggagcttcctgttcgaggacggcgccgtgtgcatctgtaacgtggacatcaccgtgagcgtgaaggagaactgcatctaccacaagagcatcttcaacggcgtgaacttccccgccgacggccccgtgatgaagaagatgaccaccaactgggaggccagctgcgagaagatcatgcccgtgcctaagcagggcatcctgaagggcgacgtgagcatgtacctgctgctgaaggacggcggccggtaccggtgccagttcgacaccgtgtacaaggccaagagcgtgcccagcaagatgcccgagtggcacttcatccagcacaagctgctgcgggaggaccggagcgacgccaagaaccagaagtggcagctgaccgagcacgccatcgccttccccagcgccctggcctgaagcggccgcaacctagacttgtccatcttctggattggccaacttaattaatgtatgaaataaaaggatgcacacatagtgacatgctaatcactataatgtgggcatcaaagttgtgtgttatgtgtaattactagttatctgaataaaagagaaagagatcatccatatttcttatcctaaatgaatgtcacgtgtctttataattctttgatgaaccagatgcatttcattaaccaaatccatatacatataaatattaatcatatataattaatatcaattgggttagcaaaacaaatctagtctaggtgtgttttgcgaattagcttggtcacccggtccgggcctagaaggccagcttcggccgccccgggcaactttattatacaaagttgatagatatcggaccgattaaactttaattcggtccgaagcttgcatgcctgcagtgcagcgtgacccggtcgtgcccctctctagagataatgagcattgcatgtctaagttataaaaaattaccacatattttttttgtcacacttgtttgaagtgcagtttatctatctttatacatatatttaaactttactctacgaataatataatctatagtactacaataatatcagtgttttagagaatcatataaatgaacagttagacatggtctaaaggacaattgagtattttgacaacaggactctacagttttatctttttagtgtgcatgtgttctcctttttttttgcaaatagcttcacctatataatacttcatccattttattagtacatccatttagggtttagggttaatggtttttatagactaatttttttagtacatctattttattctattttagcctctaaattaagaaaactaaaactctattttagtttttttatttaataatttagatataaaatagaataaaataaagtgactaaaaattaaacaaataccctttaagaaattaaaaaaactaaggaaacatttttcttgtttcgagtagataatgccagcctgttaaacgccgtcgacgagtctaacggacaccaaccagcgaaccagcagcgtcgcgtcgggccaagcgaagcagacggcacggcatctctgtcgctgcctctggacccctctcgagagttccgctccaccgttggacttgctccgctgtcggcatccagaaattgcgtggcggagcggcagacgtgagccggcacggcaggcggcctcctcctcctctcacggcaccggcagctacgggggattcctttcccaccgctccttcgctttcccttcctcgcccgccgtaataaatagacaccccctccacaccctctttccccaacctcgtgttgttcggagcgcacacacacacaaccagatctcccccaaatccacccgtcggcacctccgcttcaaggtacgccgctcgtcctcccccccccccctctctaccttctctagatcggcgttccggtccatgcatggttagggcccggtagttctacttctgttcatgtttgtgttagatccgtgtttgtgttagatccgtgctgctagcgttcgtacacggatgcgacctgtacgtcagacacgttctgattgctaacttgccagtgtttctctttggggaatcctgggatggctctagccgttccgcagacgggatcgatttcatgattttttttgtttcgttgcatagggtttggtttgcccttttcctttatttcaatatatgccgtgcacttgtttgtcgggtcatcttttcatgcttttttttgtcttggttgtgatgatgtggtctggttgggcggtcgttctagatcggagtagaattctgtttcaaactacctggtggatttattaattttggatctgtatgtgtgtgccatacatattcatagttacgaattgaagatgatggatggaaatatcgatctaggataggtatacatgttgatgcgggttttactgatgcatatacagagatgctttttgttcgcttggttgtgatgatgtggtgtggttgggcggtcgttcattcgttctagatcggagtagaatactgtttcaaactacctggtgtatttattaattttggaactgtatgtgtgtgtcatacatcttcatagttacgagtttaagatggatggaaatatcgatctaggataggtatacatgttgatgtgggttttactgatgcatatacatgatggcatatgcagcatctattcatatgctctaaccttgagtacctatctattataataaacaagtatgttttataattattttgatcttgatatacttggatgatggcatatgcagcagctatatgtggatttttttagccctgccttcatacgctatttatttgcttggtactgtttcttttgtcgatgctcaccctgttgtttggtgttacttctgcaggtcgactttaacttagcctaggatccacacgacaccatgtcccccgagcgccgccccgtcgagatccgcccggccaccgccgccgacatggccgccgtgtgcgacatcgtgaaccactacatcgagacctccaccgtgaacttccgcaccgagccgcagaccccgcaggagtggatcgacgacctggagcgcctccaggaccgctacccgtggctcgtggccgaggtggagggcgtggtggccggcatcgcctacgccggcccgtggaaggcccgcaacgcctacgactggaccgtggagtccaccgtgtacgtgtcccaccgccaccagcgcctcggcctcggctccaccctctacacccacctcctcaagagcatggaggcccagggcttcaagtccgtggtggccgtgatcggcctcccgaacgacccgtccgtgcgcctccacgaggccctcggctacaccgcccgcggcaccctccgcgccgccggctacaagcacggcggctggcacgacgtcggcttctggcagcgcgacttcgagctgccggccccgccgcgcccggtgcgcccggtgacgcagatctgagtcgaaacctagacttgtccatcttctggattggccaacttaattaatgtatgaaataaaaggatgcacacatagtgacatgctaatcactataatgtgggcatcaaagttgtgtgttatgtgtaattactagttatctgaataaaagagaaagagatcatccatatttcttatcctaaatgaatgtcacgtgtctttataattctttgatgaaccagatgcatttcattaaccaaatccatatacatataaatattaatcatatataattaatatcaattgggttagcaaaacaaatctagtctaggtgtgttttgcgaatgcggccgccaccgcggtggagctcgaattcattccgattaatcgtggcctcttgctcttcaggatgaagagctatgtttaaacgtgcaagcgctactagacaattcagtacattaaaaacgtccgcaatgtgttattaagttgtctaagcgtcaatttgtttacaccacaatatatcctgccac

SEQ ID NO: 3 - DNA, 6270 bp, Artificial sequence
  PHP5096
gacctccgtgtccaggcacatctacttcttctccgctcgcggcaggatcgaccccctcgtgtacctcgacgagttcctcaggaactcagagcccgtgctcaagagggtgaacaggaccggcaactcctcctccaacaagcaggagtaccagctcctcaaggacaacctcgtgaggtcctacaacaaggccctcaagaagaacgccccctactccatcttcgccatcaagaacggccccaagtcccacatcggtaggcacctcatgacctccttcctctcaatgaagggcctcaccgagctcaccaacgtggtgggcaactggtccgacaagagggcctccgccgtggccaggaccacctacacccaccagatcaccgccatccccgaccactacttcgccctcgtgtcaaggtactacgcctacgaccccatctccaaggagatgatcgccctcaaggacgagactaaccccatcgaggagtggcagcacatcgagcagctcaagggctccgccgagggctccatcaggtaccccgcctggaacggcatcatctcccaggaggtgctcgactacctctcctcctacatcaacaggaggatctgagttaacctagacttgtccatcttctggattggccaacttaattaatgtatgaaataaaaggatgcacacatagtgacatgctaatcactataatgtgggcatcaaagttgtgtgttatgtgtaattactagttatctgaataaaagagaaagagatcatccatatttcttatcctaaatgaatgtcacgtgtctttataattctttgatgaaccagatgcatttcattaaccaaatccatatacatataaatattaatcatatataattaatatcaattgggttagcaaaacaaatctagtctaggtgtgttttgcgaattgcggccgcgatctggggaattcgtaatcatggtcatagctgtttcctgtgtgaaattgttatccgctcacaattccacacaacatacgagccggaagcataaagtgtaaagcctggggtgcctaatgagtgagctaactcacattaattgcgttgcgctcactgcccgctttccagtcgggaaacctgtcgtgccagctgcattaatgaatcggccaacgcgcggggagaggcggtttgcgtattgggcgctcttccgcttcctcgctcactgactcgctgcgctcggtcgttcggctgcggcgagcggtatcagctcactcaaaggcggtaatacggttatccacagaatcaggggataacgcaggaaagaacatgtgagcaaaaggccagcaaaaggccaggaaccgtaaaaaggccgcgttgctggcgtttttccataggctccgcccccctgacgagcatcacaaaaatcgacgctcaagtcagaggtggcgaaacccgacaggactataaagataccaggcgtttccccctggaagctccctcgtgcgctctcctgttccgaccctgccgcttaccggatacctgtccgcctttctcccttcgggaagcgtggcgctttctcatagctcacgctgtaggtatctcagttcggtgtaggtcgttcgctccaagctgggctgtgtgcacgaaccccccgttcagcccgaccgctgcgccttatccggtaactatcgtcttgagtccaacccggtaagacacgacttatcgccactggcagcagccactggtaacaggattagcagagcgaggtatgtaggcggtgctacagagttcttgaagtggtggcctaactacggctacactagaaggacagtatttggtatctgcgctctgctgaagccagttaccttcggaaaaagagttggtagctcttgatccggcaaacaaaccaccgctggtagcggtggtttttttgtttgcaagcagcagattacgcgcagaaaaaaaggatctcaagaagatcctttgatcttttctacggggtctgacgctcagtggaacgaaaactcacgttaagggattttggtcatgagattatcaaaaaggatcttcacctagatccttttaaattaaaaatgaagttttaaatcaatctaaagtatatatgagtaaacttggtctgacagttaccaatgcttaatcagtgaggcacctatctcagcgatctgtctatttcgttcatccatagttgcctgactccccgtcgtgtagataactacgatacgggagggcttaccatctggccccagtgctgcaatgataccgcgagacccacgctcaccggctccagatttatcagcaataaaccagccagccggaagggccgagcgcagaagtggtcctgcaactttatccgcctccatccagtctattaattgttgccgggaagctagagtaagtagttcgccagttaatagtttgcgcaacgttgttgccattgctacaggcatcgtggtgtcacgctcgtcgtttggtatggcttcattcagctccggttcccaacgatcaaggcgagttacatgatcccccatgttgtgcaaaaaagcggttagctccttcggtcctccgatcgttgtcagaagtaagttggccgcagtgttatcactcatggttatggcagcactgcataattctcttactgtcatgccatccgtaagatgcttttctgtgactggtgagtactcaaccaagtcattctgagaatagtgtatgcggcgaccgagttgctcttgcccggcgtcaatacgggataataccgcgccacatagcagaactttaaaagtgctcatcattggaaaacgttcttcggggcgaaaactctcaaggatcttaccgctgttgagatccagttcgatgtaacccactcgtgcacccaactgatcttcagcatcttttactttcaccagcgtttctgggtgagcaaaaacaggaaggcaaaatgccgcaaaaaagggaataagggcgacacggaaatgttgaatactcatactcttcctttttcaatattattgaagcatttatcagggttattgtctcatgagcggatacatatttgaatgtatttagaaaaataaacaaataggggttccgcgcacatttccccgaaaagtgccacctgacgtctaagaaaccattattatcatgacattaacctataaaaataggcgtatcacgaggccctttcgtctcgcgcgtttcggtgatgacggtgaaaacctctgacacatgcagctcccggagacggtcacagcttgtctgtaagcggatgccgggagcagacaagcccgtcagggcgcgtcagcgggtgttggcgggtgtcggggctggcttaactatgcggcatcagagcagattgtactgagagtgcaccatatgcggtgtgaaataccgcacagatgcgtaaggagaaaataccgcatcaggcgccattcgccattcaggctgcgcaactgttgggaagggcgatcggtgcgggcctcttcgctattacgccagctggcgaaagggggatgtgctgcaaggcgattaagttgggtaacgccagggttttcccagtcacgacgttgtaaaacgacggccagtgccaagcttgcatgcctgcagtgcagcgtgacccggtcgtgcccctctctagagataatgagcattgcatgtctaagttataaaaaattaccacatattttttttgtcacacttgtttgaagtgcagtttatctatctttatacatatatttaaactttactctacgaataatataatctatagtactacaataatatcagtgttttagagaatcatataaatgaacagttagacatggtctaaaggacaattgagtattttgacaacaggactctacagttttatctttttagtgtgcatgtgttctcctttttttttgcaaatagcttcacctatataatacttcatccattttattagtacatccatttagggtttagggttaatggtttttatagactaatttttttagtacatctattttattctattttagcctctaaattaagaaaactaaaactctattttagtttttttatttaataatttagatataaaatagaataaaataaagtgactaaaaattaaacaaataccctttaagaaattaaaaaaactaaggaaacatttttcttgtttcgagtagataatgccagcctgttaaacgccgtcgacgagtctaacggacaccaaccagcgaaccagcagcgtcgcgtcgggccaagcgaagcagacggcacggcatctctgtcgctgcctctggacccctctcgagagttccgctccaccgttggacttgctccgctgtcggcatccagaaattgcgtggcggagcggcagacgtgagccggcacggcaggcggcctcctcctcctctcacggcacggcagctacgggggattcctttcccaccgctccttcgctttcccttcctcgcccgccgtaataaatagacaccccctccacaccctctttccccaacctcgtgttgttcggagcgcacacacacacaaccagatctcccccaaatccacccgtcggcacctccgcttcaaggtacgccgctcgtcctccccccccccccctctctaccttctctagatcggcgttccggtccatggttagggcccggtagttctacttctgttcatgtttgtgttagatccgtgtttgtgttagatccgtgctgctagcgttcgtacacggatgcgacctgtacgtcagacacgttctgattgctaacttgccagtgtttctctttggggaatcctgggatggctctagccgttccgcagacgggatcgatttcatgattttttttgtttcgttgcatagggtttggtttgcccttttcctttatttcaatatatgccgtgcacttgtttgtcgggtcatcttttcatgcttttttttgtcttggttgtgatgatgtggtctggttgggcggtcgttctagatcggagtagaattctgtttcaaactacctggtggatttattaattttggatctgtatgtgtgtgccatacatattcatagttacgaattgaagatgatggatggaaatatcgatctaggataggtatacatgttgatgcgggttttactgatgcatatacagagatgctttttgttcgcttggttgtgatgatgtggtgtggttgggcggtcgttcattcgttctagatcggagtagaatactgtttcaaactacctggtgtatttattaattttggaactgtatgtgtgtgtcatacatcttcatagttacgagtttaagatggatggaaatatcgatctaggataggtatacatgttgatgtgggttttactgatgcatatacatgatggcatatgcagcatctattcatatgctctaaccttgagtacctatctattataataaacaagtatgttttataattattttgatcttgatatacttggatgatggcatatgcagcagctatatgtggatttttttagccctgccttcatacgctatttatttgcttggtactgtttcttttgtcgatgctcaccctgttgtttggtgttacttctgcaggtcgactctagaggatccaacaatgccccagttcgacatcctctgcaagaccccccccaaggtgctcgtgaggcagttcgtggagaggttcgagaggccctccggcgagaagatcgccctctgcgccgccgagctcacctacctctgctggatgatcacccacaacggcaccgccattaagagggccaccttcatgtcatacaacaccatcatctccaactccctctccttcgacatcgtgaacaagtccctccagttcaaatacaagacccagaaggccaccatcctcgaggcctccctcaagaagctcatccccgcctgggagttcaccatcatcccctactacggccagaagcaccagtccgacatcaccgacatcgtgtcatccctccagcttcagttcgagtcctccgaggaggctgacaagggcaactcccactccaagaagatgctgaaggccctcctctccgagggcgagtccatctgggagatcaccgagaagatcctcaactccttcgagtacacctccaggttcactaagaccaagaccctctaccagttcctcttcctcgccaccttcatcaactgcggcaggttctcagacatcaagaacgtggaccccaagtccttcaagctcgtgcagaacaagtacctcggcgtgatcatccagtgcctcgtgaccgagaccaa

SEQ ID NO: 4 - DNA, 28390 bp, Artificial sequence
  PHP71539
gacccgcgaggtttctcgcttcaattgaaatcataaagaagcaattgaaaattttcgagtaaccgaccctcccgataatcttcaacataaaacaacgcacttcttccaacgggagaggcggtgttagttgcgagctaaggagataaggtatgcttaagagatcggggtcgctttctcttgccttgatggtctccttctgttcgtcgagccttgccacgccactctcatctgctgagtttgaccatgttgctcgcaagtgtgccccatcagttgcgacatctacgcttgcggcgatagctaaggtggagagtcgctttgatcctttagcgattcatgacaacacgaccggcgaaacgcttcactggcaagatcacagccaagcaacccaagtcgtcaggcaccgtctcgatgcacggcattcgctggatgttggcctcatgcaaataaactctcgaaatttttctatgctcggtctgacacctgacggtgcgctccaggcgtgcacatcattatctgccgctgcaaacatgctgaaaagtcgttatgcaggcggcgaaacgattgacgagaagcaatttgcgcttcgtcgggcgatctccgcttacaacaccggtaatttcatcggcggttttgcaaacggctacgtgcgaaaagttgaaacagctgctcaatcgctggtgcccgcgttaatcgagcctccaaaagacgatcacgaggcgctaaaatccgaagagacgtgggatgtttgggggtcatatcagcgccgctcgcaggaggatggcgctggcggtttaatcgctccgccaccgccacaccaggacaacggcaaatccgcagacgacaatcaagtcttattcgacttatactaaggaggtgcgcattgatgcgatgctttgagagataccgtttacatctaaatcgcctctcgctctcgaatgcgatgatgcgcgtgatatcgagctgcgccccaagcttgtgcggtgcaattgcatggagcatttcctcatccggacccgccgcagcgcaatctgcgggtggcggcactgaccccgccacaatggttaacaatatatgcacgtttatccttggtccgttcggccagtcactcgctgttctcggcattgtcgctatcgggatctcctggatgttcgggcgggcttcgcttgggctggttgccggcgtcgtcggcggcattgttatcatgtttggggcgagcttcctcggccaaacgctcactggcggtagttgatggctgatcgtttggaagaatcgaccctttacctcgcagccacacggcccgcattgtttcttggggtgccactgacattggcagggttattcatgatgttcgccggctttgtcatcgttatcgttcagaacccgctctacgaagtcgttctcgtgccgttatggtttgcagcccggctcatcgtggagcgagactacaatgcggcgagcgtcgtcctgctatttttgcggaccgcgggaagaagcattgatagtgcagtttgggggggcgctactgttagcccaaatccaattagggttcccccacgagggagaggaatggtgtgatgctcggcgcgagtggaacgaccgaaagatccggtgagatctatctcccttatattggccacctcagcgaccatatcgtccttcttgaagacggatcgatcatgaccattgcgagaattgatggcgttgcattcgagcttgaggaaactgaaatgcgcaatgcgcgttgtcgtgcgttcaacacgctgttgcgcaatatcgctgatgatcatgtgtcaatatatgctcacctcgtacgtcatgccgacgtgccatcatcggcgccgcgacacttccgtagtgttttcgccgctagcctgaacgaagcttttgaacagcgcgtgctctccggccaactcctccgcaatgaacacttccttacgttgattgtctacccacaggcggctttagggaaggtaaagaggaggttcaccaagctaagcggaaaaagggaaaacgatctcacgggccagatcaggaacatggaagatctttggcatgttgtcgctggctctcttaaagcgtatggcctgcatcgtcttggcatccgcgagaagcagggtgtgctcttcaccgaaattggcgaagcgctacggttgatcatgactggtcggttcacaccggttccggtcgtcagcggctcactcggcgcttcgatttataccgacagagtcatttgcggcaagcgaggactcgagatcagaacgccaaaagacagttacgttggatccatctattcgtttcgcgaataccctgcaaaaacacggccgggcatgctcaacgcgctgctatccctcgattttccacttgttctcacgcagagtttttcgttcctgactcgcccgcaagcgcacgcgaaacttagcctcaaatcgagccagatgctgagttccggcgataaagccgtgactcaaatcggcaaattatccgaggctgaggacgcacttgcgagcaacgaattcgttatgggctcacatcatttgagcctttgcgtctatgcagacgatctcaatagtcttggggacaggggcgcgcgggctcggacacgaatggcggatgcaggtgccgtggttgtccaagaaggtattggtatggaagcggcctattggtcccaattgccggggaattttaagtggcgcacacgccctggcgcaatcacttcacgcaatttcgcagggtttgtctctttcgaaaactttccagagggcgccagctcaggccactggggcaacgcgattgcccgatttcgtaccaatggcggaacgcctttcgactatatcccgcatgagcacgatgttggcatgacggcaatattcgggcctatcgggaggggtaagacgacgctcatgatgtttgttctagccatgctcgaacagagcatggtcgaccgtgcaggtacggtcgtgttctttgacaaggaccggggtggcgaattgctggttcgcgccacaggaggaacatatttggcacttcacagaggcacacccagcgggttggcgccgttgcgtggcctagaaaacacagcagcctcacacgattttctgcgcgaatggatcgtggctctcatcgagagtgatggtcggggtgggatttctccggaagagaaccgccgtctggtccgtggtatccatcgtcagctctcgtttgatccacaaatgcgttcaatcgcggggttacgtgaatttttgttgcatgggcccgccgaaggcgcaggagcgcggctccaacgctggtgccggggccatgcgcttggctgggcatttgacggcgaagttgacgaagtaaagttagatccgtcgattaccggcttcgacatgacgcatcttctcgaatacgaggaagtatgcgctcccgctgcagcatatctcctgcatcggattggagccatgatcgacggccgccgttttgtgatgagctgcgatgagtttcgcgcctatttgttaaaccctaaattttcgactgtcgtcgacaaattcctcctgaccgttcgaaaaaacaacgggatgctaatactggcaacgcagcaaccagagcatgttctggaatcgccgctaggagccagcttggttgcgcaatgtatgacgaagattttctatccatcaccaaccgcagatcgatcggcttatgtcgatggactgaaatgtaccgaaaaggaatttcaggcgatccgtgaagacatgacggtcggcagccgtaagtttcttcttaaacgagaaagtggaagcgtcatctgcgaatttgatctgcgggatatgcgtgaatatgtcgccgtgctttcggggcgtgccaacacggtgcgctttgcaactcgactacgcgaggcacaagaaggcaactcatctggctggctcagcgaattcatggcccgtcaccacgaggcagaagattgataaggtaggaaacgatgaagacgacgcaacttattgcaacagttttgacctgcagctttctatatattcagcccgcgcgggcgcagtttgttgttagcgacccggcaacggaggctgagacgctcgcgactgcgctcgcgactgcggagaatctcactcagactatagcgatggttacgatgttgacgtcggcctacggcgttactggactactgacttcgctcaaccagaaaaatcagtatccttcgacgaaggacctagacaatgaaatgttttcgccgcgaatgccaatgtcgaccacggcacgtgcgatcaccagcgatacagatcgtgcagtcgtgggtagtgatgctgaagcggacctgttgcgatcgcagatcaccggttccgcaaacagcgctggcattgcggctgacaatctggaaacgatggacaaacgcttgacggcgaatgctgatacgtctgctcagctttcccgatctcgcaatatcatgcaggcaaccgtgaccaatggtttgcttctcaagcagatccatgacgcaatgattcaaaatgtacaggcgacaagcctattaacgatgactaccgcgcaggccggccttcacgaggcggaagaggcggccgctcaacgcaaggagcatcaaaagaccgctgtcatctttggtgccctcccctaaggctgggcgatttgttcatccgcccgcatcctcgccgaatgcgagctcattttatccaacattatgcgacaaaccagtcaagttcaggtccaatcgatgaatttcacgattccggcgccgtttacggccattcatacgatcttcgatgtagccttcacgacaggcttggactcgatgcttgagactatccaggaggcggtgagtgcgccattgatcgcctgtgtcactctttggattattgttcagggtattttagtcatacgcggcgaagtcgatacccgtagcggtatcactcgggtgatcacggtcaccatcgttgttgctctaattgttgggcaggctaactaccaagactatgtggtttccatcttcgaaaagacggtcccaaactttgttcagcagtttagtgtaaccggcttgcctctgcagactgttccggcacagttggatacaatgttcgccgtgacccaggccgtttttcagaaaatcgcatccgaaatcggtccgatgaacgaccaggacatccttgctttccaaggggcacagtgggtcctttacggcacgctctggtctgccttcggagtttacgacgccgttggaattctcacgaaagtgcttctcgcgatcgggcctctgatcctcgtcggatatatttttgatcgcacgcgggacatcgcagctaagtggatcgggcaacttatcacctacggtctcttgcttctcctcttaaacctcgtggcaacgatcgtcatcctaaccgaagcgactgcgctcacccttatgcttggtgtaatcaccttcgccggtacgaccgcggccaagatcattggtctttacgaactcgatatgttttttctgacaggggatgcgctcattgtcgctttgccggcgatcgccggcaacattggaggcagttactggagcggcgcaacccaatctgccagcagcttgtaccgtcgcttcgctcaggttgagcgaggctaggtcgcgcaaaaattcgcctcaatggagaattctatgaagtattgcctgctgtgcctagttgtcgctttgagcggctgccagacaaacgacacattagcgagctgcaaaggcccgatcttcccgctgaatgtggggcgatggcagcctactccgtcagatcttcagctcggcaattcgggtggacgctatgacggggcctgaatatgccatgctagtggcgcgcgaaagccttgccgagcactataaggaagtagaagcctttcaaaccgcgcgagcgaaatcggcgcgacgtctctccaaactcattgcagctgtcgcagctatcgcgattttgggaaatgttgctcaagcgttcgctatagccacaatggtgccgttgagcaggcttgtgcccgtatatctatggatacggccggacggcaccgttgacagcgaggtgtctgtctcgcgattgcctgcaactcaagaggaggccgtcgttaacgcctcattgtgggagtacgttcgcctgcgcgagagttatgatgccgacaccgctcagtacgcctacgacctggtatcgaacttcagtgccccaacagtgcgccaggattaccagcaattcttcaactatcccaatcccagttcgcctcaagtcattcttggcaaacgcggcagggtggaggtcgagcacatcgcttcaaatgatgtaactccaagcacgcagcaaattcgctataaaaggaccctcgtcgttgacggcaaaatgcctgtggtgagtacgtggaccgcgacagttcgctacgaaaaggtgaccagcttgcccggcagattgagactaaccaacccggcaggtctggttgtcacctcctatcagacatcggaagataccgtttcaaacgtaggccacagcgaaccatgatcagaaaagcacttttcattttagcatgtttatttgccgctgcgactggtgcggaggctgaagacactccaatggcgggcaagctagatccgcgcatgcgttatttggcttacaatcccgatcaagtggtgcgcctctcgacggcggttggagctactttggtcgtaacattcgccacgaacgaaacggtgacagcggttgccgtttcaaatagcaaagatctagcagccctaccgcggggaaattatctatttttcaaggcaagccaggtcctcacgcctcagccagtaatcgtgctaaccgcaagcgactccgggatgcgccgttatgttttcagtataagttccaagactctgtcccacctcgataaagagcagcccgatctctattacagcgtccaattcgcctaccccgccgacgatgcggcggctcggcgaagggaggcacaacagaaggctgttgtggacagactacacgcggaagcacaatatcaacggaaagctgagaatttattggatcagcctgtcacagcccttggtgcggcggacagtaattggcactacgtcgcccaaggcgatcgttcgctgttgccactcgaagtcttcgacaatggatttacgacggtattccactttccgggcaatgtacgcataccctccatctacaccatcaatcctgatggcaaggaagctgttgccaactattcagttaaagggagcgatgtcgagatttcttcggtttcccgaggttggcgtctgagggatggccacacagtactatgtatctggaacaccgcttacgatcccgttggccaaaggccgcaaacgggcacggtgaggcccgatgtgaaacgcgtcctgaagggggcgaagggatgaataacgatagtcagcaagcggcacatgaggttgatgcatctggatccctggtctccgacaaacatcgccggcgtctttcggggtctcagaaattgatcgtcggaggtgtcgttctcgcgttatcattaagcctcatttggctaggtgggcgccaaaagaaggtgaatgagaacgcatcgccgtcaactttgatcgcaacaaacaccaagccatttcatccagctccgattgaggtgccgccggatcctccagcggttcaagaggctgttcagcctgctgctcctctaccgccgaggggcgaaccggagcggcatgagccacggccggaagaaacaccgatttttgcatatagcagcggcgatcaaggggtcagcaaacgcgccattcagggcgacacgggccgaagacaagaaggcaagcgtgacgacaactccttgccgaatggcgaagtgtccggcgagaacgatttgtcgatacgtatgaaacccaccgagctgcagcccagcagcgccacgctcttgccgcaccccgattttatggtaacgcaagggacaataattccgtgcatcttgcaaaccgcaatcgacacaaatttggcaggctatgtaaagtgtgtcttgcctcaggatattcgtggaacaacgaacaatatcgtgcttcttgatcgtggcaccaccgttgttggcgaaatacagcgtggcttgcaacagggagatgggcgcgtttttgtgttgtgggatcgcgccgagacacctgaccatgcgatgatctcgttaacatcgccaagcgcggacgaactcggtcgctcaggattgccgggctcggtcgacagccacttctggcagcgttttagcggagctatgctcttgagtgttgttcaaggcgccttccaggcagctagcacctacgccggcagctcgggtggcgggatgagcttcaacagctttcaaaataacggtgagcagacaactgagacagcccttaaggcaaccatcaacataccgccaaccctgaagaagaatcagggtgacaccgtttccattttcgtagcacgggacctcgatttctttggtgtttaccagctccgcctgactggcggcgccacgcgggggaggaaccgccgctcttaatgaattcaaatttccgcttagagataggatacattgtaaatggaagtggatccgcaactacgctttcttctgaagccgattttggaatggctcgatgacccgaagactgaagaaattgcgatcaatcgacctggagaggcatttgtgcgccaagccggcatttttaccaagatgcctttgcccgtctcttatgatgatcttgaagatatcgctattttagcgggcgcgctgagaaagcaggatgtcggaccacgtaaccccctctgcgccactgaacttcctggtggtgaacgactacaaatctgtctgccgccgaccgttccctcgggcaccgtcagcttgaccattcgacggccaagctcgcgtgtttctggtcttaaagaagtctcctcccgttatgatgcttcgaggtggaaccagtggcagacacgaaggaaacgccaaaatcaggatgatgaagctatccttcagcattttgacaacggggatttggaagcgtttctgcacgcatgcgtcgtcagccgactgacgatgttgctatgtggccctaccggaagcggcaagacaacaatgagcaagaccttgatcagcgccatccccccccaggaaaggctaatcaccatagaagatacgctcgaactcgtcattccacacgataatcatgttagactactctactccaagaacggtgctgggctgggtgctgtgagcgccgagcacttgctccaagcaagtctgcgtatgcggccggaccggatattgcttggcgagatgcgcgacgatgcagcatgggcttatctgagtgaagtcgtctcgggacatccgggatcgatttcaacaatacacggcgcgaatccaatccaaggattcaagaaactgttttcccttgtcaaaagtagcgcccaaggtgctagcttggaagatcgcacactgattgacatgctctctacggcgatcgatgtcatcattccattccgtgcctatgaggacgtttatgaagtaggcgagatctggctcgcggcggacgcacgacgccggggcgagaccataggcgatctccttaatcaatagtagctgtaacctcgaagcgtttcacttgtaacaacgattgagaacttttgtcataaaattgaaatacttggttcgcattttcgtcatccgcggtcagccgcaattctgacgaactgcccatttagctggagatgattgtacatccttcacgtgaaaatttctcaagcgctgtgaacaagggttcagattttagattgagaggtgagccgttgaaacacgttcttcttatcgatgacgatgtcgctatgcggcatcttattatcgaataccttacgatccacgccttcaaagtgaccgcggtagccgacagcacccagttcactagagtactctcttccgcgacggtcgatgtcgtggttgttgatctaaatttaggtcgtgaagatgggcttgagatcgttcgaaatctggcggcaaagtctgatattccaatcataattatcagtggcgaccgccttgaggagacggataaagttgttgcactcgagctaggagcaagtgattttatcgctaagccgtttagtacgagagagtttcttgcacgcattcgggttgccttgcgcgtgcgccccaacgttgtccgctccaaagaccgacggtctttttgttttactgactggacacttaatctcaggcaacgtcgcttgatgtccgaagctggcggtgaggtgaaacttacggcaggtgagttcaatcttctcctcgcgtttttagagaaaccccgcgacgttctatcgcgcgagcaacttctcattgccagtcgagtacgcgacgaggaggtttacgacaggagtatagatgttctcattttgcggctgcgccgcaaacttgaggcggatccgtcaagccctcaactgataaaaacagcaagaggtgccggttatttctttgacgcggacgtgcaggtttcgcacggggggacgatggcagcctgagccaattgcatttgattaatttaggtgactgaggacgcggccagcggcctcaaacctacactcaatatttggtgaggggttccgataggtccctcttcaccaattgctcgatggcttctctccagcaaagaatgacgcgagcgcggcggtagccagcttgtggccgaaagctcgagcggtctccaaccccaacggatcaaaatgacttcgagcgacctcgagcaacgcaaccgggaacatgcgtgaggtctgaacgagaacggatttttctgtagttgaagggatcggataacttttcggggccacgcgaaatgatccatctgccagcatgctttcgaaatcgtccaacgcgcgccttaaaatcatttgtagcgacttcgagggactgtattgccgaacgaggttgtcatatgttttcgacacttgaggcgcgggcggtcgcgctgaaagaaaaacctggagctttttcggggacggaggtggactaagggcatccacagttagcttaagttgtcgatcgggactgtaaatgtgatcggcgacgagaggctcacgttgctggtctttctcgtcggctttttcaggcaagtgctggaggtccagcttctggggaacaagtgtcgggttgggatggtggatctcgggtcgagcaccagcaagccgccgtgcttcgccgaccgacaatgcgggcttgcgaattgccatcttcaagcctccaagattttgctgatcagtttcgaaatgaccacgacttcctccatcgcaatccgaagattcctctctatgaggcgcatcgtcggatcagttcccgtgtttagtaatgtaagatgcaacatgccgcgttctttcatcgcggcaaatgcatctctttcatgcatgggagacggtacaactggaaggctctctagcgtctctgacatcctgcgttgcgatgttgtcaatcggccgaccgggacgcgttggcgcaaaacagctgtaggaattgccaaattttcactcaacagcagctcgatgacgtagcggtaggtagatagtgcctcatcgatgtcgagcggcgttagcatggtggggatcagaagcaggtttgagctagcgatgattgtgttgttgagctcgctcgagccgccacgcgtatcggccaacgcataatcaaatccttcgagctcggcattttcataggctgcttcaagaaggggcatttcgtcggcggaatagacttcacagcgaggatcccaggtactgctttgtaaggcgttttctctccatcgcgtcagaggccggttttcgtcggcatcaaagagggccactcgtttaccgtcatttgccaaagcagcgcaaaggcccatgagtgcggtggttttgccagcaccccctttgaaagaacaaaacgtcaaaagttgcatattctgatcccgcctatcctgtgaaaccggagtgcatttgtatttttgttcgtataaatgtttttgtgattatcgatgagtaaaagcgttgttacactatttttatttcacattcgttataagacaattgcaaatgtagcaagtatattcagtattgactgtaaatgtactgttgatttcatattgagcagggctagacttccatccgtctacccgggcacatttcgtgctggagtatccagaccttccgctttctttggaggaagctatgtcaaaacacaccagagccacgtcgagtgagactaccatcaaccagcatcgatccctgaaagttgaagggttcaaggtcgtgagtgcccgtctgcgatcggccgagtatgaaaccttttcctatcaagcgcgcctgctgggactttcggatagtatggcaattcgcgttgcggtgcgccgcatcgggggctttctcgaaatagatgcagacacacgagaaaagatggaagccatacttcagtccatcggaatactctcaagcaatgtatccatgcttctatctgcctacgccgaagaccctcgatcggatctggaggctgtgcgagatgaacgtattgcttttggcgaggctttcgccgccctcgatggactactgcgctccattttgtccgtatcccggcgacggatcgacggtcgctcgttactgaaaggtgccttgtagcacttgaccacgcacctgacgggagaaaattggatgcccgatcgcgctcaagtaatcattcgcattgtgccaggaggtggaaccaagacccttcagcagataatcaatcagctggagtacctgtcccgaaagggaaagctggaactgcagcgttcagcccggcatctcgatattcccgttccgccggatcaaatccgtgagcttgcccaaagctgggttacggaggccgggatttatgacgaaagtcagtcagacgatgacaggcaacaagacttaacaacacacattattgtaagcttccccgcaggtaccgaccaaaccgcagcttatgaagcaagccgggaatgggcagccgagatgtttgggtcaggatacgggggtggccgctataactatctgacagcctaccacgtcgaccgcgatcatccacatttacatgtcgtggtcaatcgtcgggaacttctggggcaggggtggctgaaaatatccaggcgccatccccagctgaattatgacggcttacggaaaaagatggcagagatttcacttcgtcacggcatagtcctggatgcgacttcgcgagcagaaaggggaatagcagagcgaccaatcacatatgctgaatatcgacgccttgagcggatgcaggctcaaaagattcaattcgaagatacagattttgatgagacctcgcctgaggaagatcgtcgggacctcagtcaatcgttcgatccatttcgatcggacgcatctgccggcgaaccggaccgtgcaacccgacatgacaaacaaccgcttgaaccgcacgcccgtttccaggagcccgccggctccagcatcaaagccgacgcacggatccgcgtaccattggagagcgagcggggtgcccaaccatccgcgtccaaaatccctgtaactgggcatttcgggattgagacttcgtatgtcgctgaagccagcgtgcccaaacaaagcggcaattccgatacttctcgcccggtgactgacgttgccatgcacacagtcgagcgccagcagcgatcaaaacgacgtcatgacgaggaggcaggtccgagcggagcaaaccgtaaaagattgaaggccgcgcaagttgattccgaggcaaatgtcggtgagcccgacggtcgcgatgacagcaacaaggcggctgatccggtgtctgcttccatccgtaccgagcaaccggaagcttctccaacgtgtccgcgtgaccgtcacgatggagaattgggagaacgcaaacgtgcaagaggtaatcgtcgcgacgatgggcgcggggggacctagactagtagacaggaaggaccgaataatggcaaatggtcagttcacgatacgctctgctcgcccggcctccgtcggactgacaggcgaacggcgtggagccgcatccgcctctagctctgcactgtccaatgttcaaagagatgttagggataggctgattccaactagctcaccaagattaccaaatgcagccatattgcgtgattcctcgggaagagcgtcgactggtctgcggtacatggcggctactcttcattggtctgcgatcgcgccattatcgctaataaacagcaacgacctggctccggccgcttatgactttgagacgcgaaataacgcaagaaatgtgactgccaaagtcggcagggcagtccctgttcccaagcaaggcgggctcggcaaaacgctcgcacccgtaccccttagtacacgtatatcaagggtcaattccgaccgaagactgcccgctgacgcagaagaccgccctgaaacgcgcgacccccagaaaggacgtggcagtcatggtgcgacgccaaccttacatgaaaagattggaaccgcgtttgctcgaagattgcgaaagcatacgtactatattgtttgcagttgctgccagacccggagcgcgttgacgatgggtgcaaagatttcggtgaagtcatgaactccagcaagacttcgccccagcgtatgaccctgagcatcgtatgttcgctggcagccggtttttgtgcggccagctgctatgtaacgttccgccggggcttcaacggcgaagcgatgatgacgttcgacgttttcgctttttggtatgagaccccgctttacttgggttatgccagcaccgtcttctggcgtggtttatctgttgtcatctttacctcgctgatcgttctttcaagtcagctcatcatatcgctgcgcaatcagaagcatcatgggacagctcgttgggcagaaattggcgaaatgcggcatgctggttatctgcagcgttacagtcgcatcaaggggccgatctttggaaagacatgtggtcccctttggttcggcagttatttgaccaatggcgaacagccacacagtcttgtcgtcgcgccaacgcgtgctggcaaaggcgtcggcatcgtcattccaacgctgttgaccttcaagggctcggtaatcgcccttgacgtcaagggagaattgtttgaactgacgtccagagcacgcaaagcgagcggcgacgcagttttcaagttctcccccctagatcctgagcggaagactcattgttacaatccggtcctggatattgccgcacttccgcccgaacgccagttcactgaaacacgccgtctagctgcgaaccttattacggctaagggaaagggagcagaaggctttattgacggcgcacgtgacctgttcgtcgcgggaatccttacctgcattgagcgtggcacaccaacgattggcgcggtatatgacctatttgcgcagcctggcgaaaagtataagctttttgcgcaactcgcggaggaaagcctaaacaaagaggctcagcgtatcttcgataatatggcgggcaacgacacgaaaattctgacatcgtacacctctgtgctgggcgacggtggactgaacctgtgggctgatccgcttatcaaagcagcgacaagccggtcagacttttccgtttacgatctccggaggaagaagacctgcatttatctttgtgtcagtcccaacgatctggaggtcttggcaccacttatgcgcctgatgtttcagcagctcgtgtcaatcttgcagagatcgctgccaggtgaagacgagtgccatgaagttttatttctcctcgacgaattcaaacacctgggcaagcttgaggccatagagaccgcgatcacaaccatcgccggttacagaggccgctttatgtttattattcaaagtctttcggccttgtcgggcacatacgatgacgcaggaaaacaaaactttctgagcaatactggcgtacaagtatttatggccacggctgatgacgaaactccaacctacatctcaaaagctatcggcgaatatacgtttaaagcgcgttcgacctcttacagtcaagccagaatgttcgaccacaacatccagatttctgatcaaggtgcagcccttttgcgccccgaacaagtgcgcctgctagacgatcagagtgaaatcgttctcatcaaagggcgacctccactcaaattacgaaaggtgcagtattattccgatcgtacgctgaaaggccttttcgaacgccagatgggctctctgcctgagcccgcacccttgatgctttccgactatagcaacgatcaagttcaataccacttggctccgatagcaaattttaatgaggatgctgcaccgcaaaacagaactgtggccgaggaccatggaagtgttaaagtcggtgctgatatccctgaacgcgtgatgggaataaatggtgacgaggaacaagccgatgcgggcgagataccgccggaatcggttgtgcctccagaattgacgctcgctctgaccgctcaacagcaattgttggaccagattattgcacttcagcaaagatcgaggtccgcaccggcatagcctgcgaaatgatcttaatggtgcaattcgtttcaggcggcatgttgcggttcaacaaagtgtacgccagatcccaattggccctttacgaggtgtcggtatgacaggaaagtcgaaagttcacataagaggttcggctgacgcgcttcctgacgttcctggcggaagtactaccgccccttttttaaccgaaccttctcgggatcaggttgatgcctcgtttgaggtccaaaccgactacagccagtctacttccgtgtcgtttacctatgatggtgttggacttggtcctgccgagcgtgcggcttacgagaactggtgcgaaccgggccggcccacttggaaagatcttataatcaaggcacgtgtcgatccgattgacgatgtgacctggctccgagatttagaagaggacaccccctcaaccttcagatacgaagggatgcctctgggcatcggggaacgacaggcctacgaaaattggcaagaggacgctcagccgacatgggaagaccttgttgtcagcgcacgcttgacggaacttggccgtccacacgggattaccggcgagtatacatccctcgcaggatcgaagaatacaagttcaatttcattgaagcgaaagcggagcaacttaattgatgatgagaattcatccggatcgttttcatatgacgggatgaagctcggggaagccgagcgttctgcatatggtgactgggccgaggcggagccacccacgtggaaagatttggtattgagggcacgcgtttcctcgatcaatgactctgcttggctttttgattcacaaacatcttcatcatcatttgaatacaacggtgttcccttgggcgagccggaacggcaggctctcagacaatggcaaggagacgctcagcctacctgggaagatctcgttgttaacgcgcgtatggcagaactttgccatgctggttggattgaaggtcaaaaaggttgctttgaagagcgcggggaggctctgcccgcgtcggaacgcggttcgcaacgccccattggtcaacggacagattcctccgattcttttgtgtatgatggcacaaggctcggagcacctgagcgaactgcttatgaacgctggagtaagagggaacgcccgacttgggaagatctcatcttagatgcacaccaggccaggactgaaagtgacgctgttacgacccaagcgattggtcagtcgtcctcaccggttttcttatatgaaggaaagtcgctcggagacagggaacgaaaggcttacgaaaaatggcggcagccagcccaaccgcgatggcaaaatcttgtagtgaacgctcgtctggcagaaatcgatccctcagcctggattgccgatgagcgcgatccgcttgatgatagcgacgcgcttggtcgcccgtcgtacacaagcttgacggatagatcagacgtccctttagacgatcaatcaatctatcgtcgttccgacctagtaagggagcaggtgccagaatcgtctcaaaggcaattcgcagcatgttcagaatctgaaacgaggcctgtgcaatggtttactgcttctgggtcagatgcaaacaatacggaaaatatcaccgccagcgatcccgtcgatcgcacgggtggagttaagcggctaggctccaaaagcgacagaaccgttacagcttctatccatgacgtgaattccagcacaaggcgactgttgcttaacgaatttggatcggaggctccgcgcccttcgccagaaaagactgttcgcttaagaagcgacaatattggcacctatgggagccggaaaaatgaacgagcgcggctcgcgaccgaaaccggtgcgtatgagtcggagcatattttcgggttcaaggctgtccacgatactgcgagagcgacgaaagagggccggcgtctcgaaaggcccatgcccgcctaccttgaggataaggggcttcatcgccaacatattggcaccgggagaggacggaccaaacttgtcgggcgcggatggccggatgacacaagctatcgctcggatcaaagggcaactctgtcggaccccgttgcgcgctcggaaggcgcgacggcctcaaatgggtatcaattgaaccaattgggttacgcgcaccaactcgctagcgatggcctgcaaagtgaatcgcccgatggtgttgccttgccaattcaagtggcaacaacgagctacaactatacagtgagccgcgatcctgtccttgttccgccggataaaaacgaagcccctcaattgctgcatcttggtccccgtggtcaaaccgaagctgttcttgcccgcgaaacagcattgactggaaaatggccgactctcgagcgtgagcagcaagtgtatcgcgagtttttggccttatatgacgtaaaaaaagatcttgaggccaaatcagtcggcgtaagacggaaaaaaaaagaagttatttctgcgttagaccgaactgcgcgcttgataagcacgtcgccttcgaaagctcgatccaaagcagagactgaaaaagccattgatgagctcgatgatcgacgagtttatgatccgcgtgatcgagctcaagacaaagcgtttaaacgctgataagtcgccaatatagtgatcatttgcagtattcgcatcgatcgctggttgatattctgccgctggtcgaccggctgctcgtcgccaaaaatgctcacagggatacgatggcctcggtcaggccgcgtgcgtcctgtctttccagttcctccctttcagctcgattgtggcatcatttattgcctgctcattgcagttgaaacgcgatatccgtttcaagacccgggtatggatggtactttggagatatgagcacttgccagacttcccggtcggagacttaaaaattccgataagaggttacggacgacggaccttataagtggatcgtctagtggtggcgccgatcaaaacagttccgcccccggctttgctcaaagtagcaaagcagctttatctcgggttgcggaggattttctagaaaaccgcaattttgcaggagagaacatatggccatcatcaagccgcatgtgaacaaaaataggacaacctcgccgatagagagaccggagtctctcatagaggaaatgagcggcagtcatccgccgagtggttttaccaacctggatctcgctatgatcgagctggaggactttgtccatcggtgcccgctcccagaagacaatcttgctggtcagaaggagtgagacgatggatccgtctagcaatgagaatgtctatgtgggtcgcggtcacaacatcgaaaatgatgatgacactgaccccaggcgttggaagaaggcgaatatcagttccaacaccatctccgatattcagatgacgaatggcgaagacgtacaatcagggagccctacccgaacggaagttgtaagcccacgtctggattatggatcggtcgactcctcctccagcctttattctggcagcgagcacggaaatcaagctgagattcaaaaagagctgtccgtcttgttctcgaacatgtctttgccaggcaacgatcggcgcccggacgaatacattctcgtgcatcaaacgggacaagatgcttttactggtattgccaaaggcaacctcgaccaaatgcccaccaaggcggaatttaacgcgtgctgccgtctctacagggacggagccggtaattactacccgccacctctcgcattcgacaagattagcgttccagagcaactggaggaaaaatgggggatgatggaggcgaaggaacgtaacaaactgcggtttcagtacaagttggacgtatggaatcatgcgcacgctgatatggggatcacgggcacagagatcttttatcaaacagataagaacataaagctcgaccggaattataaactaagacctgaagaccgatacgtacaaacagaaaaatacgggcgccgggaaattcaaaagcgatatcaacacgaactccaggctggttcgctgctgcccgatattatgatcaaaactccccaaaatgacatccacttcgtgtacaggtttgccggcgacaattacgccaacaaacagttcagcgagtttgaacacaccgtcaagcgcaggtatggcgacgagactgagatcaaattgaagtcaaagtcaggcattatgcatgactcgaaatatctggaatcctgggaacggggcagtgcggatattcgcttcgcggaattcgttggggaaaatagagctcacaatcggcagtttccaactgcgacagtaaatatgggacagcagccagacgggcagggcggtttgacccgcgaccgtcatgtgagcgttgacttcctaatgcaaagcgcacccaattcgccttgggcgcaagctttgaaaaagggagaactgtgggatcgcgttcagttgcttgctcgcgacggcaaccgctatctgtcgccgcccagattggaatattctgaccctgcacatttcaccgagttgatgaaccgggttggtttacccgcatcgatgggtcggcaaagccatgcggctagtatcaaattcgaaaagtttgacgcgcaggcagcggttattgtcttaaatggcccagagttacgtgacattcatgacttgtctcctgaaaaactgcaaaatttgtccaccaaagatgtcatcgtcgccgatcgcaatgagaatggtcagagaactggcacgtacaccagcgtcgcggaatatgagcgcttgcagttaaggctgccacccgatgcagcgggggtgcttggtgaagcaactgacaaatattcacgtgatttcgttcggccagagccggcgtcgcgtccaatcagtgacagccgcaggatatacgaaagtcgaccgcgtagccaaagcgtcaacagcttttgacgttcctgctgccgcgtcaacgaggaagctcgtttgacccgggtttgccaatgaaagggctcaatcatggtgaacactacaaagaaaagttttgcgaagtcgcttacggcagatatgcgccgttctgctcagcgcgttgtcgagcaaatgcgaaaagcattgattaccgaagaagaggcgctcaagcggcaagccagactggagagtcccgataggaagcgaaagtatgctgctgatatggcgatagtcgacaaactcgacgtagggtttcgaggcgaaataggctataaaattcttggaaataaccggcttcgagtagacaaccataaagaattaacgcgtgagcacggtagacttcgcaaaaccaaaacggttctgaagcgtaacccggtgacgcaggaagtctatttgggtttatatgaaaggaagtcctggttaagtgtcagcagccatttgtatgctgcggacggcacactccgcatgaagcacgtgaaatacaaagacggacgttttgaggaaaaatgggagcgcgacgaaaatggcgacctgatccgcacaaggtacgccaaccgtggcaggctctttcaacctgtatccgagaaaatgggcgcgccgtatcggagcggccctgacgaccggctctatcgcgatctaacccgtcgaaacggtttcagacgggagacattcgaacgggacgatcacggaaacctcgagcgtatcggcagcaaccatgtcggcttttccaagatttcagtgaaggcacccaatcgtcaaacctcccagacgaagattcaaaaacttggtggcgctttcaacaaatcttttaggtcccttctggacaaggagggcaatgaaatgggccgcgatattttgagccatcgacggctctataacaagcggtctgctgtctacgatgaagctaccggacaattgaagagtgccaagcataccttcggcaagatctacaggagcgaaaccgaatatctcagcgcgggcctcaagaaggtttcaaaaaagatactcggggtgacggtctaccggaaatttgcggcgctcagcgagcgagaatccgaggctgagagactgcgtagttttgaatccggtgcgcatcgccagatctggcaggagcgggcagcgattcccggttcgcccctcccggagactgatgacattcatttcgcacagcagtcgcacctagccaaagccaaccctgatcacgtcgaagctgacgtcacgcgtgtgacagatcaacatgttgatgttgctggacaaacatcatcgtctccccaacggaacttggaaggatggttagattctcaatcacgatacaagccagcaaacatgctgttgtcaaatccagaccttcaagcgaacggacctcgcccatacgaagggttagctcatctcaccctccggcgcgataatgaatctgacgggcacaaggagaatgatcagcggctgcgacatttctcccagccagagccgttggtgttaccgcatcccgggtcgccggaaataactaaggtgtttggctcgcggggagagccggcacacccgagtggaaatctgcacacggcggttggagaaacggcttgcgaaggaccggtgatgtcttcatcctcggacaatcatcagccagctccaggacagcaagaacttttaagtttccttcataatgcgccagccccagtttctgtggcaatacatgatgatcaagagcgacttgcgggggaggcgcccggcggctctttcagaggtagctcagggcgaacgagttcaatgtcggagagtatcttcgacgaagatgtacaagggcatttggtacgggattattcgatcaatactactaacgggtttattgacccgcaatcgttgttcggtgaaccggacttatcgagaggtccaaaatcggggccagaaattccatcggaagattaccatttgtcagcttcggaacaggaaaatttgctgaatcaattgcttagtgtgccactgccggttccttcaccgaagcccgaatgcgcgaggtctatgattttcgaaggttcacgttcaagagagcgttccacctccagagggttctaaggtggaacgcgtctaggcttgcctatcatcaccacctcatgatggtcgcggagaccttcgaagagatatccgacatcattggagaagctgggccggaaactagtgtacctcgcgaatgcatctagatccaatccaatatgcatggcatgccgaatccatgtgggagtttattcttgacacagatatttatgatataataactgagtaagcttaacataaggaggaaaaacatatgttacgcagcagcaacgatgttacgcagcagggcagtcgccctaaaacaaagttaggtggctcaagtatgggcatcattcgcacatgtaggctcggccctgaccaagtcaaatccatgcgggctgctcttgatcttttcggtcgtgagttcggagacgtagccacctactcccaacatcagccggactccgattacctcgggaacttgctccgtagtaagacattcatcgcgcttgctgccttcgaccaagaagcggttgttggcgctctcgcggcttacgttctgcccaagtttgagcagccgcgtagtgagatctatatctatgatctcgcagtctccggcgagcaccggaggcagggcattgccaccgcgctcatcaatctcctcaagcatgaggccaacgcgcttggtgcttatgtgatctacgtgcaagcagattacggtgacgatcccgcagtggctctctatacaaagttgggcatacgggaagaagtgatgcactttgatatcgacccaagtaccgccacctaataatgtctaacaattcgttcaagccgacgccgcttcgcggcgcggcttaactcaagcgttagatgcactatacgtaccaatccaaatcggatccccctgcagggctgagataggtgcctcactgattaagcattggtaactgtcagaccaagtttactcatatatactttagattgatttaaaacttcatttttaatttaaaaggatctaggtgaagatcctttttgataatctcatgaccaaaatcccttaacgtgagttttcgttccactgagcgtcagaccccgtagaaaagatcaaaggatcttcttgagatcctttttttctgcgcgtaatctgctgcttgcaaacaaaaaaaccaccgctaccagcggtggtttgtttgccggatcaagagctaccaactctttttccgaaggtaactggcttcagcagagcgcagataccaaatactgtccttctagtgtagccgtagttaggccaccacttcaagaactctgtagcaccgcctacatacctcgctctgctaatcctgttaccagtggctgctgccagtggcgataagtcgtgtcttaccgggttggactcaagacgatagttaccggataaggcgcagcggtcgggctgaacggggggttcgtgcacacagcccagcttggagcgaacgacctacaccgaactgagatacctacagcgtgagctatgagaaagcgccacgcttcccgaagggagaaaggcggacaggtatccggtaagcggcagggtcggaacaggagagcgcacgagggagcttccagggggaaacgcctggtatctttatagtcctgtcgggtttcgccacctctgacttgagcgtcgatttttgtgatgctcgtcaggggggcggagcctatggaaaaacgccagcaacgcggcctttttacggttcctggccttttgctggccttttgctcacatgttctttcctgcgttatcccctgattctgtggataaccgtattaccgcctttgagtgagctgataccgctcgccgcagccgaacgaccgagcgcagcgagtcagtgagcgaggaagcggaagagcgcctgatgcggtattttctccttacgcatctgtgcggtatttcacaccgcatatggtgcactctcagtacaatctgctctgatgccgcatagttaagccagtatacactccgctatcgctacgtgactgggtcatggctgcgccccgacacccgccaacacccgctgacgcgccctgacgggcttgtctgctcccggcatccgcttacagacaagctgtgaccgtctccgggagctgcatgtgtcagaggttttcaccgtcatcaccgaaacgcgcgaggcagcagatctatcgatggtacctatctgcagacggaagggattcctgttaattaaaacagcttgcgtcatgcggtcgctgcgtatatgatgcgatgagtaaataaacaaatacgcaaggggaacgcatgaaggttatcgctgtacttaaccagaaaggcgggtcaggcaagacgaccatcgcaacccatctagcccgcgccctgcaactcgccggggccgatgttctgttagtcgattccgatccccagggcagtgcccgcgattgggcggccgtgcgggaagatcaaccgctaaccgttgtcggcatcgaccgcccgacgattgaccgcgacgtgaaggccatcggccggcgcgacttcgtagtgatcgacggagcgccccaggcggcggacttggctgtgtccgcgatcaaggcagccgacttcgtgctgattccggtgcagccaagcccttacgacatatgggccaccgccgacctggtggagctggttaagcagcgcattgaggtcacggatggaaggctacaagcggcctttgtcgtgtcgcgggcgatcaaaggcacgcgcatcggcggtgaggttgccgaggcgctggccgggtacgagctgcccattcttgagtcccgtatcacgcagcgcgtgagctacccaggcactgccgccgccggcacaaccgttcttgaatcagaacccgagggcgacgctgcccgcgaggtccaggcgctggccgctgaaattaaatcaaaactcatttgagttaatgaggtaaagagaaaatgagcaaaagcacaaacacgctaagtgccggccgtccgagcgcacgcagcagcaaggctgcaacgttggccagcctcgcagacacgccagccatgaagcgggtcaactttcagttgccggcggaggatcacaccaagctgaagatgtacgcggtacgccaaggcaagaccattaccgagctgctatctgaatacatcgcgcagctaccagagtaaatgagcaaatgaataaatgagtagatgaattttagcggctaaaggaggcggcatggaaaatcaagaacaaccaggcaccgacgccgtggaatgccccatgtgtggaggaacgggcggttggccaggcgtaagcggctgggttgcctgccggccctgcaatggcactggaacccccaagcccgaggaatcggcgtgagcggtcgcaaaccatccggcccggtacaaatcggcgcggcgctgggtgatgacctggtggagaagttgaaggcagcgcaggccgcccagcggcaacgcatcgaggcagaagcacgccccggtgaatcgtggcaagcagccgctgatcgaatccgcaaagaatcccggcaaccgccggcagccggtgcgccgtcgattaggaagccgcccaagggcgacgagcaaccagattttttcgttccgatgctctatgacgtgggcacccgcgatagtcgcagcatcatggacgtggccgttttccgtctgtcgaagcgtgaccgacgagctggcgaggtgatccgctacgagcttccagacgggcacgtagaggtttccgcagggccggcaggcatggccagtgtgtgggattacgacctggtactgatggcggtttcccatctaaccgaatccatgaaccgataccgggaagggaagggagacaagcccggccgcgtgttccgtccacacgttgcggacgtactcaagttctgccggcgagccgatggcggaaagcagaaagacgacctggtagaaacctgcattcggttaaacaccacgcacgttgccatgcagcgtacgaagaaggccaagaacggccgcctggtgacggtatccgagggtgaagccttgattagccgctacaagatcgtaaagagcgaaaccgggcggccggagtacatcgagatcgagctagctgattggatgtaccgcgagatcacagaaggcaagaacccggacgtgctgacggttcaccccgattactttttgatcgatcccggcatcggccgttttctctaccgcctggcacgccgcgccgcaggcaaggcagaagccagatggttgttcaagacgatctacgaacgcagtggcagcgccggagagttcaagaagttctgtttcaccgtgcgcaagctgatcgggtcaaatgacctgccggagtacgatttgaaggaggaggcggggcaggctggcccgatcctagtcatgcgctaccgcaacctgatcgagggcgaagcatccgccggttcctaatgtacggagcagatgctagggcaaattgccctagcaggggaaaaaggtcgaaaaggtctctttcctgtggatagcacgtacattgggaacccaaagccgtacattgggaaccggaacccgtacattgggaacccaaagccgtacattgggaaccggtcacacatgtaagtgactgatataaaagagaaaaaaggcgatttttccgcctaaaactctttaaaacttattaaaactcttaaaacccgcctggcctgtgcataactgtctggccagcgcacagccgaagagctgcaaaaagcgcctacccttcggtcgctgcgctccctacgccccgccgcttcgcgtcggcctatgcatataattgtggtttcaaaatcggctccgtcgatactatgttatacgccaactctgaaaacaactttgaaaaagctgttttctggtattt

SEQ ID NO: 5 - DNA, 16544 bp, Artificial sequence
  PHP81855
gtttacccgccaatatatcctgtcaaacactgcggccgcacttgaccgcggatggagccggagctgtggtgaggccatcgacgggaggtgggggagaacacagtctcagtgttctttgtgagtccgcaaggtttttagcttttctgtattaattaaggttgctgttggctgtagaatacggtcgtggaagagctgtatcggtagctactacgtaagctattatatactggaagtctggagctcgtcgatctccggtcgtcttcctccatttctcctcgtcttgctttgactgctgctaccatttgcttctgttttctgatgaagcatgccatgtcggccaccagtgtttgtgtggtttttgcagggaatggctttcaagtgctgtgattgaatggccctcgtcgtcctcggctgagctcacatggacgcgtcatgtgagtgagatatatgatcatatgatgagtggggttcgggtgagtgcgtacttgaagtaggatcccgctttcactcattcattcattggcctttaaaccgggaaattttcgcgaggagatggagggaagcaagcagggtgacgagtgcagagtgccgcgagcgctttgtcaaaaggcaccgccgtaggcaaaaaaatcaatggccctgactgactcgatggtagtactactgtagagactagagagggttgctccccatatcttcgtgtgacttttactccagcattgcatttccgtcattgagacgttaattaatagcagctttcgggacagatgactgtggccatgtttcgtcacggccgcttcgtgccagctgggggtactatagtactgtgattttgttagtaaaaactttcattaggccaccattgacgaccgggccttcgcttttgctgcgctaattaaccatttcccggcgaccgaagggaacatgaacatgccccgacacatgagggcatgaggactagtgttctccctgtcgttcgttgacttgactagtgatagtttaaacgctcttcaactggaagagcggttactaccggttcactagctagctgctaatcgagctagttaccctatgaggtgacatgaagcgctcacggttactatgacggttagcttcacgactgttggtggcagtagcgtacgacttagctatagttccggacttacccttaagataacttcgtatagcatacattatacgaagttatgggcccacgcgtgaagagcggttaccagagctggtcacctttgtccaccaagatggaactgtcttcggccagaatggccatctggattcagcaggcctagaaggccatttatcgctatcaactttgtatagaaaagttgggccgaattcgagctcggtacggccagaatggcccggaccggctcgagccttttgtctcccttttgtctcccttttgtctcccttttgtctcgccggccttttgtctcccttttgtctcccttttgtctcccttttgtctctgacagtggtcccaaagatggacccccacccacgaggagcatcgtggaaaaagaagacgttccaaccacgtcttcaaagcaagtggattgatgtgatatctccactgacgtaagggatgacgcacaatcccactagactctatcagtgatagagtgtatataagactctatcagtgatagagtgaactctatcagtgatagagttgtaccatggcggccaatgcgggcggcggtggagcgggaggaggcagcggcagcggcagcgtggctgcgccggcggtgtgccgccccagcggctcgcggtggacgccgacgccggagcagatcaggatgctgaaggagctctactacggctgcggcatccggtcgcccagctcggagcagatccagcgcatcaccgccatgctgcggcagcacggcaagatcgagggcaagaacgtcttctactggttccagaaccacaaggcccgcgagcgccagaagcgccgcctcaccagcctcgacgtcaacgtgcccgccgccggcgcggccgacgccaccaccagccaactcggcgtcctctcgctgtcgtcgccgccgccttcaggcgcggcgcctccctcgcccaccctcggcttctacgccgccggcaatggcggcggatcggctgtgctgctggacacgagttccgactggggcagcagcggcgctgctatggccaccgagacatgcttcctgcaggactacatgggcgtgacggacacgggcagctcgtcgcagtggccacgcttctcgtcgtcggacacgataatggcggcggccgcggcgcgggcggcgacgacgcgggcgcccgagacgctccctctcttcccgacctgcggcgacgacggcggcagcggtagcagcagctacttgccgttctggggtgccgcgtccacaactgccggcgccacttcttccgttgcgatccaacagcaacaccagctgcaggagcagtacagcttttacagcaacagcaacagcacccagctggccggcaccggcaaccaagacgtatcggcaacagcagcagcagccgccgccctggagctgagcctcagctcatggtgctccccttaccctgctgcagggagtatgtgagagcaacgcgagctgccactgctcttcactgatgtctctggaatggaaggaggaggaagtgagcatagcgttggtgcgttgctgtcaagggcgaattgtaccacatggttaacctagacttgtccatcttctggattggccaacttaattaatgtatgaaataaaaggatgcacacatagtgacatgctaatcactataatgtgggcatcaaagttgtgtgttatgtgtaattactagttatctgaataaaagagaaagagatcatccatatttcttatcctaaatgaatgtcacgtgtctttataattctttgatgaaccagatgcatttcattaaccaaatccatatacatataaatattaatcatatataattaatatcaattgggttagcaaaacaaatctagtctaggtgtgttttgcgaatgcggccgccaccgcggtggagctcgaattccggtccgggcctagaaggccagcttcaagtttgtacaaaaaagcaggctccggccagaatggcccggaccgggttaccgaattcttaccctagctccctgcggctgttacgcggtcccccatcaatcttctgttcttgcggttgtagcctgtgtaacagtgctagagtatgtatgataaataggttttaagtctgcttacatgacattttttattgtggaagagacatataaaaattagagagagtggttctcatgcaacggcggacggcccggtgctaaaagagcttcaagacaaaataatgaaacaggaagagagtagatttatctaagagccaactttattatatgaatgtgtttattgttggctttagatgatatggtaaggagttagagctaataatagataggctctattattattattattaattaaactcgctctaaggaggaaagtgggaggaagggacgaggacgaagactactggaagcatcgtgcatggatgatggatgtggtgtctcttaatgtaggtggccggaggatgtacgtgttaattgcgcgataagcactcagatccaaccgcaaactacctccacactgacacactgatagagagaaagagagacctccgacgactgccgccgcagatgagccacgtacgtatacgacgtctgccggccggctcaggctgccgccatcaccctgctcgaaagtcgcgttaggcggcgccagctacataggagtatctagtctagccagttagtatactactactgcgctgatgatgaattaactctgcatagatactgtacttgcctccctccaacacccaaccacctcctgctcggctcttaataacttggacacggatcgatgccatccaaggaagaacacgacgacgacgacggaacatccaccatgcaagcttgcatccatacgccgatacgcgtgcatccatccatccaccattatttccattttccaccgatcacacgtacacaggcctatttaaggagcgacatcccactgcaactctcctcactctatcagtgatagagtctctagcaaagcacttgccatctaccgaccgccgcattccaaacagcccgacgagctagcagagcggcaggcacctccctcctcaaggaacccatggccactgtgaacaactggctcgctttctccctctccccgcaggagctgccgccctcccagacgacggactccacactcatctcggccgccaccgccgaccatgtctccggcgatgtctgcttcaacatcccccaagattggagcatgaggggatcagagctttcggcgctcgtcgcggagccgaagctggaggacttcctcggcggcatctccttctccgagcagcatcacaaggccaactgcaacatgatacccagcactagcagcacagtttgctacgcgagctcaggtgctagcaccggctaccatcaccagctgtaccaccagcccaccagctcagcgctccacttcgcggactccgtaatggtggcttcctcggccggtgtccacgacggcggtgccatgctcagcgcggccgccgctaacggtgtcgctggcgctgccagtgccaacggcggcggcatcgggctgtccatgattaagaactggctgcggagccaaccggcgcccatgcagccgagggtggcggcggctgagggcgcgcaggggctctctttgtccatgaacatggcggggacgacccaaggcgctgctggcatgccacttctcgctggagagcgcgcacgggcgcccgagagtgtatcgacgtcagcacagggtggagccgtcgtcgtcacggcgccgaaggaggatagcggtggcagcggtgttgccggcgctctagtagccgtgagcacggacacgggtggcagcggcggcgcgtcggctgacaacacggcaaggaagacggtggacacgttcgggcagcgcacgtcgatttaccgtggcgtgacaaggcatagatggactgggagatatgaggcacatctttgggataacagttgcagaagggaagggcaaactcgtaagggtcgtcaagtctatttaggtggctatgataaagaggagaaagctgctagggcttatgatcttgctgctctgaagtactggggtgccacaacaacaacaaattttccagtgagtaactacgaaaaggagctcgaggacatgaagcacatgacaaggcaggagtttgtagcgtctctgagaaggaagagcagtggtttctccagaggtgcatccatttacaggggagtgactaggcatcaccaacatggaagatggcaagcacggattggacgagttgcagggaacaaggatctttacttgggcaccttcagcacccaggaggaggcagcggaggcgtacgacatcgcggcgatcaagttccgcggcctcaacgccgtcaccaacttcgacatgagccgctacgacgtgaagagcatcctggacagcagcgccctccccatcggcagcgccgccaagcgcctcaaggaggccgaggccgcagcgtccgcgcagcaccaccacgccggcgtggtgagctacgacgtcggccgcatcgcctcgcagctcggcgacggcggagccctggcggcggcgtacggcgcgcactaccacggcgccgcctggccgaccatcgcgttccagccgggcgccgccagcacaggcctgtaccacccgtacgcgcagcagccaatgcgcggcggcgggtggtgcaagcaggagcaggaccacgcggtgatcgcggccgcgcacagcctgcaggacctccaccacctgaacctgggcgcggccggcgcgcacgactttttctcggcagggcagcaggccgccgccgctgcgatgcacggcctgggtagcatcgacagtgcgtcgctcgagcacagcaccggctccaactccgtcgtctacaacggcggggtcggcgacagcaacggcgccagcgccgtcggcggcagtggcggtggctacatgatgccgatgagcgctgccggagcaaccactacatcggcaatggtgagccacgagcaggtgcatgcacgggcctacgacgaagccaagcaggctgctcagatggggtacgagagctacctggtgaacgcggagaacaatggtggcggaaggatgtctgcatgggggactgtcgtgtctgcagccgcggcggcagcagcaagcagcaacgacaacatggccgccgacgtcgggcatggcggcgcgcagctcttcagtgtctggaacgacacttaagcgtacctagtggtacctgacatcttatagtctgcaacctctcgtgtctgaattcctatctttatcaagtgttattgcttccacgactataggacagctttcgtcgaaagcttttgctcatgtgatctcgaaggattcatctagtctgatttttcgtgacttgtatcggttttattggattcatccaacatatatcaataaaaaatgagttgtgtttcctttcttcctagttcagttaaaattatttccctcctgcgcttgtgctgtaattgtctgtgtacctgttgtttgtgactgtgttagttcccttggatatgatttcgtatttgatatgtacatggagatagcttagcttcattattggagtatgaagttagtatgacatagtcactctcctggaaaattgacactgcaaaccatatttttattctgaaccacaaatcctagtcagtccgctggcatatgccgtccgtttgctgaatccagaacgtgggtttggagatgtacggctgagatgcctctatgcgaaggggatttcgtggtgaaacgagatgggagtagagcaacgcccgtggaagatgcttcaaacttccacacttttgagcaacgatcggcagtagtaaggtagacgatttcaagatcaaagcatatgaagataaacaacatcaacaacaaaatttgttggggttctatagagagaaacagagctacatacatacactgttttgtatctaccatctgagatgatgaaaagatgaaaaactaaagaatgccccggcgccaacgccaggacacgccgcgcgcgcgtcacccgagccatctcttgacccagccggcgctgtatatttacacacgttgcagcatcgatcaccacctgttcgatcgcgtcgccgtcaccggtaccgagctcgaattccggtccgggcctagaaggccgatctcccgggcacccagctttcttgtacaaagtggccgttaacggatcggccagatccctatagtattttaaaattgcattaacaaacatgtcctaattggtactcctgagatactataccctcctgttttaaaatagttggcattatcgaattatcattttactctttaatgttttctcttcttttaatatattttatgaattttaatgtattttaaaatgttatgcagttcgctctggacttttctgctgcgcctacacttgggtgtactgggcctaaattcagcctgaccgaccgcctgcattgaataatggatgagcaccggtaaaatccgcgtacccaactttcgagaagaaccgagacgtggcgggccgggccaccgacgcacggcaccagcgactgcacacgtcccgccggcgtacgtgtacgtgctgttccctcactggccgcccaatccactcatgcatgcccacgtacacccctgccgtggcgcgcccagatcctaatcctttcgccgttctgcacttctgctgcctataaatggcggcatcgaccgtcacctgcttcaccaccggcgagccacatcgagaacacgatcgagcacacaagcacgaagactcgtttaggagaaaccacaaaccaccaagccgtgcaagcaccaagcttggtcacccggtccgggcctagaaggccagcttcaagtttgtacaaaaaagcaggcttcgaaggagatagaaccgatccaccatgtccaacctgctcacggttcaccagaaccttccggctcttccagtggacgcgacgtccgatgaagtcaggaagaacctcatggacatgttccgcgacaggcaagcgttcagcgagcacacctggaagatgctgctctccgtctgccgctcctgggctgcatggtgcaagctgaacaacaggaagtggttccccgctgagcccgaggacgtgagggattaccttctgtacctgcaagcgcgaggtttgtttctgcttctacctttgatatatatataataattatcattaattagtagtaatataatatttcaaatatttttttcaaaataaaagaatgtagtatatagcaattgcttttctgtagtttataagtgtgtatattttaatttataacttttctaatatatgaccaaaacatggtgatgcctaggtctggcagtgaagaccatccagcaacaccttggacaactgaacatgcttcacaggcgctccggcctcccgcgccccagcgactcgaacgccgtgagcctcgtcatgcgccgcatcaggaaggaaaacgtcgatgccggcgaaagggcaaagcaggccctcgcgttcgagaggaccgatttcgaccaggtccgcagcctgatggagaacagcgacaggtgccaggacattaggaacctggcgttcctcggaattgcatacaacacgctcctcaggatcgcggaaattgcccgcattcgcgtgaaggacattagccgcaccgacggcggcaggatgcttatccacattggcaggaccaagacgctcgtttccaccgcaggcgtcgaaaaggccctcagcctcggagtgaccaagctcgtcgaacgctggatctccgtgtccggcgtcgcggacgacccaaacaactacctcttctgccgcgtccgcaagaacggggtggctgcccctagcgccaccagccaactcagcacgagggccttggaaggtattttcgaggccacccaccgcctgatctacggcgcgaaggatgacagcggtcaacgctacctcgcatggtccgggcactccgcccgcgttggagctgctagggacatggcccgcgccggtgtttccatccccgaaatcatgcaggcgggtggatggacgaacgtgaacattgtcatgaactacattcgcaaccttgacagcgagacgggcgcaatggttcgcctcctggaagatggtgactgagctagacccagctttcttgtacaaagtggccgttaacggatccagacttgtccatcttctggattggccaacttaattaatgtatgaaataaaaggatgcacacatagtgacatgctaatcactataatgtgggcatcaaagttgtgtgttatgtgtaattactagttatctgaataaaagagaaagagatcatccatatttcttatcctaaatgaatgtcacgtgtctttataattctttgatgaaccagatgcatttcattaaccaaatccatatacatataaatattaatcatatataattaatatcaattgggttagcaaaacaaatctagtctaggtgtgttttgcgaatgcggccgccaccgcggtggagctcgaattccggtccgggcctagaaggccagcttcggccgccccgggcaactttattatacaaagttgatagataaatcagatatctggttcctaaggacccggcggaccgattaaactgattcggtccgacgcgttacctaataacttcgtatagcatacattatacgaagttattagctaactaactagtaagcttggtcacccggtccgtcaatattctgattccgatgacttcgtaggttcctagctcaagccgctcgtgtccaagcgtcacttacgattagctaatgattacggcatctaggaccgactagtggcgcgccgactagctagctaaggtacgacttagctatagttccggacttaccggcgccgctagcctgcagtgcagcgtgacccggtcgtgcccctctctagagataatgagcattgcatgtctaagttataaaaaattaccacatattttttttgtcacacttgtttgaagtgcagtttatctatctttatacatatatttaaactttactctacgaataatataatctatagtactacaataatatcagtgttttagagaatcatataaatgaacagttagacatggtctaaaggacaattgagtattttgacaacaggactctacagttttatctttttagtgtgcatgtgttctcctttttttttgcaaatagcttcacctatataatacttcatccattttattagtacatccatttagggtttagggttaatggtttttatagactaatttttttagtacatctattttattctattttagcctctaaattaagaaaactaaaactctattttagtttttttatttaataatttagatataaaatagaataaaataaagtgactaaaaattaaacaaataccctttaagaaattaaaaaaactaaggaaacatttttcttgtttcgagtagataatgccagcctgttaaacgccgtcgacgagtctaacggacaccaaccagcgaaccagcagcgtcgcgtcgggccaagcgaagcagacggcacggcatctctgtcgctgcctctggacccctctcgagagttccgctccaccgttggacttgctccgctgtcggcatccagaaattgcgtggcggagcggcagacgtgagccggcacggcaggcggcctcctcctcctctcacggcaccggcagctacgggggattcctttcccaccgctccttcgctttcccttcctcgcccgccgtaataaatagacaccccctccacaccctctttccccaacctcgtgttgttcggagcgcacacacacacaaccagatctcccccaaatccacccgtcggcacctccgcttcaaggtacgccgctcgtcctcccccccccccctctctaccttctctagatcggcgttccggtccatgcatggttagggcccggtagttctacttctgttcatgtttgtgttagatccgtgtttgtgttagatccgtgctgctagcgttcgtacacggatgcgacctgtacgtcagacacgttctgattgctaacttgccagtgtttctctttggggaatcctgggatggctctagccgttccgcagacgggatcgatttcatgattttttttgtttcgttgcatagggtttggtttgcccttttcctttatttcaatatatgccgtgcacttgtttgtcgggtcatcttttcatgcttttttttgtcttggttgtgatgatgtggtctggttgggcggtcgttctagatcggagtagaattctgtttcaaactacctggtggatttattaattttggatctgtatgtgtgtgccatacatattcatagttacgaattgaagatgatggatggaaatatcgatctaggataggtatacatgttgatgcgggttttactgatgcatatacagagatgctttttgttcgcttggttgtgatgatgtggtgtggttgggcggtcgttcattcgttctagatcggagtagaatactgtttcaaactacctggtgtatttattaattttggaactgtatgtgtgtgtcatacatcttcatagttacgagtttaagatggatggaaatatcgatctaggataggtatacatgttgatgtgggttttactgatgcatatacatgatggcatatgcagcatctattcatatgctctaaccttgagtacctatctattataataaacaagtatgttttataattattttgatcttgatatacttggatgatggcatatgcagcagctatatgtggatttttttagccctgccttcatacgctatttatttgcttggtactgtttcttttgtcgatgctcaccctgttgtttggtgttacttctgcaggtcgactctagaggatcaattcgctagcgaagttcctattccgaagttcctattctctagaaagtataggaacttcagatccaccgggatccaccatggttgaacaagatggattgcacgcaggttctccggccgcttgggtggagaggctattcggctatgactgggcacaacagacaatcggctgctctgatgccgccgtgttccggctgtcagcgcaggggcgcccggttctttttgtcaagaccgacctgtccggtgccctgaatgaactgcaggacgaggcagcgcggctatcgtggctggccacgacgggcgttccttgcgcagctgtgctcgacgttgtcactgaagcgggaagggactggctgctattgggcgaagtgccggggcaggatctcctgtcatctcaccttgctcctgccgagaaagtatccatcatggctgatgcaatgcggcggctgcatacgcttgatccggctacctgcccattcgaccaccaagcgaaacatcgcatcgagcgagcacgtactcggatggaagccggtcttgtcgatcaggatgatctggacgaagagcatcaggggctcgcgccagccgaactgttcgccaggctcaaggcgcgcatgcccgacggcgatgatctcgtcgtgacccatggcgatgcctgcttgccgaatatcatggtggaaaatggccgcttttctggattcatcgactgtggccggctgggtgtggcggaccgctatcaggacatagcgttggctacccgtgatattgctgaagagcttggcggcgaatgggctgaccgcttcctcgtgctttacggtatcgccgctcccgattcgcagcgcatcgccttctatcgccttcttgacgagttcttctgaggatccaccatggttaacctagacttgtccatcttctggattggccaacttaattaatgtatgaaataaaaggatgcacacatagtgacatgctaatcactataatgtgggcatcaaagttgtgtgttatgtgtaattactagttatctgaataaaagagaaagagatcatccatatttcttatcctaaatgaatgtcacgtgtctttataattctttgatgaaccagatgcatttcattaaccaaatccatatacatataaatattaatcatatataattaatatcaattgggttagcaaaacaaatctagtctaggtgtgttttgcaagcttgcatgcctgcagtgcagcgtgacccggtcgtgcccctctctagagataatgagcattgcatgtctaagttataaaaaattaccacatattttttttgtcacacttgtttgaagtgcagtttatctatctttatacatatatttaaactttactctacgaataatataatctatagtactacaataatatcagtgttttagagaatcatataaatgaacagttagacatggtctaaaggacaattgagtattttgacaacaggactctacagttttatctttttagtgtgcatgtgttctcctttttttttgcaaatagcttcacctatataatacttcatccattttattagtacatccatttagggtttagggttaatggtttttatagactaatttttttagtacatctattttattctattttagcctctaaattaagaaaactaaaactctattttagtttttttatttaataatttagatataaaatagaataaaataaagtgactaaaaattaaacaaataccctttaagaaattaaaaaaactaaggaaacatttttcttgtttcgagtagataatgccagcctgttaaacgccgtcgacgagtctaacggacaccaaccagcgaaccagcagcgtcgcgtcgggccaagcgaagcagacggcacggcatctctgtcgctgcctctggacccctctcgagagttccgctccaccgttggacttgctccgctgtcggcatccagaaattgcgtggcggagcggcagacgtgagccggcacggcaggcggcctcctcctcctctcacggcaccggcagctacgggggattcctttcccaccgctccttcgctttcccttcctcgcccgccgtaataaatagacaccccctccacaccctctttccccaacctcgtgttgttcggagcgcacacacacacaaccagatctcccccaaatccacccgtcggcacctccgcttcaaggtacgccgctcgtcctcccccccccccctctctaccttctctagatcggcgttccggtccatgcatggttagggcccggtagttctacttctgttcatgtttgtgttagatccgtgtttgtgttagatccgtgctgctagcgttcgtacacggatgcgacctgtacgtcagacacgttctgattgctaacttgccagtgtttctctttggggaatcctgggatggctctagccgttccgcagacgggatcgatttcatgattttttttgtttcgttgcatagggtttggtttgcccttttcctttatttcaatatatgccgtgcacttgtttgtcgggtcatcttttcatgcttttttttgtcttggttgtgatgatgtggtctggttgggcggtcgttctagatcggagtagaattctgtttcaaactacctggtggatttattaattttggatctgtatgtgtgtgccatacatattcatagttacgaattgaagatgatggatggaaatatcgatctaggataggtatacatgttgatgcgggttttactgatgcatatacagagatgctttttgttcgcttggttgtgatgatgtggtgtggttgggcggtcgttcattcgttctagatcggagtagaatactgtttcaaactacctggtgtatttattaattttggaactgtatgtgtgtgtcatacatcttcatagttacgagtttaagatggatggaaatatcgatctaggataggtatacatgttgatgtgggttttactgatgcatatacatgatggcatatgcagcatctattcatatgctctaaccttgagtacctatctattataataaacaagtatgttttataattattttgatcttgatatacttggatgatggcatatgcagcagctatatgtggatttttttagccctgccttcatacgctatttatttgcttggtactgtttcttttgtcgatgctcaccctgttgtttggtgttacttctgcaggtcgactctagaggatccaccggtcgccaccatggccctgtccaacaagttcatcggcgacgacatgaagatgacctaccacatggacggctgcgtgaacggccactacttcaccgtgaagggcgagggcagcggcaagccctacgagggcacccagacctccaccttcaaggtgaccatggccaacggcggccccctggccttctccttcgacatcctgtccaccgtgttcatgtacggcaaccgctgcttcaccgcctaccccaccagcatgcccgactacttcaagcaggccttccccgacggcatgtcctacgagagaaccttcacctacgaggacggcggcgtggccaccgccagctgggagatcagcctgaagggcaactgcttcgagcacaagtccaccttccacggcgtgaacttccccgccgacggccccgtgatggccaagaagaccaccggctgggacccctccttcgagaagatgaccgtgtgcgacggcatcttgaagggcgacgtgaccgccttcctgatgctgcagggcggcggcaactacagatgccagttccacacctcctacaagaccaagaagcccgtgaccatgccccccaaccacgtggtggagcaccgcatcgccagaaccgacctggacaagggcggcaacagcgtgcagctgaccgagcacgccgtggcccacatcacctccgtggtgcccttctgaagcggccgcaacctagacttgtccatcttctggattggccaacttaattaatgtatgaaataaaaggatgcacacatagtgacatgctaatcactataatgtgggcatcaaagttgtgtgttatgtgtaattactagttatctgaataaaagagaaagagatcatccatatttcttatcctaaatgaatgtcacgtgtctttataattctttgatgaaccagatgcatttcattaaccaaatccatatacatataaatattaatcatatataattaatatcaattgggttagcaaaacaaatctagtctaggtgtgttttgcgaatgcggccgccaccgcggtggagctcgaatgcggccctagcgtatacgaagttcctattccgaagttcctattcttcaaaaagtataggaacttctgtaccgagctcgaattcattccgattaatcgtggcctcttgctcttcaggatgaagagctatgtttaaacgtgcaagcgctactagacaattcagtacattaaaaacgtccgcaatgtgttattaagttgtctaagcgtcaatttgtttacaccacaatatatcctgcca

SEQ ID NO: 6 - DNA, 17675 bp, Artificial sequence
  PHP81856
gtttacccgccaatatatcctgtcaaacactgcggccgcacttgaccgcggatggagccggagctgtggtgaggccatcgacgggaggtgggggagaacacagtctcagtgttctttgtgagtccgcaaggtttttagcttttctgtattaattaaggttgctgttggctgtagaatacggtcgtggaagagctgtatcggtagctactacgtaagctattatatactggaagtctggagctcgtcgatctccggtcgtcttcctccatttctcctcgtcttgctttgactgctgctaccatttgcttctgttttctgatgaagcatgccatgtcggccaccagtgtttgtgtggtttttgcagggaatggctttcaagtgctgtgattgaatggccctcgtcgtcctcggctgagctcacatggacgcgtcatgtgagtgagatatatgatcatatgatgagtggggttcgggtgagtgcgtacttgaagtaggatcccgctttcactcattcattcattggcctttaaaccgggaaattttcgcgaggagatggagggaagcaagcagggtgacgagtgcagagtgccgcgagcgctttgtcaaaaggcaccgccgtaggcaaaaaaatcaatggccctgactgactcgatggtagtactactgtagagactagagagggttgctccccatatcttcgtgtgacttttactccagcattgcatttccgtcattgagacgttaattaatagcagctttcgggacagatgactgtggccatgtttcgtcacggccgcttcgtgccagctgggggtactatagtactgtgattttgttagtaaaaactttcattaggccaccattgacgaccgggccttcgcttttgctgcgctaattaaccatttcccggcgaccgaagggaacatgaacatgccccgacacatgagggcatgaggactagtgttctccctgtcgttcgttgacttgactagtgatagtttaaacgctcttcaactggaagagcggttactaccggttcactagctagctgctaatcgagctagttaccctatgaggtgacatgaagcgctcacggttactatgacggttagcttcacgactgttggtggcagtagcgtacgacttagctatagttccggacttacccttaagataacttcgtatagcatacattatacgaagttatgggcccacgcgtgaagagcggttaccagagctggtcacctttgtccaccaagatggaactgtcttcggccagaatggccatctggattcagcaggcctagaaggccatttatcgctatcaactttgtatagaaaagttgggccgagctcggtacggccagaatggcccggaccgggttaccgaattcaggcgacccatcgctgctttgtctacatcatgttcttcatcatcctccccaggcgacgcgtgctgctgttcttattcagactaccgttcgagtgactgcatggcgtacatctttctgcatcgactttgtacggctacatcgaacatatacacgagatgtctcgtgtgaatagagtcactaatgccttaagcatcggttactccgtagggtacattctgttcttcttatttgtgcatatttttattgttgtttactgattatacgagtagttatacatacatgcacatacatatcatcacatatatcacaatatttttctaaattaaattaaaactaaaaatgactaaatttctaacaccaacgacattgtaatgttttctccaacaactttacctattctacattgttctatttcgaatttcactctataaacaacatagtctacaatggaaaacagtgctttgtacgactatatacgcgatgtgtggctacaacataagacaatatagtcgtttgaagattgaacctatatatcggtacggttaatccgtctatgtacgtgggcatgacgaacacccgtgataacgaaggattaacgtgcacaatcataaatccaaagtaggagcggtgcatgatgagaatcgctctcagtactcgacataatgaaccttacgaggtacaacaggcaggcaggcagggaccaggggccgcctttatttcaggctcgctggccccacgggcgtgctgcgtgcacgaagggcactaccccaacctctcaccgaaaaccgcgctggatcggcaaatcaaacgaggtggtgccccgtgcccactctccacgtccacggcaccatccctctgcagccgctcaccagccatgccgtgtcgcggaacggcacaaccacccccaacccactcacgaaaccccgtcccggccgtgcccgtgtcggtccgcgctcggcaacgaggcggcccgcgctgctgagtcccctggacacccgacaccctgtcggccctttgtttattcatcccgaaatctcatctgcccccacggccgactgcgctgcgccgcccggatatatatacccatcgttatcgatcgactggggactctatcagtgatagagtctagaggatcgctcaggaaggccgctgagatagaggcatggcggccaatgcgggcggcggtggagcgggaggaggcagcggcagcggcagcgtggctgcgccggcggtgtgccgccccagcggctcgcggtggacgccgacgccggagcagatcaggatgctgaaggagctctactacggctgcggcatccggtcgcccagctcggagcagatccagcgcatcaccgccatgctgcggcagcacggcaagatcgagggcaagaacgtcttctactggttccagaaccacaaggcccgcgagcgccagaagcgccgcctcaccagcctcgacgtcaacgtgcccgccgccggcgcggccgacgccaccaccagccaactcggcgtcctctcgctgtcgtcgccgccgccttcaggcgcggcgcctccctcgcccaccctcggcttctacgccgccggcaatggcggcggatcggctgtgctgctggacacgagttccgactggggcagcagcggcgctgccatggccaccgagacatgcttcctgcaggactacatgggcgtgacggacacgggcagctcgtcgcagtggccacgcttctcgtcgtcggacacgataatggcggcggccgcggcgcgggcggcgacgacgcgggcgcccgagacgctccctctcttcccgacctgcggcgacgacggcggcagcggtagcagcagctacttgccgttctggggtgccgcgtccacaactgccggcgccacttcttccgttgcgatccagcagcaacaccagctgcaggagcagtacagcttttacagcaacagcaacagcacccagctggccggcaccggcaaccaagacgtatcggcaacagcagcagcagccgccgccctggagctgagcctcagctcatggtgctccccttaccctgctgcagggagtatgtgagagcaacgcgagctgccactgctcttcactggtaccgttaacagatcattcgacaaagcagcattagtccgttgatcggtggaagaccactcgtcagtgttgagttgaatgtttgatcaataaaatacggcaatgctgtaagggttgttttttatgccattgataatacactgtactgttcagttgttgaactctatttcttagccatgccaagtgcttttcttattttgaataacattacagcaaaaagttgaaagacaaaaaaaaaaacccccgaacagagtgctttgggtcccaagcttctttagactgtgttcggcgttccccctaaatttctccccctatatctcactcacttgtcacatcagcgttctctttccccctatatctccacgctctacagcagttccacctatatcaaacctctataccccaccacaacaatattatatactttcatcttcaactaactcatgtaccttccaatttttttctactaataattatttacgtgcacagaaacttagcaaggagagagagagcggggtgacccaccttgctagttggatattacctcttctcttcaaagtatccttgaacgctcaccggttatcaaatctctacactatagctctgtagtcttgctagatagttagttctttagctctcggtgaccaagcttggcgcgatcaagcttatcgataccgtcgacctcgaagcttggtcacccggtccgggcctagaaggccagcttcaagtttgtacaaaaaagcaggctccggccagaatggcccggaccgggttaccgaattcttaccctagctccctgcggctgttacgcggtcccccatcaatcttctgttcttgcggttgtagcctgtgtaacagtgctagagtatgtatgataaataggttttaagtctgcttacatgacattttttattgtggaagagacatataaaaattagagagagtggttctcatgcaacggcggacggcccggtgctaaaagagcttcaagacaaaataatgaaacaggaagagagtagatttatctaagagccaactttattatatgaatgtgtttattgttggctttagatgatatggtaaggagttagagctaataatagataggctctattattattattattaattaaactcgctctaaggaggaaagtgggaggaagggacgaggacgaagactactggaagcatcgtgcatggatgatggatgtggtgtctcttaatgtaggtggccggaggatgtacgtgttaattgcgcgataagcactcagatccaaccgcaaactacctccacactgacacactgatagagagaaagagagacctccgacgactgccgccgcagatgagccacgtacgtatacgacgtctgccggccggctcaggctgccgccatcaccctgctcgaaagtcgcgttaggcggcgccagctacataggagtatctagtctagccagttagtatactactactgcgctgatgatgaattaactctgcatagatactgtacttgcctccctccaacacccaaccacctcctgctcggctcttaataacttggacacggatcgatgccatccaaggaagaacacgacgacgacgacggaacatccaccatgcaagcttgcatccatacgccgatacgcgtgcatccatccatccaccattatttccattttccaccgatcacacgtacacaggcctatttaaggagcgacatcccactgcaactctcctcactctatcagtgatagagtctctagcaaagcacttgccatctaccgaccgccgcattccaaacagcccgacgagctagcagagcggcaggcacctccctcctcaaggaacccatggccactgtgaacaactggctcgctttctccctctccccgcaggagctgccgccctcccagacgacggactccacactcatctcggccgccaccgccgaccatgtctccggcgatgtctgcttcaacatcccccaagattggagcatgaggggatcagagctttcggcgctcgtcgcggagccgaagctggaggacttcctcggcggcatctccttctccgagcagcatcacaaggccaactgcaacatgatacccagcactagcagcacagtttgctacgcgagctcaggtgctagcaccggctaccatcaccagctgtaccaccagcccaccagctcagcgctccacttcgcggactccgtaatggtggcttcctcggccggtgtccacgacggcggtgccatgctcagcgcggccgccgctaacggtgtcgctggcgctgccagtgccaacggcggcggcatcgggctgtccatgattaagaactggctgcggagccaaccggcgcccatgcagccgagggtggcggcggctgagggcgcgcaggggctctctttgtccatgaacatggcggggacgacccaaggcgctgctggcatgccacttctcgctggagagcgcgcacgggcgcccgagagtgtatcgacgtcagcacagggtggagccgtcgtcgtcacggcgccgaaggaggatagcggtggcagcggtgttgccggcgctctagtagccgtgagcacggacacgggtggcagcggcggcgcgtcggctgacaacacggcaaggaagacggtggacacgttcgggcagcgcacgtcgatttaccgtggcgtgacaaggcatagatggactgggagatatgaggcacatctttgggataacagttgcagaagggaagggcaaactcgtaagggtcgtcaagtctatttaggtggctatgataaagaggagaaagctgctagggcttatgatcttgctgctctgaagtactggggtgccacaacaacaacaaattttccagtgagtaactacgaaaaggagctcgaggacatgaagcacatgacaaggcaggagtttgtagcgtctctgagaaggaagagcagtggtttctccagaggtgcatccatttacaggggagtgactaggcatcaccaacatggaagatggcaagcacggattggacgagttgcagggaacaaggatctttacttgggcaccttcagcacccaggaggaggcagcggaggcgtacgacatcgcggcgatcaagttccgcggcctcaacgccgtcaccaacttcgacatgagccgctacgacgtgaagagcatcctggacagcagcgccctccccatcggcagcgccgccaagcgcctcaaggaggccgaggccgcagcgtccgcgcagcaccaccacgccggcgtggtgagctacgacgtcggccgcatcgcctcgcagctcggcgacggcggagccctggcggcggcgtacggcgcgcactaccacggcgccgcctggccgaccatcgcgttccagccgggcgccgccagcacaggcctgtaccacccgtacgcgcagcagccaatgcgcggcggcgggtggtgcaagcaggagcaggaccacgcggtgatcgcggccgcgcacagcctgcaggacctccaccacctgaacctgggcgcggccggcgcgcacgactttttctcggcagggcagcaggccgccgccgctgcgatgcacggcctgggtagcatcgacagtgcgtcgctcgagcacagcaccggctccaactccgtcgtctacaacggcggggtcggcgacagcaacggcgccagcgccgtcggcggcagtggcggtggctacatgatgccgatgagcgctgccggagcaaccactacatcggcaatggtgagccacgagcaggtgcatgcacgggcctacgacgaagccaagcaggctgctcagatggggtacgagagctacctggtgaacgcggagaacaatggtggcggaaggatgtctgcatgggggactgtcgtgtctgcagccgcggcggcagcagcaagcagcaacgacaacatggccgccgacgtcgggcatggcggcgcgcagctcttcagtgtctggaacgacacttaagcgtacctagtggtacctgacatcttatagtctgcaacctctcgtgtctgaattcctatctttatcaagtgttattgcttccacgactataggacagctttcgtcgaaagcttttgctcatgtgatctcgaaggattcatctagtctgatttttcgtgacttgtatcggttttattggattcatccaacatatatcaataaaaaatgagttgtgtttcctttcttcctagttcagttaaaattatttccctcctgcgcttgtgctgtaattgtctgtgtacctgttgtttgtgactgtgttagttcccttggatatgatttcgtatttgatatgtacatggagatagcttagcttcattattggagtatgaagttagtatgacatagtcactctcctggaaaattgacactgcaaaccatatttttattctgaaccacaaatcctagtcagtccgctggcatatgccgtccgtttgctgaatccagaacgtgggtttggagatgtacggctgagatgcctctatgcgaaggggatttcgtggtgaaacgagatgggagtagagcaacgcccgtggaagatgcttcaaacttccacacttttgagcaacgatcggcagtagtaaggtagacgatttcaagatcaaagcatatgaagataaacaacatcaacaacaaaatttgttggggttctatagagagaaacagagctacatacatacactgttttgtatctaccatctgagatgatgaaaagatgaaaaactaaagaatgccccggcgccaacgccaggacacgccgcgcgcgcgtcacccgagccatctcttgacccagccggcgctgtatatttacacacgttgcagcatcgatcaccacctgttcgatcgcgtcgccgtcaccggtaccgagctcgaattccggtccgggcctagaaggccgatctcccgggcacccagctttcttgtacaaagtggccgttaacggatcggccagatccctatagtattttaaaattgcattaacaaacatgtcctaattggtactcctgagatactataccctcctgttttaaaatagttggcattatcgaattatcattttactctttaatgttttctcttcttttaatatattttatgaattttaatgtattttaaaatgttatgcagttcgctctggacttttctgctgcgcctacacttgggtgtactgggcctaaattcagcctgaccgaccgcctgcattgaataatggatgagcaccggtaaaatccgcgtacccaactttcgagaagaaccgagacgtggcgggccgggccaccgacgcacggcaccagcgactgcacacgtcccgccggcgtacgtgtacgtgctgttccctcactggccgcccaatccactcatgcatgcccacgtacacccctgccgtggcgcgcccagatcctaatcctttcgccgttctgcacttctgctgcctataaatggcggcatcgaccgtcacctgcttcaccaccggcgagccacatcgagaacacgatcgagcacacaagcacgaagactcgtttaggagaaaccacaaaccaccaagccgtgcaagcaccaagcttggtcacccggtccgggcctagaaggccagcttcaagtttgtacaaaaaagcaggcttcgaaggagatagaaccgatccaccatgtccaacctgctcacggttcaccagaaccttccggctcttccagtggacgcgacgtccgatgaagtcaggaagaacctcatggacatgttccgcgacaggcaagcgttcagcgagcacacctggaagatgctgctctccgtctgccgctcctgggctgcatggtgcaagctgaacaacaggaagtggttccccgctgagcccgaggacgtgagggattaccttctgtacctgcaagcgcgaggtttgtttctgcttctacctttgatatatatataataattatcattaattagtagtaatataatatttcaaatatttttttcaaaataaaagaatgtagtatatagcaattgcttttctgtagtttataagtgtgtatattttaatttataacttttctaatatatgaccaaaacatggtgatgcctaggtctggcagtgaagaccatccagcaacaccttggacaactgaacatgcttcacaggcgctccggcctcccgcgccccagcgactcgaacgccgtgagcctcgtcatgcgccgcatcaggaaggaaaacgtcgatgccggcgaaagggcaaagcaggccctcgcgttcgagaggaccgatttcgaccaggtccgcagcctgatggagaacagcgacaggtgccaggacattaggaacctggcgttcctcggaattgcatacaacacgctcctcaggatcgcggaaattgcccgcattcgcgtgaaggacattagccgcaccgacggcggcaggatgcttatccacattggcaggaccaagacgctcgtttccaccgcaggcgtcgaaaaggccctcagcctcggagtgaccaagctcgtcgaacgctggatctccgtgtccggcgtcgcggacgacccaaacaactacctcttctgccgcgtccgcaagaacggggtggctgcccctagcgccaccagccaactcagcacgagggccttggaaggtattttcgaggccacccaccgcctgatctacggcgcgaaggatgacagcggtcaacgctacctcgcatggtccgggcactccgcccgcgttggagctgctagggacatggcccgcgccggtgtttccatccccgaaatcatgcaggcgggtggatggacgaacgtgaacattgtcatgaactacattcgcaaccttgacagcgagacgggcgcaatggttcgcctcctggaagatggtgactgagctagacccagctttcttgtacaaagtggccgttaacggatccagacttgtccatcttctggattggccaacttaattaatgtatgaaataaaaggatgcacacatagtgacatgctaatcactataatgtgggcatcaaagttgtgtgttatgtgtaattactagttatctgaataaaagagaaagagatcatccatatttcttatcctaaatgaatgtcacgtgtctttataattctttgatgaaccagatgcatttcattaaccaaatccatatacatataaatattaatcatatataattaatatcaattgggttagcaaaacaaatctagtctaggtgtgttttgcgaatgcggccgccaccgcggtggagctcgaattccggtccgggcctagaaggccagcttcggccgccccgggcaactttattatacaaagttgatagataaatcagatatctggttcctaaggacccggcggaccgattaaactgattcggtccgacgcgttacctaataacttcgtatagcatacattatacgaagttattagctaactaactagtaagcttggtcacccggtccgtcaatattctgattccgatgacttcgtaggttcctagctcaagccgctcgtgtccaagcgtcacttacgattagctaatgattacggcatctaggaccgactagtggcgcgccgactagctagctaaggtacgacttagctatagttccggacttaccggcgccgctagcctgcagtgcagcgtgacccggtcgtgcccctctctagagataatgagcattgcatgtctaagttataaaaaattaccacatattttttttgtcacacttgtttgaagtgcagtttatctatctttatacatatatttaaactttactctacgaataatataatctatagtactacaataatatcagtgttttagagaatcatataaatgaacagttagacatggtctaaaggacaattgagtattttgacaacaggactctacagttttatctttttagtgtgcatgtgttctcctttttttttgcaaatagcttcacctatataatacttcatccattttattagtacatccatttagggtttagggttaatggtttttatagactaatttttttagtacatctattttattctattttagcctctaaattaagaaaactaaaactctattttagtttttttatttaataatttagatataaaatagaataaaataaagtgactaaaaattaaacaaataccctttaagaaattaaaaaaactaaggaaacatttttcttgtttcgagtagataatgccagcctgttaaacgccgtcgacgagtctaacggacaccaaccagcgaaccagcagcgtcgcgtcgggccaagcgaagcagacggcacggcatctctgtcgctgcctctggacccctctcgagagttccgctccaccgttggacttgctccgctgtcggcatccagaaattgcgtggcggagcggcagacgtgagccggcacggcaggcggcctcctcctcctctcacggcaccggcagctacgggggattcctttcccaccgctccttcgctttcccttcctcgcccgccgtaataaatagacaccccctccacaccctctttccccaacctcgtgttgttcggagcgcacacacacacaaccagatctcccccaaatccacccgtcggcacctccgcttcaaggtacgccgctcgtcctcccccccccccctctctaccttctctagatcggcgttccggtccatgcatggttagggcccggtagttctacttctgttcatgtttgtgttagatccgtgtttgtgttagatccgtgctgctagcgttcgtacacggatgcgacctgtacgtcagacacgttctgattgctaacttgccagtgtttctctttggggaatcctgggatggctctagccgttccgcagacgggatcgatttcatgattttttttgtttcgttgcatagggtttggtttgcccttttcctttatttcaatatatgccgtgcacttgtttgtcgggtcatcttttcatgcttttttttgtcttggttgtgatgatgtggtctggttgggcggtcgttctagatcggagtagaattctgtttcaaactacctggtggatttattaattttggatctgtatgtgtgtgccatacatattcatagttacgaattgaagatgatggatggaaatatcgatctaggataggtatacatgttgatgcgggttttactgatgcatatacagagatgctttttgttcgcttggttgtgatgatgtggtgtggttgggcggtcgttcattcgttctagatcggagtagaatactgtttcaaactacctggtgtatttattaattttggaactgtatgtgtgtgtcatacatcttcatagttacgagtttaagatggatggaaatatcgatctaggataggtatacatgttgatgtgggttttactgatgcatatacatgatggcatatgcagcatctattcatatgctctaaccttgagtacctatctattataataaacaagtatgttttataattattttgatcttgatatacttggatgatggcatatgcagcagctatatgtggatttttttagccctgccttcatacgctatttatttgcttggtactgtttcttttgtcgatgctcaccctgttgtttggtgttacttctgcaggtcgactctagaggatcaattcgctagcgaagttcctattccgaagttcctattctctagaaagtataggaacttcagatccaccgggatccaccatggttgaacaagatggattgcacgcaggttctccggccgcttgggtggagaggctattcggctatgactgggcacaacagacaatcggctgctctgatgccgccgtgttccggctgtcagcgcaggggcgcccggttctttttgtcaagaccgacctgtccggtgccctgaatgaactgcaggacgaggcagcgcggctatcgtggctggccacgacgggcgttccttgcgcagctgtgctcgacgttgtcactgaagcgggaagggactggctgctattgggcgaagtgccggggcaggatctcctgtcatctcaccttgctcctgccgagaaagtatccatcatggctgatgcaatgcggcggctgcatacgcttgatccggctacctgcccattcgaccaccaagcgaaacatcgcatcgagcgagcacgtactcggatggaagccggtcttgtcgatcaggatgatctggacgaagagcatcaggggctcgcgccagccgaactgttcgccaggctcaaggcgcgcatgcccgacggcgatgatctcgtcgtgacccatggcgatgcctgcttgccgaatatcatggtggaaaatggccgcttttctggattcatcgactgtggccggctgggtgtggcggaccgctatcaggacatagcgttggctacccgtgatattgctgaagagcttggcggcgaatgggctgaccgcttcctcgtgctttacggtatcgccgctcccgattcgcagcgcatcgccttctatcgccttcttgacgagttcttctgaggatccaccatggttaacctagacttgtccatcttctggattggccaacttaattaatgtatgaaataaaaggatgcacacatagtgacatgctaatcactataatgtgggcatcaaagttgtgtgttatgtgtaattactagttatctgaataaaagagaaagagatcatccatatttcttatcctaaatgaatgtcacgtgtctttataattctttgatgaaccagatgcatttcattaaccaaatccatatacatataaatattaatcatatataattaatatcaattgggttagcaaaacaaatctagtctaggtgtgttttgcaagcttgcatgcctgcagtgcagcgtgacccggtcgtgcccctctctagagataatgagcattgcatgtctaagttataaaaaattaccacatattttttttgtcacacttgtttgaagtgcagtttatctatctttatacatatatttaaactttactctacgaataatataatctatagtactacaataatatcagtgttttagagaatcatataaatgaacagttagacatggtctaaaggacaattgagtattttgacaacaggactctacagttttatctttttagtgtgcatgtgttctcctttttttttgcaaatagcttcacctatataatacttcatccattttattagtacatccatttagggtttagggttaatggtttttatagactaatttttttagtacatctattttattctattttagcctctaaattaagaaaactaaaactctattttagtttttttatttaataatttagatataaaatagaataaaataaagtgactaaaaattaaacaaataccctttaagaaattaaaaaaactaaggaaacatttttcttgtttcgagtagataatgccagcctgttaaacgccgtcgacgagtctaacggacaccaaccagcgaaccagcagcgtcgcgtcgggccaagcgaagcagacggcacggcatctctgtcgctgcctctggacccctctcgagagttccgctccaccgttggacttgctccgctgtcggcatccagaaattgcgtggcggagcggcagacgtgagccggcacggcaggcggcctcctcctcctctcacggcaccggcagctacgggggattcctttcccaccgctccttcgctttcccttcctcgcccgccgtaataaatagacaccccctccacaccctctttccccaacctcgtgttgttcggagcgcacacacacacaaccagatctcccccaaatccacccgtcggcacctccgcttcaaggtacgccgctcgtcctcccccccccccctctctaccttctctagatcggcgttccggtccatgcatggttagggcccggtagttctacttctgttcatgtttgtgttagatccgtgtttgtgttagatccgtgctgctagcgttcgtacacggatgcgacctgtacgtcagacacgttctgattgctaacttgccagtgtttctctttggggaatcctgggatggctctagccgttccgcagacgggatcgatttcatgattttttttgtttcgttgcatagggtttggtttgcccttttcctttatttcaatatatgccgtgcacttgtttgtcgggtcatcttttcatgcttttttttgtcttggttgtgatgatgtggtctggttgggcggtcgttctagatcggagtagaattctgtttcaaactacctggtggatttattaattttggatctgtatgtgtgtgccatacatattcatagttacgaattgaagatgatggatggaaatatcgatctaggataggtatacatgttgatgcgggttttactgatgcatatacagagatgctttttgttcgcttggttgtgatgatgtggtgtggttgggcggtcgttcattcgttctagatcggagtagaatactgtttcaaactacctggtgtatttattaattttggaactgtatgtgtgtgtcatacatcttcatagttacgagtttaagatggatggaaatatcgatctaggataggtatacatgttgatgtgggttttactgatgcatatacatgatggcatatgcagcatctattcatatgctctaaccttgagtacctatctattataataaacaagtatgttttataattattttgatcttgatatacttggatgatggcatatgcagcagctatatgtggatttttttagccctgccttcatacgctatttatttgcttggtactgtttcttttgtcgatgctcaccctgttgtttggtgttacttctgcaggtcgactctagaggatccaccggtcgccaccatggccctgtccaacaagttcatcggcgacgacatgaagatgacctaccacatggacggctgcgtgaacggccactacttcaccgtgaagggcgagggcagcggcaagccctacgagggcacccagacctccaccttcaaggtgaccatggccaacggcggccccctggccttctccttcgacatcctgtccaccgtgttcatgtacggcaaccgctgcttcaccgcctaccccaccagcatgcccgactacttcaagcaggccttccccgacggcatgtcctacgagagaaccttcacctacgaggacggcggcgtggccaccgccagctgggagatcagcctgaagggcaactgcttcgagcacaagtccaccttccacggcgtgaacttccccgccgacggccccgtgatggccaagaagaccaccggctgggacccctccttcgagaagatgaccgtgtgcgacggcatcttgaagggcgacgtgaccgccttcctgatgctgcagggcggcggcaactacagatgccagttccacacctcctacaagaccaagaagcccgtgaccatgccccccaaccacgtggtggagcaccgcatcgccagaaccgacctggacaagggcggcaacagcgtgcagctgaccgagcacgccgtggcccacatcacctccgtggtgcccttctgaagcggccgcaacctagacttgtccatcttctggattggccaacttaattaatgtatgaaataaaaggatgcacacatagtgacatgctaatcactataatgtgggcatcaaagttgtgtgttatgtgtaattactagttatctgaataaaagagaaagagatcatccatatttcttatcctaaatgaatgtcacgtgtctttataattctttgatgaaccagatgcatttcattaaccaaatccatatacatataaatattaatcatatataattaatatcaattgggttagcaaaacaaatctagtctaggtgtgttttgcgaatgcggccgccaccgcggtggagctcgaatgcggccctagcgtatacgaagttcctattccgaagttcctattcttcaaaaagtataggaacttctgtaccgagctcgaattcattccgattaatcgtggcctcttgctcttcaggatgaagagctatgtttaaacgtgcaagcgctactagacaattcagtacattaaaaacgtccgcaatgtgttattaagttgtctaagcgtcaatttgtttacaccacaatatatcctgcca

SEQ ID NO: 7 - DNA, 16906 bp, Artificial sequence
  PHP81857
gtttacccgccaatatatcctgtcaaacactgcggccgcacttgaccgcggatggagccggagctgtggtgaggccatcgacgggaggtgggggagaacacagtctcagtgttctttgtgagtccgcaaggtttttagcttttctgtattaattaaggttgctgttggctgtagaatacggtcgtggaagagctgtatcggtagctactacgtaagctattatatactggaagtctggagctcgtcgatctccggtcgtcttcctccatttctcctcgtcttgctttgactgctgctaccatttgcttctgttttctgatgaagcatgccatgtcggccaccagtgtttgtgtggtttttgcagggaatggctttcaagtgctgtgattgaatggccctcgtcgtcctcggctgagctcacatggacgcgtcatgtgagtgagatatatgatcatatgatgagtggggttcgggtgagtgcgtacttgaagtaggatcccgctttcactcattcattcattggcctttaaaccgggaaattttcgcgaggagatggagggaagcaagcagggtgacgagtgcagagtgccgcgagcgctttgtcaaaaggcaccgccgtaggcaaaaaaatcaatggccctgactgactcgatggtagtactactgtagagactagagagggttgctccccatatcttcgtgtgacttttactccagcattgcatttccgtcattgagacgttaattaatagcagctttcgggacagatgactgtggccatgtttcgtcacggccgcttcgtgccagctgggggtactatagtactgtgattttgttagtaaaaactttcattaggccaccattgacgaccgggccttcgcttttgctgcgctaattaaccatttcccggcgaccgaagggaacatgaacatgccccgacacatgagggcatgaggactagtgttctccctgtcgttcgttgacttgactagtgatagtttaaacgctcttcaactggaagagcggttactaccggttcactagctagctgctaatcgagctagttaccctatgaggtgacatgaagcgctcacggttactatgacggttagcttcacgactgttggtggcagtagcgtacgacttagctatagttccggacttacccttaagataacttcgtatagcatacattatacgaagttatgggcccacgcgtgaagagcggttaccagagctggtcacctttgtccaccaagatggaactgtcttcggccagaatggccatctggattcagcaggcctagaaggccatttatcgctatcaactttgtatagaaaagttgggccgaattcgagctcggtacggccagaatggcccggaccgaagcttcggccgcacactgatagtttaaactgaaggcgggaaacgacaatctgatcatgagcggagaattaagggagtcacgttatgacccccgccgatgacgcgggacaagccgttttacgtttggaactgacagaaccgcaacgttgaaggagccactcagccgcgggtttctggagtttaatgagctaagcacatacgtcagaaaccattattgcgcgttcaaaagtcgcctaaggtcactatcagctagcaaatatttcttgtcaaaaatgctccactgacgttccataaattcccctcggtatccaattactctatcagtgatagagtactggcgcgccactctatcagtgatagagtctagaggatcgctcaggaaggccgctgagatagaggcatggcggccaatgcgggcggcggtggagcgggaggaggcagcggcagcggcagcgtggctgcgccggcggtgtgccgccccagcggctcgcggtggacgccgacgccggagcagatcaggatgctgaaggagctctactacggctgcggcatccggtcgcccagctcggagcagatccagcgcatcaccgccatgctgcggcagcacggcaagatcgagggcaagaacgtcttctactggttccagaaccacaaggcccgcgagcgccagaagcgccgcctcaccagcctcgacgtcaacgtgcccgccgccggcgcggccgacgccaccaccagccaactcggcgtcctctcgctgtcgtcgccgccgccttcaggcgcggcgcctccctcgcccaccctcggcttctacgccgccggcaatggcggcggatcggctgtgctgctggacacgagttccgactggggcagcagcggcgctgccatggccaccgagacatgcttcctgcaggactacatgggcgtgacggacacgggcagctcgtcgcagtggccacgcttctcgtcgtcggacacgataatggcggcggccgcggcgcgggcggcgacgacgcgggcgcccgagacgctccctctcttcccgacctgcggcgacgacggcggcagcggtagcagcagctacttgccgttctggggtgccgcgtccacaactgccggcgccacttcttccgttgcgatccagcagcaacaccagctgcaggagcagtacagcttttacagcaacagcaacagcacccagctggccggcaccggcaaccaagacgtatcggcaacagcagcagcagccgccgccctggagctgagcctcagctcatggtgctccccttaccctgctgcagggagtatgtgagagcaacgcgagctgccactgctcttcactggtaccgttaacagatcattcgacaaagcagcattagtccgttgatcggtggaagaccactcgtcagtgttgagttgaatgtttgatcaataaaatacggcaatgctgtaagggttgttttttatgccattgataatacactgtactgttcagttgttgaactctatttcttagccatgccaagtgcttttcttattttgaataacattacagcaaaaagttgaaagacaaaaaaaaaaacccccgaacagagtgctttgggtcccaagcttctttagactgtgttcggcgttccccctaaatttctccccctatatctcactcacttgtcacatcagcgttctctttccccctatatctccacgctctacagcagttccacctatatcaaacctctataccccaccacaacaatattatatactttcatcttcaactaactcatgtaccttccaatttttttctactaataattatttacgtgcacagaaacttagcaaggagagagagagcggggtgacccaccttgctagttggatattacctcttctcttcaaagtatccttgaacgctcaccggttatcaaatctctacactatagctctgtagtcttgctagatagttagttctttagctctcggtgaccaagcttggcgcgatcaagcttatcgataccgtcgacctcgaagcttggtcacccggtccgggcctagaaggccagcttcaagtttgtacaaaaaagcaggctccggccagaatggcccggaccgggttaccgaattcttaccctagctccctgcggctgttacgcggtcccccatcaatcttctgttcttgcggttgtagcctgtgtaacagtgctagagtatgtatgataaataggttttaagtctgcttacatgacattttttattgtggaagagacatataaaaattagagagagtggttctcatgcaacggcggacggcccggtgctaaaagagcttcaagacaaaataatgaaacaggaagagagtagatttatctaagagccaactttattatatgaatgtgtttattgttggctttagatgatatggtaaggagttagagctaataatagataggctctattattattattattaattaaactcgctctaaggaggaaagtgggaggaagggacgaggacgaagactactggaagcatcgtgcatggatgatggatgtggtgtctcttaatgtaggtggccggaggatgtacgtgttaattgcgcgataagcactcagatccaaccgcaaactacctccacactgacacactgatagagagaaagagagacctccgacgactgccgccgcagatgagccacgtacgtatacgacgtctgccggccggctcaggctgccgccatcaccctgctcgaaagtcgcgttaggcggcgccagctacataggagtatctagtctagccagttagtatactactactgcgctgatgatgaattaactctgcatagatactgtacttgcctccctccaacacccaaccacctcctgctcggctcttaataacttggacacggatcgatgccatccaaggaagaacacgacgacgacgacggaacatccaccatgcaagcttgcatccatacgccgatacgcgtgcatccatccatccaccattatttccattttccaccgatcacacgtacacaggcctatttaaggagcgacatcccactgcaactctcctcaccactcatcaccagctagctctagcaaagcacttgccatctaccgaccgccgcattccaaacagcccgacgagctagcagagcggcaggcacctccctcctcaaggaacccatggccactgtgaacaactggctcgctttctccctctccccgcaggagctgccgccctcccagacgacggactccacactcatctcggccgccaccgccgaccatgtctccggcgatgtctgcttcaacatcccccaagattggagcatgaggggatcagagctttcggcgctcgtcgcggagccgaagctggaggacttcctcggcggcatctccttctccgagcagcatcacaaggccaactgcaacatgatacccagcactagcagcacagtttgctacgcgagctcaggtgctagcaccggctaccatcaccagctgtaccaccagcccaccagctcagcgctccacttcgcggactccgtaatggtggcttcctcggccggtgtccacgacggcggtgccatgctcagcgcggccgccgctaacggtgtcgctggcgctgccagtgccaacggcggcggcatcgggctgtccatgattaagaactggctgcggagccaaccggcgcccatgcagccgagggtggcggcggctgagggcgcgcaggggctctctttgtccatgaacatggcggggacgacccaaggcgctgctggcatgccacttctcgctggagagcgcgcacgggcgcccgagagtgtatcgacgtcagcacagggtggagccgtcgtcgtcacggcgccgaaggaggatagcggtggcagcggtgttgccggcgctctagtagccgtgagcacggacacgggtggcagcggcggcgcgtcggctgacaacacggcaaggaagacggtggacacgttcgggcagcgcacgtcgatttaccgtggcgtgacaaggcatagatggactgggagatatgaggcacatctttgggataacagttgcagaagggaagggcaaactcgtaagggtcgtcaagtctatttaggtggctatgataaagaggagaaagctgctagggcttatgatcttgctgctctgaagtactggggtgccacaacaacaacaaattttccagtgagtaactacgaaaaggagctcgaggacatgaagcacatgacaaggcaggagtttgtagcgtctctgagaaggaagagcagtggtttctccagaggtgcatccatttacaggggagtgactaggcatcaccaacatggaagatggcaagcacggattggacgagttgcagggaacaaggatctttacttgggcaccttcagcacccaggaggaggcagcggaggcgtacgacatcgcggcgatcaagttccgcggcctcaacgccgtcaccaacttcgacatgagccgctacgacgtgaagagcatcctggacagcagcgccctccccatcggcagcgccgccaagcgcctcaaggaggccgaggccgcagcgtccgcgcagcaccaccacgccggcgtggtgagctacgacgtcggccgcatcgcctcgcagctcggcgacggcggagccctggcggcggcgtacggcgcgcactaccacggcgccgcctggccgaccatcgcgttccagccgggcgccgccagcacaggcctgtaccacccgtacgcgcagcagccaatgcgcggcggcgggtggtgcaagcaggagcaggaccacgcggtgatcgcggccgcgcacagcctgcaggacctccaccacctgaacctgggcgcggccggcgcgcacgactttttctcggcagggcagcaggccgccgccgctgcgatgcacggcctgggtagcatcgacagtgcgtcgctcgagcacagcaccggctccaactccgtcgtctacaacggcggggtcggcgacagcaacggcgccagcgccgtcggcggcagtggcggtggctacatgatgccgatgagcgctgccggagcaaccactacatcggcaatggtgagccacgagcaggtgcatgcacgggcctacgacgaagccaagcaggctgctcagatggggtacgagagctacctggtgaacgcggagaacaatggtggcggaaggatgtctgcatgggggactgtcgtgtctgcagccgcggcggcagcagcaagcagcaacgacaacatggccgccgacgtcgggcatggcggcgcgcagctcttcagtgtctggaacgacacttaagcgtacctagtggtacctgacatcttatagtctgcaacctctcgtgtctgaattcctatctttatcaagtgttattgcttccacgactataggacagctttcgtcgaaagcttttgctcatgtgatctcgaaggattcatctagtctgatttttcgtgacttgtatcggttttattggattcatccaacatatatcaataaaaaatgagttgtgtttcctttcttcctagttcagttaaaattatttccctcctgcgcttgtgctgtaattgtctgtgtacctgttgtttgtgactgtgttagttcccttggatatgatttcgtatttgatatgtacatggagatagcttagcttcattattggagtatgaagttagtatgacatagtcactctcctggaaaattgacactgcaaaccatatttttattctgaaccacaaatcctagtcagtccgctggcatatgccgtccgtttgctgaatccagaacgtgggtttggagatgtacggctgagatgcctctatgcgaaggggatttcgtggtgaaacgagatgggagtagagcaacgcccgtggaagatgcttcaaacttccacacttttgagcaacgatcggcagtagtaaggtagacgatttcaagatcaaagcatatgaagataaacaacatcaacaacaaaatttgttggggttctatagagagaaacagagctacatacatacactgttttgtatctaccatctgagatgatgaaaagatgaaaaactaaagaatgccccggcgccaacgccaggacacgccgcgcgcgcgtcacccgagccatctcttgacccagccggcgctgtatatttacacacgttgcagcatcgatcaccacctgttcgatcgcgtcgccgtcaccggtaccgagctcgaattccggtccgggcctagaaggccgatctcccgggcacccagctttcttgtacaaagtggccgttaacggatcggccagatccctatagtattttaaaattgcattaacaaacatgtcctaattggtactcctgagatactataccctcctgttttaaaatagttggcattatcgaattatcattttactctttaatgttttctcttcttttaatatattttatgaattttaatgtattttaaaatgttatgcagttcgctctggacttttctgctgcgcctacacttgggtgtactgggcctaaattcagcctgaccgaccgcctgcattgaataatggatgagcaccggtaaaatccgcgtacccaactttcgagaagaaccgagacgtggcgggccgggccaccgacgcacggcaccagcgactgcacacgtcccgccggcgtacgtgtacgtgctgttccctcactggccgcccaatccactcatgcatgcccacgtacacccctgccgtggcgcgcccagatcctaatcctttcgccgttctgcacttctgctgcctataaatggcggcatcgaccgtcacctgcttcaccaccggcgagccacatcgagaacacgatcgagcacacaagcacgaagactcgtttaggagaaaccacaaaccaccaagccgtgcaagcaccaagcttggtcacccggtccgggcctagaaggccagcttcaagtttgtacaaaaaagcaggcttcgaaggagatagaaccgatccaccatgtccaacctgctcacggttcaccagaaccttccggctcttccagtggacgcgacgtccgatgaagtcaggaagaacctcatggacatgttccgcgacaggcaagcgttcagcgagcacacctggaagatgctgctctccgtctgccgctcctgggctgcatggtgcaagctgaacaacaggaagtggttccccgctgagcccgaggacgtgagggattaccttctgtacctgcaagcgcgaggtttgtttctgcttctacctttgatatatatataataattatcattaattagtagtaatataatatttcaaatatttttttcaaaataaaagaatgtagtatatagcaattgcttttctgtagtttataagtgtgtatattttaatttataacttttctaatatatgaccaaaacatggtgatgcctaggtctggcagtgaagaccatccagcaacaccttggacaactgaacatgcttcacaggcgctccggcctcccgcgccccagcgactcgaacgccgtgagcctcgtcatgcgccgcatcaggaaggaaaacgtcgatgccggcgaaagggcaaagcaggccctcgcgttcgagaggaccgatttcgaccaggtccgcagcctgatggagaacagcgacaggtgccaggacattaggaacctggcgttcctcggaattgcatacaacacgctcctcaggatcgcggaaattgcccgcattcgcgtgaaggacattagccgcaccgacggcggcaggatgcttatccacattggcaggaccaagacgctcgtttccaccgcaggcgtcgaaaaggccctcagcctcggagtgaccaagctcgtcgaacgctggatctccgtgtccggcgtcgcggacgacccaaacaactacctcttctgccgcgtccgcaagaacggggtggctgcccctagcgccaccagccaactcagcacgagggccttggaaggtattttcgaggccacccaccgcctgatctacggcgcgaaggatgacagcggtcaacgctacctcgcatggtccgggcactccgcccgcgttggagctgctagggacatggcccgcgccggtgtttccatccccgaaatcatgcaggcgggtggatggacgaacgtgaacattgtcatgaactacattcgcaaccttgacagcgagacgggcgcaatggttcgcctcctggaagatggtgactgagctagacccagctttcttgtacaaagtggccgttaacggatccagacttgtccatcttctggattggccaacttaattaatgtatgaaataaaaggatgcacacatagtgacatgctaatcactataatgtgggcatcaaagttgtgtgttatgtgtaattactagttatctgaataaaagagaaagagatcatccatatttcttatcctaaatgaatgtcacgtgtctttataattctttgatgaaccagatgcatttcattaaccaaatccatatacatataaatattaatcatatataattaatatcaattgggttagcaaaacaaatctagtctaggtgtgttttgcgaatgcggccgccaccgcggtggagctcgaattccggtccgggcctagaaggccagcttcggccgccccgggcaactttattatacaaagttgatagataaatcagatatctggttcctaaggacccggcggaccgattaaactgattcggtccgacgcgttacctaataacttcgtatagcatacattatacgaagttattagctaactaactagtaagcttggtcacccggtccgtcaatattctgattccgatgacttcgtaggttcctagctcaagccgctcgtgtccaagcgtcacttacgattagctaatgattacggcatctaggaccgactagtggcgcgccgactagctagctaaggtacgacttagctatagttccggacttaccggcgccgctagcctgcagtgcagcgtgacccggtcgtgcccctctctagagataatgagcattgcatgtctaagttataaaaaattaccacatattttttttgtcacacttgtttgaagtgcagtttatctatctttatacatatatttaaactttactctacgaataatataatctatagtactacaataatatcagtgttttagagaatcatataaatgaacagttagacatggtctaaaggacaattgagtattttgacaacaggactctacagttttatctttttagtgtgcatgtgttctcctttttttttgcaaatagcttcacctatataatacttcatccattttattagtacatccatttagggtttagggttaatggtttttatagactaatttttttagtacatctattttattctattttagcctctaaattaagaaaactaaaactctattttagtttttttatttaataatttagatataaaatagaataaaataaagtgactaaaaattaaacaaataccctttaagaaattaaaaaaactaaggaaacatttttcttgtttcgagtagataatgccagcctgttaaacgccgtcgacgagtctaacggacaccaaccagcgaaccagcagcgtcgcgtcgggccaagcgaagcagacggcacggcatctctgtcgctgcctctggacccctctcgagagttccgctccaccgttggacttgctccgctgtcggcatccagaaattgcgtggcggagcggcagacgtgagccggcacggcaggcggcctcctcctcctctcacggcaccggcagctacgggggattcctttcccaccgctccttcgctttcccttcctcgcccgccgtaataaatagacaccccctccacaccctctttccccaacctcgtgttgttcggagcgcacacacacacaaccagatctcccccaaatccacccgtcggcacctccgcttcaaggtacgccgctcgtcctcccccccccccctctctaccttctctagatcggcgttccggtccatgcatggttagggcccggtagttctacttctgttcatgtttgtgttagatccgtgtttgtgttagatccgtgctgctagcgttcgtacacggatgcgacctgtacgtcagacacgttctgattgctaacttgccagtgtttctctttggggaatcctgggatggctctagccgttccgcagacgggatcgatttcatgattttttttgtttcgttgcatagggtttggtttgcccttttcctttatttcaatatatgccgtgcacttgtttgtcgggtcatcttttcatgcttttttttgtcttggttgtgatgatgtggtctggttgggcggtcgttctagatcggagtagaattctgtttcaaactacctggtggatttattaattttggatctgtatgtgtgtgccatacatattcatagttacgaattgaagatgatggatggaaatatcgatctaggataggtatacatgttgatgcgggttttactgatgcatatacagagatgctttttgttcgcttggttgtgatgatgtggtgtggttgggcggtcgttcattcgttctagatcggagtagaatactgtttcaaactacctggtgtatttattaattttggaactgtatgtgtgtgtcatacatcttcatagttacgagtttaagatggatggaaatatcgatctaggataggtatacatgttgatgtgggttttactgatgcatatacatgatggcatatgcagcatctattcatatgctctaaccttgagtacctatctattataataaacaagtatgttttataattattttgatcttgatatacttggatgatggcatatgcagcagctatatgtggatttttttagccctgccttcatacgctatttatttgcttggtactgtttcttttgtcgatgctcaccctgttgtttggtgttacttctgcaggtcgactctagaggatcaattcgctagcgaagttcctattccgaagttcctattctctagaaagtataggaacttcagatccaccgggatccaccatggttgaacaagatggattgcacgcaggttctccggccgcttgggtggagaggctattcggctatgactgggcacaacagacaatcggctgctctgatgccgccgtgttccggctgtcagcgcaggggcgcccggttctttttgtcaagaccgacctgtccggtgccctgaatgaactgcaggacgaggcagcgcggctatcgtggctggccacgacgggcgttccttgcgcagctgtgctcgacgttgtcactgaagcgggaagggactggctgctattgggcgaagtgccggggcaggatctcctgtcatctcaccttgctcctgccgagaaagtatccatcatggctgatgcaatgcggcggctgcatacgcttgatccggctacctgcccattcgaccaccaagcgaaacatcgcatcgagcgagcacgtactcggatggaagccggtcttgtcgatcaggatgatctggacgaagagcatcaggggctcgcgccagccgaactgttcgccaggctcaaggcgcgcatgcccgacggcgatgatctcgtcgtgacccatggcgatgcctgcttgccgaatatcatggtggaaaatggccgcttttctggattcatcgactgtggccggctgggtgtggcggaccgctatcaggacatagcgttggctacccgtgatattgctgaagagcttggcggcgaatgggctgaccgcttcctcgtgctttacggtatcgccgctcccgattcgcagcgcatcgccttctatcgccttcttgacgagttcttctgaggatccaccatggttaacctagacttgtccatcttctggattggccaacttaattaatgtatgaaataaaaggatgcacacatagtgacatgctaatcactataatgtgggcatcaaagttgtgtgttatgtgtaattactagttatctgaataaaagagaaagagatcatccatatttcttatcctaaatgaatgtcacgtgtctttataattctttgatgaaccagatgcatttcattaaccaaatccatatacatataaatattaatcatatataattaatatcaattgggttagcaaaacaaatctagtctaggtgtgttttgcaagcttgcatgcctgcagtgcagcgtgacccggtcgtgcccctctctagagataatgagcattgcatgtctaagttataaaaaattaccacatattttttttgtcacacttgtttgaagtgcagtttatctatctttatacatatatttaaactttactctacgaataatataatctatagtactacaataatatcagtgttttagagaatcatataaatgaacagttagacatggtctaaaggacaattgagtattttgacaacaggactctacagttttatctttttagtgtgcatgtgttctcctttttttttgcaaatagcttcacctatataatacttcatccattttattagtacatccatttagggtttagggttaatggtttttatagactaatttttttagtacatctattttattctattttagcctctaaattaagaaaactaaaactctattttagtttttttatttaataatttagatataaaatagaataaaataaagtgactaaaaattaaacaaataccctttaagaaattaaaaaaactaaggaaacatttttcttgtttcgagtagataatgccagcctgttaaacgccgtcgacgagtctaacggacaccaaccagcgaaccagcagcgtcgcgtcgggccaagcgaagcagacggcacggcatctctgtcgctgcctctggacccctctcgagagttccgctccaccgttggacttgctccgctgtcggcatccagaaattgcgtggcggagcggcagacgtgagccggcacggcaggcggcctcctcctcctctcacggcaccggcagctacgggggattcctttcccaccgctccttcgctttcccttcctcgcccgccgtaataaatagacaccccctccacaccctctttccccaacctcgtgttgttcggagcgcacacacacacaaccagatctcccccaaatccacccgtcggcacctccgcttcaaggtacgccgctcgtcctcccccccccccctctctaccttctctagatcggcgttccggtccatgcatggttagggcccggtagttctacttctgttcatgtttgtgttagatccgtgtttgtgttagatccgtgctgctagcgttcgtacacggatgcgacctgtacgtcagacacgttctgattgctaacttgccagtgtttctctttggggaatcctgggatggctctagccgttccgcagacgggatcgatttcatgattttttttgtttcgttgcatagggtttggtttgcccttttcctttatttcaatatatgccgtgcacttgtttgtcgggtcatcttttcatgcttttttttgtcttggttgtgatgatgtggtctggttgggcggtcgttctagatcggagtagaattctgtttcaaactacctggtggatttattaattttggatctgtatgtgtgtgccatacatattcatagttacgaattgaagatgatggatggaaatatcgatctaggataggtatacatgttgatgcgggttttactgatgcatatacagagatgctttttgttcgcttggttgtgatgatgtggtgtggttgggcggtcgttcattcgttctagatcggagtagaatactgtttcaaactacctggtgtatttattaattttggaactgtatgtgtgtgtcatacatcttcatagttacgagtttaagatggatggaaatatcgatctaggataggtatacatgttgatgtgggttttactgatgcatatacatgatggcatatgcagcatctattcatatgctctaaccttgagtacctatctattataataaacaagtatgttttataattattttgatcttgatatacttggatgatggcatatgcagcagctatatgtggatttttttagccctgccttcatacgctatttatttgcttggtactgtttcttttgtcgatgctcaccctgttgtttggtgttacttctgcaggtcgactctagaggatccaccggtcgccaccatggccctgtccaacaagttcatcggcgacgacatgaagatgacctaccacatggacggctgcgtgaacggccactacttcaccgtgaagggcgagggcagcggcaagccctacgagggcacccagacctccaccttcaaggtgaccatggccaacggcggccccctggccttctccttcgacatcctgtccaccgtgttcatgtacggcaaccgctgcttcaccgcctaccccaccagcatgcccgactacttcaagcaggccttccccgacggcatgtcctacgagagaaccttcacctacgaggacggcggcgtggccaccgccagctgggagatcagcctgaagggcaactgcttcgagcacaagtccaccttccacggcgtgaacttccccgccgacggccccgtgatggccaagaagaccaccggctgggacccctccttcgagaagatgaccgtgtgcgacggcatcttgaagggcgacgtgaccgccttcctgatgctgcagggcggcggcaactacagatgccagttccacacctcctacaagaccaagaagcccgtgaccatgccccccaaccacgtggtggagcaccgcatcgccagaaccgacctggacaagggcggcaacagcgtgcagctgaccgagcacgccgtggcccacatcacctccgtggtgcccttctgaagcggccgcaacctagacttgtccatcttctggattggccaacttaattaatgtatgaaataaaaggatgcacacatagtgacatgctaatcactataatgtgggcatcaaagttgtgtgttatgtgtaattactagttatctgaataaaagagaaagagatcatccatatttcttatcctaaatgaatgtcacgtgtctttataattctttgatgaaccagatgcatttcattaaccaaatccatatacatataaatattaatcatatataattaatatcaattgggttagcaaaacaaatctagtctaggtgtgttttgcgaatgcggccgccaccgcggtggagctcgaatgcggccctagcgtatacgaagttcctattccgaagttcctattcttcaaaaagtataggaacttctgtaccgagctcgaattcattccgattaatcgtggcctcttgctcttcaggatgaagagctatgtttaaacgtgcaagcgctactagacaattcagtacattaaaaacgtccgcaatgtgttattaagttgtctaagcgtcaatttgtttacaccacaatatatcctgcca

SEQ ID NO: 8 - DNA, 17189 bp, Artificial sequence
  PHP81858
gtttacccgccaatatatcctgtcaaacactgcggccgcacttgaccgcggatggagccggagctgtggtgaggccatcgacgggaggtgggggagaacacagtctcagtgttctttgtgagtccgcaaggtttttagcttttctgtattaattaaggttgctgttggctgtagaatacggtcgtggaagagctgtatcggtagctactacgtaagctattatatactggaagtctggagctcgtcgatctccggtcgtcttcctccatttctcctcgtcttgctttgactgctgctaccatttgcttctgttttctgatgaagcatgccatgtcggccaccagtgtttgtgtggtttttgcagggaatggctttcaagtgctgtgattgaatggccctcgtcgtcctcggctgagctcacatggacgcgtcatgtgagtgagatatatgatcatatgatgagtggggttcgggtgagtgcgtacttgaagtaggatcccgctttcactcattcattcattggcctttaaaccgggaaattttcgcgaggagatggagggaagcaagcagggtgacgagtgcagagtgccgcgagcgctttgtcaaaaggcaccgccgtaggcaaaaaaatcaatggccctgactgactcgatggtagtactactgtagagactagagagggttgctccccatatcttcgtgtgacttttactccagcattgcatttccgtcattgagacgttaattaatagcagctttcgggacagatgactgtggccatgtttcgtcacggccgcttcgtgccagctgggggtactatagtactgtgattttgttagtaaaaactttcattaggccaccattgacgaccgggccttcgcttttgctgcgctaattaaccatttcccggcgaccgaagggaacatgaacatgccccgacacatgagggcatgaggactagtgttctccctgtcgttcgttgacttgactagtgatagtttaaacgctcttcaactggaagagcggttactaccggttcactagctagctgctaatcgagctagttaccctatgaggtgacatgaagcgctcacggttactatgacggttagcttcacgactgttggtggcagtagcgtacgacttagctatagttccggacttacccttaagataacttcgtatagcatacattatacgaagttatgggcccacgcgtgaagagcggttaccagagctggtcacctttgtccaccaagatggaactgtcttcggccagaatggccatctggattcagcaggcctagaaggccatttatcgctatcaactttgtatagaaaagttgggccgaattcgagctcggtacggccagaatccggtaagtgactagggtcacgtgaccctagtcacttaaattcggccagaatggccatctggattcagcaggcgaggccggccacactgatagtttaaactgaaggcgggaaacgacaatctgatcatgagcggagaattaagggagtcacgttatgacccccgccgatgacgcgggacaagccgttttacgtttggaactgacagaaccgcaacgattgaaggagccactcagccgcgggtttctggagtttaatgagctaagcacatacgtcagaaaccattattgcgcgttcaaaagtcgcctaaggtcactatcagctagcaaatatttcttgtcaaaaatgctccactgacgttccataaattcccctcggtatccaattagagtctcatattcactctcccggcggatctcgactctagaggatcgctcaggaaggccgctgagatagagccatggcggccaatgcgggcggcggtggagcgggaggaggcagcggcagcggcagcgtggctgcgccggcggtgtgccgccccagcggctcgcggtggacgccgacgccggagcagatcaggatgctgaaggagctctactacggctgcggcatccggtcgcccagctcggagcagatccagcgcatcaccgccatgctgcggcagcacggcaagatcgagggcaagaacgtcttctactggttccagaaccacaaggcccgcgagcgccagaagcgccgcctcaccagcctcgacgtcaacgtgcccgccgccggcgcggccgacgccaccaccagccaactcggcgtcctctcgctgtcgtcgccgccgccttcaggcgcggcgcctccctcgcccaccctcggcttctacgccgccggcaatggcggcggatcggctgtgctgctggacacgagttccgactggggcagcagcggcgctgctatggccaccgagacatgcttcctgcaggactacatgggcgtgacggacacgggcagctcgtcgcagtggccacgcttctcgtcgtcggacacgataatggcggcggccgcggcgcgggcggcgacgacgcgggcgcccgagacgctccctctcttcccgacctgcggcgacgacggcggcagcggtagcagcagctacttgccgttctggggtgccgcgtccacaactgccggcgccacttcttccgttgcgatccaacagcaacaccagctgcaggagcagtacagcttttacagcaacagcaacagcacccagctggccggcaccggcaaccaagacgtatcggcaacagcagcagcagccgccgccctggagctgagcctcagctcatggtgctccccttaccctgctgcagggagtatgtgagagcaacgcgagctgccactgctcttcactgatgtctctggaatggaaggaggaggaagtgagcatagcgttggtgcgttgctgtcaagggcgaattgtaccacatggttaacctagacttgtccatcttctggattggccaacttaattaatgtatgaaataaaaggatgcacacatagtgacatgctaatcactataatgtgggcatcaaagttgtgtgttatgtgtaattactagttatctgaataaaagagaaagagatcatccatatttcttatcctaaatgaatgtcacgtgtctttataattctttgatgaaccagatgcatttcattaaccaaatccatatacatataaatattaatcatatataattaatatcaattgggttagcaaaacaaatctagtctaggtgtgttttgcgaatgcggccgccaccgcggtggagctcgaattccggtccgggttaccagagctggtcacctaagtgactagggtcacgtgaccctagtcacttattcccagcttcaagtttgtacaaaaaagcaggctccggccagaatggcccggaccgggttaccgaattcgagctcggtaccatttaaattgcgcccgccacggccgtggaggtcgtattccggtcagcttgcatccctgcagtgcagcgtgacccggtcgtgcccctctctagagataatgagcattgcatgtctaagttataaaaaattaccacatattttttttgtcacacttgtttgaagtgcagtttatctatctttatacatatatttaaactttactctacgaataatataatctatagtactacaataatatcagtgttttagagaatcatataaatgaacagttagacatggtctaaaggacaattgagtattttgacaacaggactctacagttttatctttttagtgtgcatgtgttctcctttttttttgcaaatagcttcacctatataatacttcatccattttattagtacatccatttagggtttagggttaatggtttttatagactaatttttttagtacatctattttattctattttagcctctaaattaagaaaactaaaactctattttagtttttttatttaataatttagatataaaatagaataaaataaagtgactaaaaattaaacaaataccctttaagaaattaaaaaaactaaggaaacatttttcttgtttcgagtagataatgccagcctgttaaacgccgtcgacgagtctaacggacaccaaccagcgaaccagcagcgtcgcgtcgggccaagcgaagcagacggcacggcatctctgtcgctgcctctggacccctctcgagagttccgctccaccgttggacttgctccgctgtcggcatccagaaattgcgtggcggagcggcagacgtgagccggcacggcaggcggcctcctcctcctctcacggcaccggcagctacgggggattcctttcccaccgctccttcgctttcccttcctcgcccgccgtaataaatagacaccccctccacaccctctttccccaacctcgtgttgttcggagcgcacacacacacaaccagatctcccccaaatccacccgtcggcacctccgcttcaaggtacgccgctcgtcctcccccccccccctctctaccttctctagatcggcgttccggtccatgcatggttagggcccggtagttctacttctgttcatgtttgtgttagatccgtgtttgtgttagatccgtgctgctagcgttcgtacacggatgcgacctgtacgtcagacacgttctgattgctaacttgccagtgtttctctttggggaatcctgggatggctctagccgttccgcagacgggatcgatttcatgattttttttgtttcgttgcatagggtttggtttgcccttttcctttatttcaatatatgccgtgcacttgtttgtcgggtcatcttttcatgcttttttttgtcttggttgtgatgatgtggtctggttgggcggtcgttctagatcggagtagaattctgtttcaaactacctggtggatttattaattttggatctgtatgtgtgtgccatacatattcatagttacgaattgaagatgatggatggaaatatcgatctaggataggtatacatgttgatgcgggttttactgatgcatatacagagatgctttttgttcgcttggttgtgatgatgtggtgtggttgggcggtcgttcattcgttctagatcggagtagaatactgtttcaaactacctggtgtatttattaattttggaactgtatgtgtgtgtcatacatcttcatagttacgagtttaagatggatggaaatatcgatctaggataggtatacatgttgatgtgggttttactgatgcatatacatgatggcatatgcagcatctattcatatgctctaaccttgagtacctatctattataataaacaagtatgttttataattattttgatcttgatatacttggatgatggcatatgcagcagctatatgtggatttttttagccctgccttcatacgctatttatttgcttggtactgtttcttttgtcgatgctcaccctgttgtttggtgttacttctgcaggtcgactctagaggatccatggccactgtgaacaactggctcgctttctccctctccccgcaggagctgccgccctcccagacgacggactccacactcatctcggccgccaccgccgaccatgtctccggcgatgtctgcttcaacatcccccaagattggagcatgaggggatcagagctttcggcgctcgtcgcggagccgaagctggaggacttcctcggcggcatctccttctccgagcagcatcacaaggccaactgcaacatgatacccagcactagcagcacagtttgctacgcgagctcaggtgctagcaccggctaccatcaccagctgtaccaccagcccaccagctcagcgctccacttcgcggactccgtaatggtggcttcctcggccggtgtccacgacggcggtgccatgctcagcgcggccgccgctaacggtgtcgctggcgctgccagtgccaacggcggcggcatcgggctgtccatgattaagaactggctgcggagccaaccggcgcccatgcagccgagggtggcggcggctgagggcgcgcaggggctctctttgtccatgaacatggcggggacgacccaaggcgctgctggcatgccacttctcgctggagagcgcgcacgggcgcccgagagtgtatcgacgtcagcacagggtggagccgtcgtcgtcacggcgccgaaggaggatagcggtggcagcggtgttgccggcgctctagtagccgtgagcacggacacgggtggcagcggcggcgcgtcggctgacaacacggcaaggaagacggtggacacgttcgggcagcgcacgtcgatttaccgtggcgtgacaaggcatagatggactgggagatatgaggcacatctttgggataacagttgcagaagggaagggcaaactcgtaagggtcgtcaagtctatttaggtggctatgataaagaggagaaagctgctagggcttatgatcttgctgctctgaagtactggggtgccacaacaacaacaaattttccagtgagtaactacgaaaaggagctcgaggacatgaagcacatgacaaggcaggagtttgtagcgtctctgagaaggaagagcagtggtttctccagaggtgcatccatttacaggggagtgactaggcatcaccaacatggaagatggcaagcacggattggacgagttgcagggaacaaggatctttacttgggcaccttcagcacccaggaggaggcagcggaggcgtacgacatcgcggcgatcaagttccgcggcctcaacgccgtcaccaacttcgacatgagccgctacgacgtgaagagcatcctggacagcagcgccctccccatcggcagcgccgccaagcgcctcaaggaggccgaggccgcagcgtccgcgcagcaccaccacgccggcgtggtgagctacgacgtcggccgcatcgcctcgcagctcggcgacggcggagccctggcggcggcgtacggcgcgcactaccacggcgccgcctggccgaccatcgcgttccagccgggcgccgccagcacaggcctgtaccacccgtacgcgcagcagccaatgcgcggcggcgggtggtgcaagcaggagcaggaccacgcggtgatcgcggccgcgcacagcctgcaggacctccaccacctgaacctgggcgcggccggcgcgcacgactttttctcggcagggcagcaggccgccgccgctgcgatgcacggcctgggtagcatcgacagtgcgtcgctcgagcacagcaccggctccaactccgtcgtctacaacggcggggtcggcgacagcaacggcgccagcgccgtcggcggcagtggcggtggctacatgatgccgatgagcgctgccggagcaaccactacatcggcaatggtgagccacgagcaggtgcatgcacgggcctacgacgaagccaagcaggctgctcagatggggtacgagagctacctggtgaacgcggagaacaatggtggcggaaggatgtctgcatgggggactgtcgtgtctgcagccgcggcggcagcagcaagcagcaacgacaacatggccgccgacgtcgggcatggcggcgcgcagctcttcagtgtctggaacgacacttaagcgtacgtgccggcctggctctccgaaagggcgtattccagcacactggcggccgttactagacccaacctagacttgtccatcttctggattggccaacttaattaatgtatgaaataaaaggatgcacacatagtgacatgctaatcactataatgtgggcatcaaagttgtgtgttatgtgtaattactagttatctgaataaaagagaaagagatcatccatatttcttatcctaaatgaatgtcacgtgtctttataattctttgatgaaccagatgcatttcattaaccaaatccatatacatataaatattaatcatatataattaatatcaattgggttagcaaaacaaatctagtctaggtgtgttttgcgaatgcggcctccgggcacccagctttcttgtacaaagtggccgttaacggatcggccagatccctatagtattttaaaattgcattaacaaacatgtcctaattggtactcctgagatactataccctcctgttttaaaatagttggcattatcgaattatcattttactctttaatgttttctcttcttttaatatattttatgaattttaatgtattttaaaatgttatgcagttcgctctggacttttctgctgcgcctacacttgggtgtactgggcctaaattcagcctgaccgaccgcctgcattgaataatggatgagcaccggtaaaatccgcgtacccaactttcgagaagaaccgagacgtggcgggccgggccaccgacgcacggcaccagcgactgcacacgtcccgccggcgtacgtgtacgtgctgttccctcactggccgcccaatccactcatgcatgcccacgtacacccctgccgtggcgcgcccagatcctaatcctttcgccgttctgcacttctgctgcctataaatggcggcatcgaccgtcacctgcttcaccaccggcgagccacatcgagaacacgatcgagcacacaagcacgaagactcgtttaggagaaaccacaaaccaccaagccgtgcaagcaccaagcttggtcacccggtccgggcctagaaggccagcttcaagtttgtacaaaaaagcaggcttcgaaggagatagaaccgatccaccatgtccaacctgctcacggttcaccagaaccttccggctcttccagtggacgcgacgtccgatgaagtcaggaagaacctcatggacatgttccgcgacaggcaagcgttcagcgagcacacctggaagatgctgctctccgtctgccgctcctgggctgcatggtgcaagctgaacaacaggaagtggttccccgctgagcccgaggacgtgagggattaccttctgtacctgcaagcgcgaggtttgtttctgcttctacctttgatatatatataataattatcattaattagtagtaatataatatttcaaatatttttttcaaaataaaagaatgtagtatatagcaattgcttttctgtagtttataagtgtgtatattttaatttataacttttctaatatatgaccaaaacatggtgatgcctaggtctggcagtgaagaccatccagcaacaccttggacaactgaacatgcttcacaggcgctccggcctcccgcgccccagcgactcgaacgccgtgagcctcgtcatgcgccgcatcaggaaggaaaacgtcgatgccggcgaaagggcaaagcaggccctcgcgttcgagaggaccgatttcgaccaggtccgcagcctgatggagaacagcgacaggtgccaggacattaggaacctggcgttcctcggaattgcatacaacacgctcctcaggatcgcggaaattgcccgcattcgcgtgaaggacattagccgcaccgacggcggcaggatgcttatccacattggcaggaccaagacgctcgtttccaccgcaggcgtcgaaaaggccctcagcctcggagtgaccaagctcgtcgaacgctggatctccgtgtccggcgtcgcggacgacccaaacaactacctcttctgccgcgtccgcaagaacggggtggctgcccctagcgccaccagccaactcagcacgagggccttggaaggtattttcgaggccacccaccgcctgatctacggcgcgaaggatgacagcggtcaacgctacctcgcatggtccgggcactccgcccgcgttggagctgctagggacatggcccgcgccggtgtttccatccccgaaatcatgcaggcgggtggatggacgaacgtgaacattgtcatgaactacattcgcaaccttgacagcgagacgggcgcaatggttcgcctcctggaagatggtgactgagctagacccagctttcttgtacaaagtggccgttaacggatccagacttgtccatcttctggattggccaacttaattaatgtatgaaataaaaggatgcacacatagtgacatgctaatcactataatgtgggcatcaaagttgtgtgttatgtgtaattactagttatctgaataaaagagaaagagatcatccatatttcttatcctaaatgaatgtcacgtgtctttataattctttgatgaaccagatgcatttcattaaccaaatccatatacatataaatattaatcatatataattaatatcaattgggttagcaaaacaaatctagtctaggtgtgttttgcgaatgcggccgccaccgcggtggagctcgaattccggtccgggcctagaaggccagcttcggccgccccgggcaactttattatacaaagttgatagataaatcagatatctggttcctaaggacccggcggaccgattaaactgattcggtccgacgcgttacctaataacttcgtatagcatacattatacgaagttattagctaactaactagtaagcttggtcacccggtccgtcaatattctgattccgatgacttcgtaggttcctagctcaagccgctcgtgtccaagcgtcacttacgattagctaatgattacggcatctaggaccgactagtggcgcgccgactagctagctaaggtacgacttagctatagttccggacttaccggcgccgctagcctgcagtgcagcgtgacccggtcgtgcccctctctagagataatgagcattgcatgtctaagttataaaaaattaccacatattttttttgtcacacttgtttgaagtgcagtttatctatctttatacatatatttaaactttactctacgaataatataatctatagtactacaataatatcagtgttttagagaatcatataaatgaacagttagacatggtctaaaggacaattgagtattttgacaacaggactctacagttttatctttttagtgtgcatgtgttctcctttttttttgcaaatagcttcacctatataatacttcatccattttattagtacatccatttagggtttagggttaatggtttttatagactaatttttttagtacatctattttattctattttagcctctaaattaagaaaactaaaactctattttagtttttttatttaataatttagatataaaatagaataaaataaagtgactaaaaattaaacaaataccctttaagaaattaaaaaaactaaggaaacatttttcttgtttcgagtagataatgccagcctgttaaacgccgtcgacgagtctaacggacaccaaccagcgaaccagcagcgtcgcgtcgggccaagcgaagcagacggcacggcatctctgtcgctgcctctggacccctctcgagagttccgctccaccgttggacttgctccgctgtcggcatccagaaattgcgtggcggagcggcagacgtgagccggcacggcaggcggcctcctcctcctctcacggcaccggcagctacgggggattcctttcccaccgctccttcgctttcccttcctcgcccgccgtaataaatagacaccccctccacaccctctttccccaacctcgtgttgttcggagcgcacacacacacaaccagatctcccccaaatccacccgtcggcacctccgcttcaaggtacgccgctcgtcctcccccccccccctctctaccttctctagatcggcgttccggtccatgcatggttagggcccggtagttctacttctgttcatgtttgtgttagatccgtgtttgtgttagatccgtgctgctagcgttcgtacacggatgcgacctgtacgtcagacacgttctgattgctaacttgccagtgtttctctttggggaatcctgggatggctctagccgttccgcagacgggatcgatttcatgattttttttgtttcgttgcatagggtttggtttgcccttttcctttatttcaatatatgccgtgcacttgtttgtcgggtcatcttttcatgcttttttttgtcttggttgtgatgatgtggtctggttgggcggtcgttctagatcggagtagaattctgtttcaaactacctggtggatttattaattttggatctgtatgtgtgtgccatacatattcatagttacgaattgaagatgatggatggaaatatcgatctaggataggtatacatgttgatgcgggttttactgatgcatatacagagatgctttttgttcgcttggttgtgatgatgtggtgtggttgggcggtcgttcattcgttctagatcggagtagaatactgtttcaaactacctggtgtatttattaattttggaactgtatgtgtgtgtcatacatcttcatagttacgagtttaagatggatggaaatatcgatctaggataggtatacatgttgatgtgggttttactgatgcatatacatgatggcatatgcagcatctattcatatgctctaaccttgagtacctatctattataataaacaagtatgttttataattattttgatcttgatatacttggatgatggcatatgcagcagctatatgtggatttttttagccctgccttcatacgctatttatttgcttggtactgtttcttttgtcgatgctcaccctgttgtttggtgttacttctgcaggtcgactctagaggatcaattcgctagcgaagttcctattccgaagttcctattctctagaaagtataggaacttcagatccaccgggatccaccatggttgaacaagatggattgcacgcaggttctccggccgcttgggtggagaggctattcggctatgactgggcacaacagacaatcggctgctctgatgccgccgtgttccggctgtcagcgcaggggcgcccggttctttttgtcaagaccgacctgtccggtgccctgaatgaactgcaggacgaggcagcgcggctatcgtggctggccacgacgggcgttccttgcgcagctgtgctcgacgttgtcactgaagcgggaagggactggctgctattgggcgaagtgccggggcaggatctcctgtcatctcaccttgctcctgccgagaaagtatccatcatggctgatgcaatgcggcggctgcatacgcttgatccggctacctgcccattcgaccaccaagcgaaacatcgcatcgagcgagcacgtactcggatggaagccggtcttgtcgatcaggatgatctggacgaagagcatcaggggctcgcgccagccgaactgttcgccaggctcaaggcgcgcatgcccgacggcgatgatctcgtcgtgacccatggcgatgcctgcttgccgaatatcatggtggaaaatggccgcttttctggattcatcgactgtggccggctgggtgtggcggaccgctatcaggacatagcgttggctacccgtgatattgctgaagagcttggcggcgaatgggctgaccgcttcctcgtgctttacggtatcgccgctcccgattcgcagcgcatcgccttctatcgccttcttgacgagttcttctgaggatccaccatggttaacctagacttgtccatcttctggattggccaacttaattaatgtatgaaataaaaggatgcacacatagtgacatgctaatcactataatgtgggcatcaaagttgtgtgttatgtgtaattactagttatctgaataaaagagaaagagatcatccatatttcttatcctaaatgaatgtcacgtgtctttataattctttgatgaaccagatgcatttcattaaccaaatccatatacatataaatattaatcatatataattaatatcaattgggttagcaaaacaaatctagtctaggtgtgttttgcaagcttgcatgcctgcagtgcagcgtgacccggtcgtgcccctctctagagataatgagcattgcatgtctaagttataaaaaattaccacatattttttttgtcacacttgtttgaagtgcagtttatctatctttatacatatatttaaactttactctacgaataatataatctatagtactacaataatatcagtgttttagagaatcatataaatgaacagttagacatggtctaaaggacaattgagtattttgacaacaggactctacagttttatctttttagtgtgcatgtgttctcctttttttttgcaaatagcttcacctatataatacttcatccattttattagtacatccatttagggtttagggttaatggtttttatagactaatttttttagtacatctattttattctattttagcctctaaattaagaaaactaaaactctattttagtttttttatttaataatttagatataaaatagaataaaataaagtgactaaaaattaaacaaataccctttaagaaattaaaaaaactaaggaaacatttttcttgtttcgagtagataatgccagcctgttaaacgccgtcgacgagtctaacggacaccaaccagcgaaccagcagcgtcgcgtcgggccaagcgaagcagacggcacggcatctctgtcgctgcctctggacccctctcgagagttccgctccaccgttggacttgctccgctgtcggcatccagaaattgcgtggcggagcggcagacgtgagccggcacggcaggcggcctcctcctcctctcacggcaccggcagctacgggggattcctttcccaccgctccttcgctttcccttcctcgcccgccgtaataaatagacaccccctccacaccctctttccccaacctcgtgttgttcggagcgcacacacacacaaccagatctcccccaaatccacccgtcggcacctccgcttcaaggtacgccgctcgtcctcccccccccccctctctaccttctctagatcggcgttccggtccatgcatggttagggcccggtagttctacttctgttcatgtttgtgttagatccgtgtttgtgttagatccgtgctgctagcgttcgtacacggatgcgacctgtacgtcagacacgttctgattgctaacttgccagtgtttctctttggggaatcctgggatggctctagccgttccgcagacgggatcgatttcatgattttttttgtttcgttgcatagggtttggtttgcccttttcctttatttcaatatatgccgtgcacttgtttgtcgggtcatcttttcatgcttttttttgtcttggttgtgatgatgtggtctggttgggcggtcgttctagatcggagtagaattctgtttcaaactacctggtggatttattaattttggatctgtatgtgtgtgccatacatattcatagttacgaattgaagatgatggatggaaatatcgatctaggataggtatacatgttgatgcgggttttactgatgcatatacagagatgctttttgttcgcttggttgtgatgatgtggtgtggttgggcggtcgttcattcgttctagatcggagtagaatactgtttcaaactacctggtgtatttattaattttggaactgtatgtgtgtgtcatacatcttcatagttacgagtttaagatggatggaaatatcgatctaggataggtatacatgttgatgtgggttttactgatgcatatacatgatggcatatgcagcatctattcatatgctctaaccttgagtacctatctattataataaacaagtatgttttataattattttgatcttgatatacttggatgatggcatatgcagcagctatatgtggatttttttagccctgccttcatacgctatttatttgcttggtactgtttcttttgtcgatgctcaccctgttgtttggtgttacttctgcaggtcgactctagaggatccaccggtcgccaccatggccctgtccaacaagttcatcggcgacgacatgaagatgacctaccacatggacggctgcgtgaacggccactacttcaccgtgaagggcgagggcagcggcaagccctacgagggcacccagacctccaccttcaaggtgaccatggccaacggcggccccctggccttctccttcgacatcctgtccaccgtgttcatgtacggcaaccgctgcttcaccgcctaccccaccagcatgcccgactacttcaagcaggccttccccgacggcatgtcctacgagagaaccttcacctacgaggacggcggcgtggccaccgccagctgggagatcagcctgaagggcaactgcttcgagcacaagtccaccttccacggcgtgaacttccccgccgacggccccgtgatggccaagaagaccaccggctgggacccctccttcgagaagatgaccgtgtgcgacggcatcttgaagggcgacgtgaccgccttcctgatgctgcagggcggcggcaactacagatgccagttccacacctcctacaagaccaagaagcccgtgaccatgccccccaaccacgtggtggagcaccgcatcgccagaaccgacctggacaagggcggcaacagcgtgcagctgaccgagcacgccgtggcccacatcacctccgtggtgcccttctgaagcggccgcaacctagacttgtccatcttctggattggccaacttaattaatgtatgaaataaaaggatgcacacatagtgacatgctaatcactataatgtgggcatcaaagttgtgtgttatgtgtaattactagttatctgaataaaagagaaagagatcatccatatttcttatcctaaatgaatgtcacgtgtctttataattctttgatgaaccagatgcatttcattaaccaaatccatatacatataaatattaatcatatataattaatatcaattgggttagcaaaacaaatctagtctaggtgtgttttgcgaatgcggccgccaccgcggtggagctcgaatgcggccctagcgtatacgaagttcctattccgaagttcctattcttcaaaaagtataggaacttctgtaccgagctcgaattcattccgattaatcgtggcctcttgctcttcaggatgaagagctatgtttaaacgtgcaagcgctactagacaattcagtacattaaaaacgtccgcaatgtgttattaagttgtctaagcgtcaatttgtttacaccacaatatatcctgcca

SEQ ID NO: 9 - DNA, 13795 bp, Artificial sequence
  PHP83475
gtttacccgccaatatatcctgtcaaacactgatagtttaaactgaaggcgggaaacgacaatctgatcatgagcggagaattaagggagtcacgttatgacccccgccgatgacgcgggacaagccgttttacgtttggaactgacagaaccgcaacgttgaaggagccactcagcaagctggtacgattgtaatacgactcactatagggcgaattgagcgctgtttaaacgctcttcaactggaagagcggttacgctgtttaaacgctcttcaactggaagagcggttactaccggttcactagctagctgctaaggttaccagagctggtcacctttgtccaccaacttattaagtatctagttgaagacacgttcttcttcacgtaagaagacactcagtagtcttcggccagaatggcctcttgattcagcgggcctagaaggccggatcactgactagctaatttaaatcctgaggatctggtcttcctaaggacccgggatatcggaccgattaaactttaattcggtccgataacttcgtatagcatacattatacgaagttatatgcatacgcgtcttaagtcgatcgctatcaactttgtatagaaaagttgggccgagctcggtacggccagaatggcccggaccgggttaccgaattcttaccctagctccctgcggctgttacgcggtcccccatcaatcttctgttcttgcggttgtagcctgtgtaacagtgctagagtatgtatgataaataggttttaagtctgcttacatgacattttttattgtggaagagacatataaaaattagagagagtggttctcatgcaacggcggacggcccggtgctaaaagagcttcaagacaaaataatgaaacaggaagagagtagatttatctaagagccaactttattatatgaatgtgtttattgttggctttagatgatatggtaaggagttagagctaataatagataggctctattattattattattaattaaactcgctctaaggaggaaagtgggaggaagggacgaggacgaagactactggaagcatcgtgcatggatgatggatgtggtgtctcttaatgtaggtggccggaggatgtacgtgttaattgcgcgataagcactcagatccaaccgcaaactacctccacactgacacactgatagagagaaagagagacctccgacgactgccgccgcagatgagccacgtacgtatacgacgtctgccggccggctcaggctgccgccatcaccctgctcgaaagtcgcgttaggcggcgccagctacataggagtatctagtctagccagttagtatactactactgcgctgatgatgaattaactctgcatagatactgtacttgcctccctccaacacccaaccacctcctgctcggctcttaataacttggacacggatcgatgccatccaaggaagaacacgacgacgacgacggaacatccaccatgcaagcttgcatccatacgccgatacgcgtgcatccatccatccaccattatttccattttccaccgatcacacgtacacaggcctatttaaggagcgacatcccactgcaactctcctcaccactcatcaccagctagctctagcaaagcacttgccatctaccgaccgccgcattccaaacagcccgacgagctagcagagcggcaggcacctccctcctcaaggaacccatggcggccaatgcgggcggcggtggagcgggaggaggcagcggcagcggcagcgtggctgcgccggcggtgtgccgccccagcggctcgcggtggacgccgacgccggagcagatcaggatgctgaaggagctctactacggctgcggcatccggtcgcccagctcggagcagatccagcgcatcaccgccatgctgcggcagcacggcaagatcgagggcaagaacgtcttctactggttccagaaccacaaggcccgcgagcgccagaagcgccgcctcaccagcctcgacgtcaacgtgcccgccgccggcgcggccgacgccaccaccagccaactcggcgtcctctcgctgtcgtcgccgccgccttcaggcgcggcgcctccctcgcccaccctcggcttctacgccgccggcaatggcggcggatcggctgtgctgctggacacgagttccgactggggcagcagcggcgctgctatggccaccgagacatgcttcctgcaggactacatgggcgtgacggacacgggcagctcgtcgcagtggccacgcttctcgtcgtcggacacgataatggcggcggccgcggcgcgggcggcgacgacgcgggcgcccgagacgctccctctcttcccgacctgcggcgacgacggcggcagcggtagcagcagctacttgccgttctggggtgccgcgtccacaactgccggcgccacttcttccgttgcgatccaacagcaacaccagctgcaggagcagtacagcttttacagcaacagcaacagcacccagctggccggcaccggcaaccaagacgtatcggcaacagcagcagcagccgccgccctggagctgagcctcagctcatggtgctccccttaccctgctgcagggagtatgtgagagcaacgcgagctgccactgctcttcactgatgtctctggaatggaaggaggaggaagtgagaacagatcattcgacaaagcagcattagtccgttgatcggtggaagaccactcgtcagtgttgagttgaatgtttgatcaataaaatacggcaatgctgtaagggttgttttttatgccattgataatacactgtactgttcagttgttgaactctatttcttagccatgccaagtgcttttcttattttgaataacattacagcaaaaagttgaaagacaaaaaaaaaaacccccgaacagagtgctttgggtcccaagcttctttagactgtgttcggcgttccccctaaatttctccccctatatctcactcacttgtcacatcagcgttctctttccccctatatctccacgctctacagcagttccacctatatcaaacctctataccccaccacaacaatattatatactttcatcttcaactaactcatgtaccttccaatttttttctactaataattatttacgtgcacagaaacttagcaaggagagagagagcggggtgacccaccttgctagttggatattacctcttctcttcaaagtatccttgaacgctcaccggttatcaaatctctacactatagctctgtagtcttgctagatagttagttctttagctctcggtgaccaagcttggcgcgatcaagcttatcgataccgtcgacctcgaagcttggtcacccggtccgggcctagaaggccagcttcaagtttgtacaaaaaagcaggctccggccagaatggcccggaccgggttaccgaattcgagctcggtaccctggttcacaaactcaatacaacacacagtggagtagggtattacgctccggcggcccgaaccactctaaatccttgtgtcctcgtgtgctcttccaccattaatgactgtaattgcagggacacgaagagttgtagcgcttttgccaacaagatccgctatatgctagtagagtggaacctgcacagcaacaagcatccaataatctgagaataagaattatgtgtggtgatggttctcatctctgcaactcgccattttcgcgagagaaccaaatccaagttggtgaagatcatgatttgggctcatgggctggcatagtagctattacctttgcaattgtggttcgaatctatccgatattctccttttcagggagagctaatgcttatgcttattgggtattttggtttgacactgcttcacgcccaaaaaaaggcaactatgtctgagttggatatggcccaaaaaaaggcagctatgtctgagttggatatggaagtcttctttcgtttagggtgaagtaagaccaagctcatgagcttattatcttaggtcggaacaaattagttgataggcatggcacatttatcaaattataatgattttaacagaaaagcaacacctctttttcagcagcaccagctttgcaagctgcaattgacactccaagcatagtatttgctccaaactcagcctgcatttcgcacaatatcatatctatttccatttggataaaatatattttccagaaatatgggaacagaatcaagatacagaaaaaagttgtggtagtagtggtaagtggaaacacaagtacagtgaaaagatagcattatttctgaacagtcaaattaaccgaaataagtagtatcacatactgcccctaaattgactacacccaatgtaaagaattgcttgagcatattgagccatcagttgtttgtttgtgtaacggatttgacaatgcagagttcaggagcaaaaaaccgcaaaggagagaaagagggaaaggatctcctagtatcccaccttgtggcgcgccctgtcaagtgcatgatggcctggtcgatctgcgtctgctgctgcggttccatcccaacgagtgcctccgacaccttgtcgttgatcacccgcaccgcgtaggcgacccccctggcgaggaacttccgcctctcggaggccccggccgcgtcggcggcggcgccctcgagcgcgcccacgctagccgtagatgctcggtgcacggccttgttggtgtgcaactcgacctcaacggccggtgcgctacgcccgtcaaggatctggcgcgcccgcaccctcgtgatcacggtgggcgcctcccgcctcatgtggccgacgatgaaaagcgccgggttaggggccttggcgcgcaccgccgtattcagggcctcctcgctcttgcgcgagagcaggtgcttccccaggtactcctgcactgacaaggctgccacagcggtggaatttgtcctcacgacttcgccacgtcgtcctcacctccctggcttcccacgactccgccgtatcgaggtgctcggtgggtcgtcttaatccgaagtccgaactaggaagacgagacagagaggtctgaggaatgggcctcgtttgatgttgagctgaattatttttccagcataagcccaggtcttggtccatgaacaaaattactagaaacccagcccagtactacgatctaaaagagggactgccactggatagctctctctagcattctccacgctccaatacagcggcgtcgtgtctatccgggtctatccgcgaacacgtgagaactctccagaaactgctttctcctccacttcatctctctcgctttccctctataaaaagaccccttctaggaattgagggagacagcaagcaccaagcagcgatccgaagctcaatcaattcactcaaacctcttccccaaatcttcgattagatcttcgttgacaagaagactagaaccgaacctgacatgtccaacctgctcacggttcaccagaaccttccggctcttccagtggacgcgacgtccgatgaagtcaggaagaacctcatggacatgttccgcgacaggcaagcgttcagcgagcacacctggaagatgctgctctccgtctgccgctcctgggctgcatggtgcaagctgaacaacaggaagtggttccccgctgagcccgaggacgtgagggattaccttctgtacctgcaagcgcgaggtttgtttctgcttctacctttgatatatatataataattatcattaattagtagtaatataatatttcaaatatttttttcaaaataaaagaatgtagtatatagcaattgcttttctgtagtttataagtgtgtatattttaatttataacttttctaatatatgaccaaaacatggtgatgcctaggtctggcagtgaagaccatccagcaacaccttggacaactgaacatgcttcacaggcgctccggcctcccgcgccccagcgactcgaacgccgtgagcctcgtcatgcgccgcatcaggaaggaaaacgtcgatgccggcgaaagggcaaagcaggccctcgcgttcgagaggaccgatttcgaccaggtccgcagcctgatggagaacagcgacaggtgccaggacattaggaacctggcgttcctcggaattgcatacaacacgctcctcaggatcgcggaaattgcccgcattcgcgtgaaggacattagccgcaccgacggcggcaggatgcttatccacattggcaggaccaagacgctcgtttccaccgcaggcgtcgaaaaggccctcagcctcggagtgaccaagctcgtcgaacgctggatctccgtgtccggcgtcgcggacgacccaaacaactacctcttctgccgcgtccgcaagaacggggtggctgcccctagcgccaccagccaactcagcacgagggccttggaaggtattttcgaggccacccaccgcctgatctacggcgcgaaggatgacagcggtcaacgctacctcgcatggtccgggcactccgcccgcgttggagctgctagggacatggcccgcgccggtgtttccatccccgaaatcatgcaggcgggtggatggacgaacgtgaacattgtcatgaactacattcgcaaccttgacagcgagacgggcgcaatggttcgcctcctggaagatggtgactgaggtacccaacctagacttgtccatcttctggattggccaacttaattaatgtatgaaataaaaggatgcacacatagtgacatgctaatcactataatgtgggcatcaaagttgtgtgttatgtgtaattactagttatctgaataaaagagaaagagatcatccatatttcttatcctaaatgaatgtcacgtgtctttataattctttgatgaaccagatgcatttcattaaccaaatccatatacatataaatattaatcatatataattaatatcaattgggttagcaaaacaaatctagtctaggtgtgttttgcgatccgatatcgatgggccctggccgaagcttggtcacccggtccgggcctagaaggccgatctcccgggcacccagctttcttgtacaaagtggccgttaacggatcggccagaatggcccggaccgggttacccggaccgaagcttgcatgcctgcagtgcagcgtgacccggtcgtgcccctctctagagataatgagcattgcatgtctaagttataaaaaattaccacatattttttttgtcacacttgtttgaagtgcagtttatctatctttatacatatatttaaactttactctacgaataatataatctatagtactacaataatatcagtgttttagagaatcatataaatgaacagttagacatggtctaaaggacaattgagtattttgacaacaggactctacagttttatctttttagtgtgcatgtgttctcctttttttttgcaaatagcttcacctatataatacttcatccattttattagtacatccatttagggtttagggttaatggtttttatagactaatttttttagtacatctattttattctattttagcctctaaattaagaaaactaaaactctattttagtttttttatttaataatttagatataaaatagaataaaataaagtgactaaaaattaaacaaataccctttaagaaattaaaaaaactaaggaaacatttttcttgtttcgagtagataatgccagcctgttaaacgccgtcgacgagtctaacggacaccaaccagcgaaccagcagcgtcgcgtcgggccaagcgaagcagacggcacggcatctctgtcgctgcctctggacccctctcgagagttccgctccaccgttggacttgctccgctgtcggcatccagaaattgcgtggcggagcggcagacgtgagccggcacggcaggcggcctcctcctcctctcacggcaccggcagctacgggggattcctttcccaccgctccttcgctttcccttcctcgcccgccgtaataaatagacaccccctccacaccctctttccccaacctcgtgttgttcggagcgcacacacacacaaccagatctcccccaaatccacccgtcggcacctccgcttcaaggtacgccgctcgtcctcccccccccccctctctaccttctctagatcggcgttccggtccatgcatggttagggcccggtagttctacttctgttcatgtttgtgttagatccgtgtttgtgttagatccgtgctgctagcgttcgtacacggatgcgacctgtacgtcagacacgttctgattgctaacttgccagtgtttctctttggggaatcctgggatggctctagccgttccgcagacgggatcgatttcatgattttttttgtttcgttgcatagggtttggtttgcccttttcctttatttcaatatatgccgtgcacttgtttgtcgggtcatcttttcatgcttttttttgtcttggttgtgatgatgtggtctggttgggcggtcgttctagatcggagtagaattctgtttcaaactacctggtggatttattaattttggatctgtatgtgtgtgccatacatattcatagttacgaattgaagatgatggatggaaatatcgatctaggataggtatacatgttgatgcgggttttactgatgcatatacagagatgctttttgttcgcttggttgtgatgatgtggtgtggttgggcggtcgttcattcgttctagatcggagtagaatactgtttcaaactacctggtgtatttattaattttggaactgtatgtgtgtgtcatacatcttcatagttacgagtttaagatggatggaaatatcgatctaggataggtatacatgttgatgtgggttttactgatgcatatacatgatggcatatgcagcatctattcatatgctctaaccttgagtacctatctattataataaacaagtatgttttataattattttgatcttgatatacttggatgatggcatatgcagcagctatatgtggatttttttagccctgccttcatacgctatttatttgcttggtactgtttcttttgtcgatgctcaccctgttgtttggtgttacttctgcaggtcgactttaacttagcctaggatccaccggtcgccaccatggcctcctccgagaacgtcatcaccgagttcatgcgcttcaaggtgcgcatggagggcaccgtgaacggccacgagttcgagatcgagggcgagggcgagggccgcccctacgagggccacaacaccgtgaagctgaaggtgacgaagggcggccccctgcccttcgcctgggacatcctgtccccccagttccagtacggctccaaggtgtacgtgaagcaccccgccgacatccccgactacaagaagctgtccttccccgagggcttcaagtgggagcgcgtgatgaacttcgaggacggcggcgtggcgaccgtgacccaggactcctccctgcaggacggctgcttcatctacaaggtgaagttcatcggcgtgaacttcccctccgacggccccgtgatgcagaagaagaccatgggctgggaggcctccaccgagcgcctgtacccccgcgacggcgtgctgaagggcgagacccacaaggccctgaagctgaaggacggcggccactacctggtggagttcaagtccatctacatggccaagaagcccgtgcagctgcccggctactactacgtggacgccaagctggacatcacctcccacaacgaggactacaccatcgtggagcagtacgagcgcaccgagggccgccaccacctgttcctgtagcggcccatggatattcgaacgcgtaggtaccacatggttaacctagacttgtccatcttctggattggccaacttaattaatgtatgaaataaaaggatgcacacatagtgacatgctaatcactataatgtgggcatcaaagttgtgtgttatgtgtaattactagttatctgaataaaagagaaagagatcatccatatttcttatcctaaatgaatgtcacgtgtctttataattctttgatgaaccagatgcatttcattaaccaaatccatatacatataaatattaatcatatataattaatatcaattgggttagcaaaacaaatctagtctaggtgtgttttgcgaatgcggccgccaccgcggtggagctcgaattccggtccgaagctgggcaactttattatacaaagttgatagatcgaataacttcgtatagcatacattatacgaagttatacctggtggcgccgctaggggctgcaggaattcgatatcaagcttatcgataccgtcgacctcgagggggggcccggtaccctgggatctgcccttactttaacgcctctaaccaacacccctttatctttataaggaacaataaacagaatttgccccactgttctaaatcacctaataatatccccagctaaaaacaataaaggtttcctagaattaagacaagcatgactgttcctccaggagggtttggaacattgttgcagtcttgcagatacgggcgaagggtgagaaacagagcggagggctggaggtgacctcggtagtcgacgccggagttgagcttgacaacgacggggcggcccctgatggacttgaggaagtccgatggcgtcttcaccgtcccgccggcgcccgaggcgggcctgtcgctgccgccgccgccgctgctcatcttgcgcgctgtgcccccggcggtgtccctgtgttgcggatcgcgggtgggccaggtggatgcgagggcgacccgtttggactccggccggagccgccggatccctggtcggtgtcagtgccgtttactctgggccccacgtgtcagtaccgtctgtagatgacaacaacccgtcgtccacagtcatgtccaaaatatcctttcttcttttttttcgattcggatatctatcttccttttttttttccaaaaatcttcttgacgcaccagcgcgcacgtttgtggtaaacgccgacacgtcggtcccacgtcgatagaccccacccaccagtgagtagcgtgtacgtattcgggggtgacggacgtgtcgccgtcgtcttgctagtcccattcccatctgagccacacatctctgaacaaaaaaaaggagggaggcctccacgcacatccccctccgtgccacccgccccaaaccctcgcgccgcctccgagacagccgccgcaaccatggccaccgccgccgccgcgtctaccgcgctcactggcgccactaccgctgcgcccaaggcgaggcgccgggcgcacctcctggccacccgccgcgccctcgccgcgcccatcaggtgctcagcggcgtcacccgccatgccgatggctcccccggccaccccgctccggccgtggggccccaccgagccccgcaagggtgctgacatcctcgtcgagtccctcgagcgctgcggcgtccgcgacgtcttcgcctaccccggcggcgcgtccatggagatccaccaggcactcacccgctcccccgtcatcgccaaccacctcttccgccacgagcaaggggaggcctttgccgcctccggctacgcgcgctcctcgggccgcgtcggcgtctgcatcgccacctccggccccggcgccaccaacctagtctccgcgctcgccgacgcgctgctcgattccgtccccatggtcgccatcacgggacaggtggcgcgacgcatgattggcaccgacgccttccaggagacgcccatcgtcgaggtcacccgctccatcaccaagcacaactacctggtcctcgacgtcgacgacatcccccgcgtcgtgcaggaggctttcttcctcgcctcctctggtcgaccagggccggtgcttgtcgacatccccaaggacatccagcagcagatggcggtgcctgtctgggacaagcccatgagtctgcctgggtacattgcgcgccttcccaagccccctgcgactgagttgcttgagcaggtgctgcgtcttgttggtgaatcgcggcgccctgttctttatgtgggcggtggctgcgcagcatctggtgaggagttgcgacgctttgtggagctgactggaatcccggtcacaactactcttatgggcctcggcaacttccccagcgacgacccactgtctctgcgcatgctaggtatgcatgggacggtgtatgcaaattatgcagtggataaggccgatctgttgcttgcacttggtgtgcggtttgatgatcgcgtgacagggaagattgaggcttttgcaagcagggctaagattgtgcacgttgatattgatccggctgagattggcaagaacaagcagccacatgtgtccatctgtgcagatgttaagcttgctttgcagggcatgaatgctcttcttgaaggaagcacatcaaagaagagctttgactttggctcatggaacgatgagttggatcagcagaagagggaattcccccttgggtataaaacatctaatgaggagatccagccacaatatgctattcaggttcttgatgagctgacgaaaggcgaggccatcatcggcacaggtgttgggcagcaccagatgtgggcggcacagtactacacttacaagcggccaaggcagtggttgtcttcagctggtcttggggctatgggatttggtttgccggctgctgctggtgcttctgtggcaaacccaggtgtcactgttgttgacatcgatggagatggtagctttctcatgaacgttcaggagctagctatgatccgaattgagaacctcccagtgaaggtctttgtgctaaacaaccagcacctggggatggtggtgcagttggaggacaggttctataaggccaacagagcgcacacatacttgggaaacccagagaatgaaagtgagatatatccagatttcgtgacgatcgccaaagggttcaacattccagcggtccgtgtgacaaagaagaacgaagtccgcgcagcgataaagaagatgctcgagactccagggccgtacctcttggatataatcgtcccacaccaggagcatgtgttgcctatgatccctagtggtggggctttcaaggatatgatcctggatggtgatggcaggactgtgtactgactagctagtcagttaacctagacttgtccatcttctggattggccaacttaattaatgtatgaaataaaaggatgcacacatagtgacatgctaatcactataatgtgggcatcaaagttgtgtgttatgtgtaattactagttatctgaataaaagagaaagagatcatccatatttcttatcctaaatgaatgtcacgtgtctttataattctttgatgaaccagatgcatttcattaaccaaatccatatacatataaatattaatcatatataattaatatcaattgggttagcaaaacaaatctagtctaggtgtgttttgcgaatgcggccgcctgcagagttaacggcgcgccgactagctagctaaggtaccgagctcgaattcattccgattaatcgtggcctcttgctcttcaggatgaagagctatgtttaaacgtgcaagcgctactagacaattcagtacattaaaaacgtccgcaatgtgttattaagttgtctaagcgtcaatttgtttacaccacaatatatcctgcca

SEQ ID NO: 10 - DNA, 14961 bp, Artificial sequence
  PHP83621
gtttacccgccaatatatcctgtcaaacactgatagtttaaactgaaggcgggaaacgacaatctgatcatgagcggagaattaagggagtcacgttatgacccccgccgatgacgcgggacaagccgttttacgtttggaactgacagaaccgcaacgttgaaggagccactcagcaagctggtacgattgtaatacgactcactatagggcgaattgagcgctgtttaaacgctcttcaactggaagagcggttacgctgtttaaacgctcttcaactggaagagcggttactaccggttcactagctagctgctaaggttaccagagctggtcacctttgtccaccaacttattaagtatctagttgaagacacgttcttcttcacgtaagaagacactcagtagtcttcggccagaatggcctcttgattcagcgggcctagaaggccggatcactgactagctaatttaaatcctgaggatctggtcttcctaaggacccgggatatcggaccgattaaactttaattcggtccgataacttcgtatagcatacattatacgaagttatatgcatacgcgtcttaagtcgatcgctatcaactttgtatagaaaagttgggccgagctcggtacggccagaatggcccggaccgggttaccgaattcttaccctagctccctgcggctgttacgcggtcccccatcaatcttctgttcttgcggttgtagcctgtgtaacagtgctagagtatgtatgataaataggttttaagtctgcttacatgacattttttattgtggaagagacatataaaaattagagagagtggttctcatgcaacggcggacggcccggtgctaaaagagcttcaagacaaaataatgaaacaggaagagagtagatttatctaagagccaactttattatatgaatgtgtttattgttggctttagatgatatggtaaggagttagagctaataatagataggctctattattattattattaattaaactcgctctaaggaggaaagtgggaggaagggacgaggacgaagactactggaagcatcgtgcatggatgatggatgtggtgtctcttaatgtaggtggccggaggatgtacgtgttaattgcgcgataagcactcagatccaaccgcaaactacctccacactgacacactgatagagagaaagagagacctccgacgactgccgccgcagatgagccacgtacgtatacgacgtctgccggccggctcaggctgccgccatcaccctgctcgaaagtcgcgttaggcggcgccagctacataggagtatctagtctagccagttagtatactactactgcgctgatgatgaattaactctgcatagatactgtacttgcctccctccaacacccaaccacctcctgctcggctcttaataacttggacacggatcgatgccatccaaggaagaacacgacgacgacgacggaacatccaccatgcaagcttgcatccatacgccgatacgcgtgcatccatccatccaccattatttccattttccaccgatcacacgtacacaggcctatttaaggagcgacatcccactgcaactctcctcaccactcatcaccagctagctctagcaaagcacttgccatctaccgaccgccgcattccaaacagcccgacgagctagcagagcggcaggcacctccctcctcaaggaacccatggcggccaatgcgggcggcggtggagcgggaggaggcagcggcagcggcagcgtggctgcgccggcggtgtgccgccccagcggctcgcggtggacgccgacgccggagcagatcaggatgctgaaggagctctactacggctgcggcatccggtcgcccagctcggagcagatccagcgcatcaccgccatgctgcggcagcacggcaagatcgagggcaagaacgtcttctactggttccagaaccacaaggcccgcgagcgccagaagcgccgcctcaccagcctcgacgtcaacgtgcccgccgccggcgcggccgacgccaccaccagccaactcggcgtcctctcgctgtcgtcgccgccgccttcaggcgcggcgcctccctcgcccaccctcggcttctacgccgccggcaatggcggcggatcggctgtgctgctggacacgagttccgactggggcagcagcggcgctgctatggccaccgagacatgcttcctgcaggactacatgggcgtgacggacacgggcagctcgtcgcagtggccacgcttctcgtcgtcggacacgataatggcggcggccgcggcgcgggcggcgacgacgcgggcgcccgagacgctccctctcttcccgacctgcggcgacgacggcggcagcggtagcagcagctacttgccgttctggggtgccgcgtccacaactgccggcgccacttcttccgttgcgatccaacagcaacaccagctgcaggagcagtacagcttttacagcaacagcaacagcacccagctggccggcaccggcaaccaagacgtatcggcaacagcagcagcagccgccgccctggagctgagcctcagctcatggtgctccccttaccctgctgcagggagtatgtgagagcaacgcgagctgccactgctcttcactgatgtctctggaatggaaggaggaggaagtgagaacagatcattcgacaaagcagcattagtccgttgatcggtggaagaccactcgtcagtgttgagttgaatgtttgatcaataaaatacggcaatgctgtaagggttgttttttatgccattgataatacactgtactgttcagttgttgaactctatttcttagccatgccaagtgcttttcttattttgaataacattacagcaaaaagttgaaagacaaaaaaaaaaacccccgaacagagtgctttgggtcccaagcttctttagactgtgttcggcgttccccctaaatttctccccctatatctcactcacttgtcacatcagcgttctctttccccctatatctccacgctctacagcagttccacctatatcaaacctctataccccaccacaacaatattatatactttcatcttcaactaactcatgtaccttccaatttttttctactaataattatttacgtgcacagaaacttagcaaggagagagagagcggggtgacccaccttgctagttggatattacctcttctcttcaaagtatccttgaacgctcaccggttatcaaatctctacactatagctctgtagtcttgctagatagttagttctttagctctcggtgaccaagcttggcgcgatcaagcttatcgataccgtcgacctcgaagcttggtcacccggtccgggcctagaaggccagcttcaagtttgtacaaaaaagcaggctccggccagaatggcccggaccgggttacgttaccgaattcttaccctagctccctgcggctgttacgcggtcccccatcaatcttctgttcttgcggttgtagcctgtgtaacagtgctagagtatgtatgataaataggttttaagtctgcttacatgacattttttattgtggaagagacatataaaaattagagagagtggttctcatgcaacggcggacggcccggtgctaaaagagcttcaagacaaaataatgaaacaggaagagagtagatttatctaagagccaactttattatatgaatgtgtttattgttggctttagatgatatggtaaggagttagagctaataatagataggctctattattattattattaattaaactcgctctaaggaggaaagtgggaggaagggacgaggacgaagactactggaagcatcgtgcatggatgatggatgtggtgtctcttaatgtaggtggccggaggatgtacgtgttaattgcgcgataagcactcagatccaaccgcaaactacctccacactgacacactgatagagagaaagagagacctccgacgactgccgccgcagatgagccacgtacgtatacgacgtctgccggccggctcaggctgccgccatcaccctgctcgaaagtcgcgttaggcggcgccagctacataggagtatctagtctagccagttagtatactactactgcgctgatgatgaattaactctgcatagatactgtacttgcctccctccaacacccaaccacctcctgctcggctcttaataacttggacacggatcgatgccatccaaggaagaacacgacgacgacgacggaacatccaccatgcaagcttgcatccatacgccgatacgcgtgcatccatccatccaccattatttccattttccaccgatcacacgtacacaggcctatttaaggagcgacatcccactgcaactctcctcaccactcatcaccagctagctctagcaaagcacttgccatctaccgaccgccgcattccaaacagcccgacgagctagcagagcggcaggcacctccctcctcaaggaacccatggccactgtgaacaactggctcgctttctccctctccccgcaggagctgccgccctcccagacgacggactccacactcatctcggccgccaccgccgaccatgtctccggcgatgtctgcttcaacatcccccaagattggagcatgaggggatcagagctttcggcgctcgtcgcggagccgaagctggaggacttcctcggcggcatctccttctccgagcagcatcacaaggccaactgcaacatgatacccagcactagcagcacagtttgctacgcgagctcaggtgctagcaccggctaccatcaccagctgtaccaccagcccaccagctcagcgctccacttcgcggactccgtaatggtggcttcctcggccggtgtccacgacggcggtgccatgctcagcgcggccgccgctaacggtgtcgctggcgctgccagtgccaacggcggcggcatcgggctgtccatgattaagaactggctgcggagccaaccggcgcccatgcagccgagggtggcggcggctgagggcgcgcaggggctctctttgtccatgaacatggcggggacgacccaaggcgctgctggcatgccacttctcgctggagagcgcgcacgggcgcccgagagtgtatcgacgtcagcacagggtggagccgtcgtcgtcacggcgccgaaggaggatagcggtggcagcggtgttgccggcgctctagtagccgtgagcacggacacgggtggcagcggcggcgcgtcggctgacaacacggcaaggaagacggtggacacgttcgggcagcgcacgtcgatttaccgtggcgtgacaaggcatagatggactgggagatatgaggcacatctttgggataacagttgcagaagggaagggcaaactcgtaagggtcgtcaagtctatttaggtggctatgataaagaggagaaagctgctagggcttatgatcttgctgctctgaagtactggggtgccacaacaacaacaaattttccagtgagtaactacgaaaaggagctcgaggacatgaagcacatgacaaggcaggagtttgtagcgtctctgagaaggaagagcagtggtttctccagaggtgcatccatttacaggggagtgactaggcatcaccaacatggaagatggcaagcacggattggacgagttgcagggaacaaggatctttacttgggcaccttcagcacccaggaggaggcagcggaggcgtacgacatcgcggcgatcaagttccgcggcctcaacgccgtcaccaacttcgacatgagccgctacgacgtgaagagcatcctggacagcagcgccctccccatcggcagcgccgccaagcgcctcaaggaggccgaggccgcagcgtccgcgcagcaccaccacgccggcgtggtgagctacgacgtcggccgcatcgcctcgcagctcggcgacggcggagccctggcggcggcgtacggcgcgcactaccacggcgccgcctggccgaccatcgcgttccagccgggcgccgccagcacaggcctgtaccacccgtacgcgcagcagccaatgcgcggcggcgggtggtgcaagcaggagcaggaccacgcggtgatcgcggccgcgcacagcctgcaggacctccaccacctgaacctgggcgcggccggcgcgcacgactttttctcggcagggcagcaggccgccgccgctgcgatgcacggcctgggtagcatcgacagtgcgtcgctcgagcacagcaccggctccaactccgtcgtctacaacggcggggtcggcgacagcaacggcgccagcgccgtcggcggcagtggcggtggctacatgatgccgatgagcgctgccggagcaaccactacatcggcaatggtgagccacgagcaggtgcatgcacgggcctacgacgaagccaagcaggctgctcagatggggtacgagagctacctggtgaacgcggagaacaatggtggcggaaggatgtctgcatgggggactgtcgtgtctgcagccgcggcggcagcagcaagcagcaacgacaacatggccgccgacgtcgggcatggcggcgcgcagctcttcagtgtctggaacgacacttaagcgtacctagtggtacctgacatcttatagtctgcaacctctcgtgtctgaattcctatctttatcaagtgttattgcttccacgactataggacagctttcgtcgaaagcttttgctcatgtgatctcgaaggattcatctagtctgatttttcgtgacttgtatcggttttattggattcatccaacatatatcaataaaaaatgagttgtgtttcctttcttcctagttcagttaaaattatttccctcctgcgcttgtgctgtaattgtctgtgtacctgttgtttgtgactgtgttagttcccttggatatgatttcgtatttgatatgtacatggagatagcttagcttcattattggagtatgaagttagtatgacatagtcactctcctggaaaattgacactgcaaaccatatttttattctgaaccacaaatcctagtcagtccgctggcatatgccgtccgtttgctgaatccagaacgtgggtttggagatgtacggctgagatgcctctatgcgaaggggatttcgtggtgaaacgagatgggagtagagcaacgcccgtggaagatgcttcaaacttccacacttttgagcaacgatcggcagtagtaaggtagacgatttcaagatcaaagcatatgaagataaacaacatcaacaacaaaatttgttggggttctatagagagaaacagagctacatacatacactgttttgtatctaccatctgagatgatgaaaagatgaaaaactaaagaatgccccggcgccaacgccaggacacgccgcgcgcgcgtcacccgagccatctcttgacccagccggcgctgtatatttacacacgttgcagcatcgatcaccacctgttcgatcgcgtcgccgtcaccggtaccgagctcgaattccggtccgggcctagaaggccgatctcccgggcacccagctttcttgtacaaagtggccgttaacggatcggccagaatggcccggaccgggttaccgaattcgagagcttgccgagtgccatccttggacactcgataaagtatattttattttttttattttgccaaccaaactttttgtggtatgttcctacactatgtagatctacatgtaccattttggcacaattacatatttacaaaaatgttttctataaatattagatttagttcgtttatttgaatttcttcggaaaattcacatttaaactgcaagtcactcgaaacatggaaaaccgtgcatgcaaaataaatgatatgcatgttatctagcacaagttacgaccgatttcagaagcagaccagaatcttcaagcaccatgctcactaaacatgaccgtgaacttgttatctagttgtttaaaaattgtataaaacacaaataaagtcagaaattaatgaaacttgtccacatgtcatgatatcatatatagaggttgtgataaaaatttgataatgtttcggtaaagttgtgacgtactatgtgtagaaacctaagtgacctacacataaaatcatagagtttcaatgtagttcactcgacaaagactttgtcaagtgtccgataaaaagtactcgacaaagaagccgttgtcgatgtactgttcgtcgagatctctttgtcgagtgtcacactaggcaaagtctttacggagtgtttttcaggctttgacactcggcaaagcgctcgattccagtagtgacagtaatttgcatcaaaaatagctgagagatttaggccccgtttcaatctcacgggataaagtttagcttcctgctaaactttagctatatgaattgaagtgctaaagtttagtttcaattaccaccattagctctcctgtttagattacaaatggctaaaagtagctaaaaaatagctgctaaagtttatctcgcgagattgaaacagggccttaaaatgagtcaactaatagaccaactaattattagctattagtcgttagcttctttaatctaagctaaaaccaactaatagcttatttgttgaattacaattagctcaacggaattctctgtttttctaaaaaaaaactgcccctctcttacagcaaattgtccgctgcccgtcgtccagatacaatgaacgtacctagtaggaactcttttacacgctcggtcgctcgccgcggatcggagtccccggaacacgacaccactgtggaacacgacaaagtctgctcagaggcggccacaccctggcgtgcaccgagccggagcccggataagcacggtaaggagagtacggcgggacgtggcgacccgtgtgtctgctgccacgcagccttcctccacgtagccgcgcggccgcgccacgtaccagggcccggcgctggtataaatcccgcgccacctccgctttagttctgcatacagccaacccaaggatccaacacacacccgaggatatcacagtcgaccgccggggatccaccatgtccaacctgctcacggttcaccagaaccttccggctcttccagtggacgcgacgtccgatgaagtcaggaagaacctcatggacatgttccgcgacaggcaagcgttcagcgagcacacctggaagatgctgctctccgtctgccgctcctgggctgcatggtgcaagctgaacaacaggaagtggttccccgctgagcccgaggacgtgagggattaccttctgtacctgcaagcgcgaggtttgtttctgcttctacctttgatatatatataataattatcattaattagtagtaatataatatttcaaatatttttttcaaaataaaagaatgtagtatatagcaattgcttttctgtagtttataagtgtgtatattttaatttataacttttctaatatatgaccaaaacatggtgatgcctaggtctggcagtgaagaccatccagcaacaccttggacaactgaacatgcttcacaggcgctccggcctcccgcgccccagcgactcgaacgccgtgagcctcgtcatgcgccgcatcaggaaggaaaacgtcgatgccggcgaaagggcaaagcaggccctcgcgttcgagaggaccgatttcgaccaggtccgcagcctgatggagaacagcgacaggtgccaggacattaggaacctggcgttcctcggaattgcatacaacacgctcctcaggatcgcggaaattgcccgcattcgcgtgaaggacattagccgcaccgacggcggcaggatgcttatccacattggcaggaccaagacgctcgtttccaccgcaggcgtcgaaaaggccctcagcctcggagtgaccaagctcgtcgaacgctggatctccgtgtccggcgtcgcggacgacccaaacaactacctcttctgccgcgtccgcaagaacggggtggctgcccctagcgccaccagccaactcagcacgagggccttggaaggtattttcgaggccacccaccgcctgatctacggcgcgaaggatgacagcggtcaacgctacctcgcatggtccgggcactccgcccgcgttggagctgctagggacatggcccgcgccggtgtttccatccccgaaatcatgcaggcgggtggatggacgaacgtgaacattgtcatgaactacattcgcaaccttgacagcgagacgggcgcaatggttcgcctcctggaagatggtgactgaggtaccacccctcgctcaaacgagcaggaagcaacgagagggtggcgcgcgaccgacgtgcgtacgtagcatgagcctgagtggagacgttggacgtgtatgtatatacctctctgcgtgttaactatgtacgtaagcggcaggcagtgcaataagtgtggctctgtagtatgtacgtgcgggtacgatgctgtaagctactgaggcaagtccataaataaataatgacacgtgcgtgttctataatctcttcgcttcttcatttgtccccttgcggagtttggcatccattgatgccgttacgctgagaacagacacagcagacgaaccaaaagtgagttcttgtatgaaactatgacccttcatcgctaggctcaaacagcaccccgtacgaacacagcaaattagtcatctaactattagcccctacatgtttcagacgatacataaatatagcccatccttagcaattagctattggccctgcccatcccaagcaatgatctcgaagtatttttaatatatagtatttttaatatgtagcttttaaaattagaagataattttgagacaaaaatctccaagtatttttttgggtattttttactgcctccgtttttctttatttctcgtcacctagtttaattttgtgctaatcggctataaacgaaacagagagaaaagttactctaaaagcaactccaacagattagatataaatcttatatcctgcctagagctgttaaaaagatagacaactttagtggattagtgtatgcaacaaactctccaaatttaagtatcccaactacccaacgcatatcgttcccttttcattggcgcacgaactttcacctgctatagccgacgtacatgttcgttttttttgggcggcgcttactttcttccccgttcgttctcagcatcgcaactcaatttgttatggcggagaagcccttgtatcccaggtagtaatgcacagatatgcattattattattcataaaagaattcatcgatctcgagggggggccccggccgaagcttggtcacccggtccgggcctagaaggccagcttcggccgccccgggcaactttattatacaaagttgatagatcgaataacttcgtatagcatacattatacgaagttatacctggtggcgccgctaggggctgcaggaattcgatatcaagcttatcgataccgtcgacctcgagggggggcccggtaccctgggatctgcccttactttaacgcctctaaccaacacccctttatctttataaggaacaataaacagaatttgccccactgttctaaatcacctaataatatccccagctaaaaacaataaaggtttcctagaattaagacaagcatgactgttcctccaggagggtttggaacattgttgcagtcttgcagatacgggcgaagggtgagaaacagagcggagggctggaggtgacctcggtagtcgacgccggagttgagcttgacaacgacggggcggcccctgatggacttgaggaagtccgatggcgtcttcaccgtcccgccggcgcccgaggcgggcctgtcgctgccgccgccgccgctgctcatcttgcgcgctgtgcccccggcggtgtccctgtgttgcggatcgcgggtgggccaggtggatgcgagggcgacccgtttggactccggccggagccgccggatccctggtcggtgtcagtgccgtttactctgggccccacgtgtcagtaccgtctgtagatgacaacaacccgtcgtccacagtcatgtccaaaatatcctttcttcttttttttcgattcggatatctatcttccttttttttttccaaaaatcttcttgacgcaccagcgcgcacgtttgtggtaaacgccgacacgtcggtcccacgtcgatagaccccacccaccagtgagtagcgtgtacgtattcgggggtgacggacgtgtcgccgtcgtcttgctagtcccattcccatctgagccacacatctctgaacaaaaaaaaggagggaggcctccacgcacatccccctccgtgccacccgccccaaaccctcgcgccgcctccgagacagccgccgcaaccatggccaccgccgccgccgcgtctaccgcgctcactggcgccactaccgctgcgcccaaggcgaggcgccgggcgcacctcctggccacccgccgcgccctcgccgcgcccatcaggtgctcagcggcgtcacccgccatgccgatggctcccccggccaccccgctccggccgtggggccccaccgagccccgcaagggtgctgacatcctcgtcgagtccctcgagcgctgcggcgtccgcgacgtcttcgcctaccccggcggcgcgtccatggagatccaccaggcactcacccgctcccccgtcatcgccaaccacctcttccgccacgagcaaggggaggcctttgccgcctccggctacgcgcgctcctcgggccgcgtcggcgtctgcatcgccacctccggccccggcgccaccaacctagtctccgcgctcgccgacgcgctgctcgattccgtccccatggtcgccatcacgggacaggtggcgcgacgcatgattggcaccgacgccttccaggagacgcccatcgtcgaggtcacccgctccatcaccaagcacaactacctggtcctcgacgtcgacgacatcccccgcgtcgtgcaggaggctttcttcctcgcctcctctggtcgaccagggccggtgcttgtcgacatccccaaggacatccagcagcagatggcggtgcctgtctgggacaagcccatgagtctgcctgggtacattgcgcgccttcccaagccccctgcgactgagttgcttgagcaggtgctgcgtcttgttggtgaatcgcggcgccctgttctttatgtgggcggtggctgcgcagcatctggtgaggagttgcgacgctttgtggagctgactggaatcccggtcacaactactcttatgggcctcggcaacttccccagcgacgacccactgtctctgcgcatgctaggtatgcatgggacggtgtatgcaaattatgcagtggataaggccgatctgttgcttgcacttggtgtgcggtttgatgatcgcgtgacagggaagattgaggcttttgcaagcagggctaagattgtgcacgttgatattgatccggctgagattggcaagaacaagcagccacatgtgtccatctgtgcagatgttaagcttgctttgcagggcatgaatgctcttcttgaaggaagcacatcaaagaagagctttgactttggctcatggaacgatgagttggatcagcagaagagggaattcccccttgggtataaaacatctaatgaggagatccagccacaatatgctattcaggttcttgatgagctgacgaaaggcgaggccatcatcggcacaggtgttgggcagcaccagatgtgggcggcacagtactacacttacaagcggccaaggcagtggttgtcttcagctggtcttggggctatgggatttggtttgccggctgctgctggtgcttctgtggcaaacccaggtgtcactgttgttgacatcgatggagatggtagctttctcatgaacgttcaggagctagctatgatccgaattgagaacctcccagtgaaggtctttgtgctaaacaaccagcacctggggatggtggtgcagttggaggacaggttctataaggccaacagagcgcacacatacttgggaaacccagagaatgaaagtgagatatatccagatttcgtgacgatcgccaaagggttcaacattccagcggtccgtgtgacaaagaagaacgaagtccgcgcagcgataaagaagatgctcgagactccagggccgtacctcttggatataatcgtcccacaccaggagcatgtgttgcctatgatccctagtggtggggctttcaaggatatgatcctggatggtgatggcaggactgtgtactgactagctagtcagttaacctagacttgtccatcttctggattggccaacttaattaatgtatgaaataaaaggatgcacacatagtgacatgctaatcactataatgtgggcatcaaagttgtgtgttatgtgtaattactagttatctgaataaaagagaaagagatcatccatatttcttatcctaaatgaatgtcacgtgtctttataattctttgatgaaccagatgcatttcattaaccaaatccatatacatataaatattaatcatatataattaatatcaattgggttagcaaaacaaatctagtctaggtgtgttttgcgaatgcggccgcctgcagagttaacggcgcgccgactagctagctaaggtaccgagctcgaattcattccgattaatcgtggcctcttgctcttcaggatgaagagctatgtttaaacgtgcaagcgctactagacaattcagtacattaaaaacgtccgcaatgtgttattaagttgtctaagcgtcaatttgtttacaccacaatatatcctgcca

SEQ ID NO: 11 - DNA, 21186 bp, Artificial sequence
  PHP83652
gtttacccgccaatatatcctgtcaaacactgatagtttaaactgaaggcgggaaacgacaatctgatcatgagcggagaattaagggagtcacgttatgacccccgccgatgacgcgggacaagccgttttacgtttggaactgacagaaccgcaacgttgaaggagccactcagcaagctggtacgattgtaatacgactcactatagggcgaattgagcgctgtttaaacgctcttcaactggaagagcggttacgctgtttaaacgctcttcaactggaagagcggttactaccggttcactagctagctgctaaggttaccagagctggtcacctttgtccaccaacttattaagtatctagttgaagacacgttcttcttcacgtaagaagacactcagtagtcttcggccagaatggcctcttgattcagcgggcctagaaggccggatcactgactagctaatttaaatcctgaggatctggtcttcctaaggacccgggatatcggaccgattaaactttaattcggtccgataacttcgtatagcatacattatacgaagttatatgcatacgcgtcttaagtcgatcgctatcaactttgtatagaaaagttgggccgagctcggtacggccagaatggcccggaccgggttaccgaattcaggcgacccatcgctgctttgtctacatcatgttcttcatcatcctccccaggcgacgcgtgctgctgttcttattcagactaccgttcgagtgactgcatggcgtacatctttctgcatcgactttgtacggctacatcgaacatatacacgagatgtctcgtgtgaatagagtcactaatgccttaagcatcggttactccgtagggtacattctgttcttcttatttgtgcatatttttattgttgtttactgattatacgagtagttatacatacatgcacatacatatcatcacatatatcacaatatttttctaaattaaattaaaactaaaaatgactaaatttctaacaccaacgacattgtaatgttttctccaacaactttacctattctacattgttctatttcgaatttcactctataaacaacatagtctacaatggaaaacagtgctttgtacgactatatacgcgatgtgtggctacaacataagacaatatagtcgtttgaagattgaacctatatatcggtacggttaatccgtctatgtacgtgggcatgacgaacacccgtgataacgaaggattaacgtgcacaatcataaatccaaagtaggagcggtgcatgatgagaatcgctctcagtactcgacataatgaaccttacgaggtacaacaggcaggcaggcagggaccaggggccgcctttatttcaggctcgctggccccacgggcgtgctgcgtgcacgaagggcactaccccaacctctcaccgaaaaccgcgctggatcggcaaatcaaacgaggtggtgccccgtgcccactctccacgtccacggcaccatccctctgcagccgctcaccagccatgccgtgtcgcggaacggcacaaccacccccaacccactcacgaaaccccgtcccggccgtgcccgtgtcggtccgcgctcggcaacgaggcggcccgcgctgctgagtcccctggacacccgacaccctgtcggccctttgtttattcatcccgaaatctcatctgcccccacggccgactgcgctgcgccgcccggatatatatacccatcgttatcgatcgactggggactctatcagtgatagagtctagaggatcgctcaggaaggccgctgagatagaggcatggcggccaatgcgggcggcggtggagcgggaggaggcagcggcagcggcagcgtggctgcgccggcggtgtgccgccccagcggctcgcggtggacgccgacgccggagcagatcaggatgctgaaggagctctactacggctgcggcatccggtcgcccagctcggagcagatccagcgcatcaccgccatgctgcggcagcacggcaagatcgagggcaagaacgtcttctactggttccagaaccacaaggcccgcgagcgccagaagcgccgcctcaccagcctcgacgtcaacgtgcccgccgccggcgcggccgacgccaccaccagccaactcggcgtcctctcgctgtcgtcgccgccgccttcaggcgcggcgcctccctcgcccaccctcggcttctacgccgccggcaatggcggcggatcggctgtgctgctggacacgagttccgactggggcagcagcggcgctgccatggccaccgagacatgcttcctgcaggactacatgggcgtgacggacacgggcagctcgtcgcagtggccacgcttctcgtcgtcggacacgataatggcggcggccgcggcgcgggcggcgacgacgcgggcgcccgagacgctccctctcttcccgacctgcggcgacgacggcggcagcggtagcagcagctacttgccgttctggggtgccgcgtccacaactgccggcgccacttcttccgttgcgatccagcagcaacaccagctgcaggagcagtacagcttttacagcaacagcaacagcacccagctggccggcaccggcaaccaagacgtatcggcaacagcagcagcagccgccgccctggagctgagcctcagctcatggtgctccccttaccctgctgcagggagtatgtgagagcaacgcgagctgccactgctcttcactggtaccgttaacagatcattcgacaaagcagcattagtccgttgatcggtggaagaccactcgtcagtgttgagttgaatgtttgatcaataaaatacggcaatgctgtaagggttgttttttatgccattgataatacactgtactgttcagttgttgaactctatttcttagccatgccaagtgcttttcttattttgaataacattacagcaaaaagttgaaagacaaaaaaaaaaacccccgaacagagtgctttgggtcccaagcttctttagactgtgttcggcgttccccctaaatttctccccctatatctcactcacttgtcacatcagcgttctctttccccctatatctccacgctctacagcagttccacctatatcaaacctctataccccaccacaacaatattatatactttcatcttcaactaactcatgtaccttccaatttttttctactaataattatttacgtgcacagaaacttagcaaggagagagagagcggggtgacccaccttgctagttggatattacctcttctcttcaaagtatccttgaacgctcaccggttatcaaatctctacactatagctctgtagtcttgctagatagttagttctttagctctcggtgaccaagcttggcgcgatcaagcttatcgataccgtcgacctcgaagcttggtcacccggtccgggcctagaaggccagcttcaagtttgtacaaaaaagcaggctccggccagaatggcccggaccgggttaccgaattcttaccctagctccctgcggctgttacgcggtcccccatcaatcttctgttcttgcggttgtagcctgtgtaacagtgctagagtatgtatgataaataggttttaagtctgcttacatgacattttttattgtggaagagacatataaaaattagagagagtggttctcatgcaacggcggacggcccggtgctaaaagagcttcaagacaaaataatgaaacaggaagagagtagatttatctaagagccaactttattatatgaatgtgtttattgttggctttagatgatatggtaaggagttagagctaataatagataggctctattattattattattaattaaactcgctctaaggaggaaagtgggaggaagggacgaggacgaagactactggaagcatcgtgcatggatgatggatgtggtgtctcttaatgtaggtggccggaggatgtacgtgttaattgcgcgataagcactcagatccaaccgcaaactacctccacactgacacactgatagagagaaagagagacctccgacgactgccgccgcagatgagccacgtacgtatacgacgtctgccggccggctcaggctgccgccatcaccctgctcgaaagtcgcgttaggcggcgccagctacataggagtatctagtctagccagttagtatactactactgcgctgatgatgaattaactctgcatagatactgtacttgcctccctccaacacccaaccacctcctgctcggctcttaataacttggacacggatcgatgccatccaaggaagaacacgacgacgacgacggaacatccaccatgcaagcttgcatccatacgccgatacgcgtgcatccatccatccaccattatttccattttccaccgatcacacgtacacaggcctatttaaggagcgacatcccactgcaactctcctcaccactcatcaccagctagctctagcaaagcacttgccatctaccgaccgccgcattccaaacagcccgacgagctagcagagcggcaggcacctccctcctcaaggaacccatggccactgtgaacaactggctcgctttctccctctccccgcaggagctgccgccctcccagacgacggactccacactcatctcggccgccaccgccgaccatgtctccggcgatgtctgcttcaacatcccccaagattggagcatgaggggatcagagctttcggcgctcgtcgcggagccgaagctggaggacttcctcggcggcatctccttctccgagcagcatcacaaggccaactgcaacatgatacccagcactagcagcacagtttgctacgcgagctcaggtgctagcaccggctaccatcaccagctgtaccaccagcccaccagctcagcgctccacttcgcggactccgtaatggtggcttcctcggccggtgtccacgacggcggtgccatgctcagcgcggccgccgctaacggtgtcgctggcgctgccagtgccaacggcggcggcatcgggctgtccatgattaagaactggctgcggagccaaccggcgcccatgcagccgagggtggcggcggctgagggcgcgcaggggctctctttgtccatgaacatggcggggacgacccaaggcgctgctggcatgccacttctcgctggagagcgcgcacgggcgcccgagagtgtatcgacgtcagcacagggtggagccgtcgtcgtcacggcgccgaaggaggatagcggtggcagcggtgttgccggcgctctagtagccgtgagcacggacacgggtggcagcggcggcgcgtcggctgacaacacggcaaggaagacggtggacacgttcgggcagcgcacgtcgatttaccgtggcgtgacaaggcatagatggactgggagatatgaggcacatctttgggataacagttgcagaagggaagggcaaactcgtaagggtcgtcaagtctatttaggtggctatgataaagaggagaaagctgctagggcttatgatcttgctgctctgaagtactggggtgccacaacaacaacaaattttccagtgagtaactacgaaaaggagctcgaggacatgaagcacatgacaaggcaggagtttgtagcgtctctgagaaggaagagcagtggtttctccagaggtgcatccatttacaggggagtgactaggcatcaccaacatggaagatggcaagcacggattggacgagttgcagggaacaaggatctttacttgggcaccttcagcacccaggaggaggcagcggaggcgtacgacatcgcggcgatcaagttccgcggcctcaacgccgtcaccaacttcgacatgagccgctacgacgtgaagagcatcctggacagcagcgccctccccatcggcagcgccgccaagcgcctcaaggaggccgaggccgcagcgtccgcgcagcaccaccacgccggcgtggtgagctacgacgtcggccgcatcgcctcgcagctcggcgacggcggagccctggcggcggcgtacggcgcgcactaccacggcgccgcctggccgaccatcgcgttccagccgggcgccgccagcacaggcctgtaccacccgtacgcgcagcagccaatgcgcggcggcgggtggtgcaagcaggagcaggaccacgcggtgatcgcggccgcgcacagcctgcaggacctccaccacctgaacctgggcgcggccggcgcgcacgactttttctcggcagggcagcaggccgccgccgctgcgatgcacggcctgggtagcatcgacagtgcgtcgctcgagcacagcaccggctccaactccgtcgtctacaacggcggggtcggcgacagcaacggcgccagcgccgtcggcggcagtggcggtggctacatgatgccgatgagcgctgccggagcaaccactacatcggcaatggtgagccacgagcaggtgcatgcacgggcctacgacgaagccaagcaggctgctcagatggggtacgagagctacctggtgaacgcggagaacaatggtggcggaaggatgtctgcatgggggactgtcgtgtctgcagccgcggcggcagcagcaagcagcaacgacaacatggccgccgacgtcgggcatggcggcgcgcagctcttcagtgtctggaacgacacttaagcgtacctagtggtacctgacatcttatagtctgcaacctctcgtgtctgaattcctatctttatcaagtgttattgcttccacgactataggacagctttcgtcgaaagcttttgctcatgtgatctcgaaggattcatctagtctgatttttcgtgacttgtatcggttttattggattcatccaacatatatcaataaaaaatgagttgtgtttcctttcttcctagttcagttaaaattatttccctcctgcgcttgtgctgtaattgtctgtgtacctgttgtttgtgactgtgttagttcccttggatatgatttcgtatttgatatgtacatggagatagcttagcttcattattggagtatgaagttagtatgacatagtcactctcctggaaaattgacactgcaaaccatatttttattctgaaccacaaatcctagtcagtccgctggcatatgccgtccgtttgctgaatccagaacgtgggtttggagatgtacggctgagatgcctctatgcgaaggggatttcgtggtgaaacgagatgggagtagagcaacgcccgtggaagatgcttcaaacttccacacttttgagcaacgatcggcagtagtaaggtagacgatttcaagatcaaagcatatgaagataaacaacatcaacaacaaaatttgttggggttctatagagagaaacagagctacatacatacactgttttgtatctaccatctgagatgatgaaaagatgaaaaactaaagaatgccccggcgccaacgccaggacacgccgcgcgcgcgtcacccgagccatctcttgacccagccggcgctgtatatttacacacgttgcagcatcgatcaccacctgttcgatcgcgtcgccgtcaccgggatctgagtcgaaacctagacttgtccatcttctggattggccaacttaattaatgtatgaaataaaaggatgcacacatagtgacatgctaatcactataatgtgggcatcaaagttgtgtgttatgtgtaattactagttatctgaataaaagagaaagagatcatccatatttcttatcctaaatgaatgtcacgtgtctttataattctttgatgaaccagatgcatttcattaaccaaatccatatacatataaatattaatcatatataattaatatcaattgggttagcaaaacaaatctagtctaggtgtgttttgcgaatgcgaccttcttatgtgcttctagtctccaaatgtggttgatagttattttgctctaagatcaacagtaatgaagtataaatcatcgttgtggtgtgctactcggttaattgagcattaacacacacaaacatgacgaggatggtataatctccaaaaatgtgtactttgttaggtgggaccctatagccttgattaatgtgctatgttaggcatgcctggaaacgtgtgacgcatatgttttgtgaacctgttgatattatatgtgcttttatattaccatattttattaaaatactaatatttattactagtaagatataacattctatctagcttaaaaactaaccataaatattccataataactagatttaccaaactaatatactaaatatacataataaatacaaaattaacaagacaataatcaatatttatgagcttaatatatttagacattatggttggtcgacgataatcatgctaacttttcgtaattgcttgattgaaatatgcttagaataatgcctctttgttctacatggcaaatagggaccattatggtgtaacaccctgggaaccacaaacaccccgaaatgctactaaactacacaactaaccttcatatataaaatttcgacagcatctcctttgaaaatttgcatagacgtggaagcaacagagtataaacagatatcatgataagaaaacatactagacattaataatctgctagaaatgggaagaatcctaacttgacgactgcgtaactgactagagtcacacttagctgaccctagtcacttacaactgacttcgtgtcctagatcgatgggccctggccgaagcttggtcacccggtccgggcctagaaggccagcttcaagtttgtacaaaaaagcaggctccggccagaatggcccggaccgggttaccgaattcgagctcggtaccctggtcacgtgcgtgtgtaactacagttcgcaaagcgacagaaggccaagacttgaagttttggccgggcgtcccgccatggcgacggcgagtcaacccgctgcccccacgcccaacggctacggcggtggtattttggctggcggagacggggtgcacgacactggcacggtgtcagatcagtctgggtcaccgtgagcctgtgtcgcagcactgctgctgttgcactgtggtagtgcggtggggctattgtcaaaggctcaaagcgtggctcggcagtcggcacccgcgcgatcagggcagccatcactcatcatcgcaggacatggcggtggagtggctacatagaaatctgtcctggtctgggcctgtgtagggtacgtacagctgaaatcagatccgccgcgtgtcaatttctgcttcgtttgacagtgtgtgcccacgccgcggagcgtgttcggtggcctttttcggcgttctagcggaatgggcgaccgcatttatcggctatgcttcattacataaaaccaaggctctgttttttagtacattagtagtaatgttcattgactgcgccgaactgtccgtatcatggcacagatgctcgttgatgacaacctcaacaggtggcagcgttacaacacgccatgcgacggtgtgttcccctcatgatgcgcaagttgcaggcagcaggtagcaaagcacatggttcactgggcacgaataggatgtttccatgccgacgtcctaatctcgtacagtacgtaatctctactacttaagtaagagtagtctaccattccatgttctatcaccattccctgttcttctgccattccttattctgcctctctcattcctattctctattctgcctttctcattcctcctccccgcacagcctatttccatattctgtcatttcctattctgcctttctcattccccctccccacaaagcatatttctattctcattcccgcgtacagcccacgtttagctaaaataaaaaaacacaaatgaccccaaagggattcaaacccgtgacctctcaaacaaatgcgagcagttgctaccgctacaccacatgtgtgtttatgtctacatctataacaggaaaaatatctactacatctctccccaaacctaccctactacccttgcacaatgcgtagtactagataagtatcatcgagattcttaaattatatttttagatggaatgagtaatatctaaagaagagccttgcatgcaatttcttttgtttgaataatgttttcaacttaaatttctttttttgcatgcgtggcatttattctccataatattttttccatggatctgacttgtgagtcattttcataaaccaacgccaaggataaatccatgtttcttgcttggaaaccacgaacaaacaccactagcaggaggcgctcacgttggcatcgctcatcgacgacgagaagaagcttgacgattgtcagttcgacctctggaagcagtcctacctggccgcatgaaccgctgtgtatgacaagctccgacacagccgccgcttggaatcggtccaaagcgactgcaccgcgttgtccatcgtcaagcagggggacctcatggttgttgccaacgtcggtgactctcgggttgttctgggcaccgcatccaacgacggagccatcacaccgtctagctcatcgtccatctgaagctcaacctgccatgtaagttgctactgaccggccataaattcttgtgcgctcggacgacggtcgttgctgatgttgtgtgagtgtcctcgaacatgatgtatgtagaggagtagcgcatccggtggtgcaacggtcaggtgtactaccttgctgatgaacccgaggtgcacttcatctggcagtccaaccaagagtcatcggcactcgacatgtcgcgcgcgttcgacgactactatactgtgacgtcatctcggcaccggaggtgacgcagaggaggaccgacatcaatgatcagttcttcatcctccccaccgtcggggtagctttttgtgctggtctgtctgtaattctctttacaaacacacacaattgctttttttgtttgagcaagcgcgtatggtggtacgtgcctgatgactgacgatgtacgagggaacttcttccggcaggcgtggggcatgctcaccaatgatgagaccatgaaaatcatggcatatatcgaagtcggtactgatggttgcaatgtagtggtgaaacaactagattaaaacaacaaaatttatgtatgaccagaatcacaaatagattatgaaacattttctcataacagtataacacacattttgtatataagttaccgtggtgttatatgtccccgttgcaacgcacgggcactcacctagtctatatagaaagaccctacaaagtagtacaaagactctattttattctggactcttccggatatacatgtacatgtgggccggcctggcccggcacggcacaggcccacaaaagcacggcccacaaaggcacggcccataaaagcacatatctaattatgggccgtgccgtgccagcacgtgtgcccagtcatcggcccacggcacggcccacaattagttatgtgtgccaggccggcccaaatagcccaaaataccttaatatgccagaccggctcatatacatacaacagtaatacatcaacaaaaagtaatatatatatatatatatatatatatatatatatatatatatgaccaaaataaaactaagatgttttatggatgcacattataaacctttggtcagaaagaaaaaaacaactagctcataaataatatttagttctctgtttagtgtttaattgagtactatacatccatacagaatacatatacaatgatcatcactattcactatccatatctaggtattggttctcgatggcttattgaagctctagattctccaaattatgctagtcatgtgggctttgacgaaccttagttaaatactgagtctatatttagtgggcctcggtgggccttagttaaatgggccgtgccaggccggcccgtgggcttgacatgaggcccaggcacggcccacaatgtgggccgtgccggcccaggcccacaattaggttgggccgtaccagatatgggtcgtgccagaaattgtatgattaggcacagcacaaatgtacacctatacttccggaatcccgaccatcccacggagccacctttcagaaccttccttcgccttccagaagcccacccgtcaccaccatataaaccgcccctgttcgcgtcggcattccccacaccgagaatcacaatacgaaacgaattaatccccaatcaacacagcaagtcagcaacaagcaaagcagcgacccgagagatgtccaacctgctcacggttcaccagaaccttccggctcttccagtggacgcgacgtccgatgaagtcaggaagaacctcatggacatgttccgcgacaggcaagcgttcagcgagcacacctggaagatgctgctctccgtctgccgctcctgggctgcatggtgcaagctgaacaacaggaagtggttccccgctgagcccgaggacgtgagggattaccttctgtacctgcaagcgcgaggtttgtttctgcttctacctttgatatatatataataattatcattaattagtagtaatataatatttcaaatatttttttcaaaataaaagaatgtagtatatagcaattgcttttctgtagtttataagtgtgtatattttaatttataacttttctaatatatgaccaaaacatggtgatgcctaggtctggcagtgaagaccatccagcaacaccttggacaactgaacatgcttcacaggcgctccggcctcccgcgccccagcgactcgaacgccgtgagcctcgtcatgcgccgcatcaggaaggaaaacgtcgatgccggcgaaagggcaaagcaggccctcgcgttcgagaggaccgatttcgaccaggtccgcagcctgatggagaacagcgacaggtgccaggacattaggaacctggcgttcctcggaattgcatacaacacgctcctcaggatcgcggaaattgcccgcattcgcgtgaaggacattagccgcaccgacggcggcaggatgcttatccacattggcaggaccaagacgctcgtttccaccgcaggcgtcgaaaaggccctcagcctcggagtgaccaagctcgtcgaacgctggatctccgtgtccggcgtcgcggacgacccaaacaactacctcttctgccgcgtccgcaagaacggggtggctgcccctagcgccaccagccaactcagcacgagggccttggaaggtattttcgaggccacccaccgcctgatctacggcgcgaaggatgacagcggtcaacgctacctcgcatggtccgggcactccgcccgcgttggagctgctagggacatggcccgcgccggtgtttccatccccgaaatcatgcaggcgggtggatggacgaacgtgaacattgtcatgaactacattcgcaaccttgacagcgagacgggcgcaatggttcgcctcctggaagatggtgactgaggtacccaacctagacttgtccatcttctggattggccaacttaattaatgtatgaaataaaaggatgcacacatagtgacatgctaatcactataatgtgggcatcaaagttgtgtgttatgtgtaattactagttatctgaataaaagagaaagagatcatccatatttcttatcctaaatgaatgtcacgtgtctttataattctttgatgaaccagatgcatttcattaaccaaatccatatacatataaatattaatcatatataattaatatcaattgggttagcaaaacaaatctagtctaggtgtgttttgcgatccgatatcgatgggccctggccgaagcttggtcacccggtccgggcctagaaggccgatctcccgggcacccagctttcttgtacaaagtggccgttaacggatcggccagaatggcccggaccgggttaccgaattcctgcccttaaggccaattgttcaagattcattcaacaattgaaacatctcccatgattaaatcagtataaggttgctatggtcttgcttgacaaagtttttttttgagggaatttcaactaaatttttgagtgaaactatcaaatactgattttaaaaaatttttataaaaggaagcgcagagataaaaggccatctatgctacaaaagtacccaaaaatgtaatcctaaagtatgaattgcattttttttttgtttggacgaaaggaaaggagtattaccacaagaatgatatcatcttcatatttagatcttttttgggtaaagcttgagattctctaaatatagagaaatcagaagaaaaaaaaaccgtgttttggtggttttgatttctagcctccacaataactttgacggcgtcgacaagtctaacggacaccaagcagcgaaccaccagcgccgagccaagcgaagcagacggccgagacgttgacaccttcggcgcggcatctctcgagagttccgctccggcgctccacctccaccgctggcggtttcttattccgttccgttccgcctcctgctctgctcctctccacaccacacggcacgaaaccgttacggcaccggcagcacccagcacgggagaggggattcctttcccaccgttccttccctttccgccccgccgctataaatagccagccccatccccagcttttttccccaatctcatctcctctctcctgttgttcggagcacacgcacaatccgatcgatccccaaatccccttcgtctctcctcgcgagcctcgtggatcccagcttcaaggtacggcgatcgatcatcccccctccttctctctaccttcttttctctagactacatcggatggcgatccatggttagggcctgctagtttcccttcctgttttgtcgatggctgcgaggcacaatagatctgatggcgttatgacggctaacttgtcatgttgttgcgatttatagtccctttaggagatcagtttaatttctcggatggttcgagatcggtggtccatggttagtaccctaagatccgcgctgttagggttcgtagatggaggcgacctgttctgattgttaacttgtcagtacctgggaaatcctgggatggttctagctcgtccgcagatgagatcgatttcatgatcctctgtatcttgtttcgttgcctaggttccgtctaatctatccgtggtatgatgtagatgttttgatcgtgctaactacgtcttgtaaagttaattgtcaggtcataatttttagcatgcctttttttttgtttggttttgtctaattgggctgtcgttctagatcagagtagaagactgttccaaactacctgctggatttattgaacttggatctgtatgtgtgtcacatatcttcataaattcatgattaagatggattgaaatatcttttatctttttggtatggatagttctatatgttggtgtggctttgttagatgtatacatgcttagatacatgaagcaacgtgctgctactgtttagtaattgctgttcatttgtctaataaacagataaggatatgtatttatgttgctgttggttttgctggtactttgttggatacaaatgcttcaatacagaaaacagcatgctgctacgatttaccatttatctaatcttatcatatgtctaatctaataaacaaacatgcttttaaattatcttcatatgcttggatgatggcatacacagcggctatgtgtggttttttaaatacccagcatcatgggcatgcatgacactgctttaatatgctttttatttgcttgagactgtttcttttgtttatactgaccctttagttcggtgactcttctgcaggtcgactttaacttagcctaggatccatggcccagtccaagcacggcctgaccaaggagatgaccatgaagtaccgcatggagggctgcgtggacggccacaagttcgtgatcaccggcgagggcatcggctaccccttcaagggcaagcaggccatcaacctgtgcgtggtggagggcggccccttgcccttcgccgaggacatcttgtccgccgccttcatgtacggcaaccgcgtgttcaccgagtacccccaggacatcgtcgactacttcaagaactcctgccccgccggctacacctgggaccgctccttcctgttcgaggacggcgccgtgtgcatctgcaacgccgacatcaccgtgagcgtggaggagaactgcatgtaccacgagtccaagttctacggcgtgaacttccccgccgacggccccgtgatgaagaagatgaccgacaactgggagccctcctgcgagaagatcatccccgtgcccaagcagggcatcttgaagggcgacgtgagcatgtacctgctgctgaaggacggtggccgcttgcgctgccagttcgacaccgtgtacaaggccaagtccgtgccccgcaagatgcccgactggcacttcatccagcacaagctgacccgcgaggaccgcagcgacgccaagaaccagaagtggcacctgaccgagcacgccatcgcctccggctccgccttgccctccggactcagatctcgatagggtaccaatggccagttaacagatccagctgctgctgttctagggttcacaagtctgcctatttgtcttccccaatggagctatggttgtctggtctggtccttggtcgtgtcccgtttcattgtgtactatttacctgtaatgtgtatccttaagtctggtttgatggtgtctgaaacgttttgctgtggtagagcagcatggaagaactataatgaataagtgatccctaatcattgtgtccaaattttgcttctgctatacccttttgtgctgtttcttatgttttgcttaaaaatttgatctgacaaacaaatttgtctaaattatgctcttgttctgactgtgtactgtacacatttgtattgctaccggtttggcacatagttttctctttgattgcagatcaaacccttctgattgcagattgcttggctatggctgatgtgctcactgttcttctttagcttgtatattgctgatggtggcttggctacggctgaaaaagttgctgctgcgccgacttggcaactgttgctccagtaatgctttgtcctctcttcctagccgccgacttggcacttggcagctgttgctcctgtaatgcgttgttatctcttatctcttgagatgtactatgattttgaggctgtttgacttgtgccagattgccagtgctgatgctatattatctcaggtttttatgctagtatatgttttactgtgtgctgcctgtgtcgagttacgtaatctattgaaccgctatgcgtgttgatgccctgttgttgcttgccagattgatgcccctgttgcttgcagcttgcaagctgtagtgaaatcctaaaattcgaaaccaaatctattctgaacttttgaagatctgtgatgtccggaagaaaagattcaaacagataaacgggactctccagaatctataaaataaatgatcgacaaacgctttgctttggtaggcttcctagttagttagcggaccgaagcttcggtccgggcctagaaggccagcttcggccgccccgggcaactttattatacaaagttgatagatcgaataacttcgtatagcatacattatacgaagttatacctggtggcgccgctaggggctgcaggaattcgatatcaagcttatcgataccgtcgacctcgagggggggcccggtaccctgggatctgcccttactttaacgcctctaaccaacacccctttatctttataaggaacaataaacagaatttgccccactgttctaaatcacctaataatatccccagctaaaaacaataaaggtttcctagaattaagacaagcatgactgttcctccaggagggtttggaacattgttgcagtcttgcagatacgggcgaagggtgagaaacagagcggagggctggaggtgacctcggtagtcgacgccggagttgagcttgacaacgacggggcggcccctgatggacttgaggaagtccgatggcgtcttcaccgtcccgccggcgcccgaggcgggcctgtcgctgccgccgccgccgctgctcatcttgcgcgctgtgcccccggcggtgtccctgtgttgcggatcgcgggtgggccaggtggatgcgagggcgacccgtttggactccggccggagccgccggatccctggtcggtgtcagtgccgtttactctgggccccacgtgtcagtaccgtctgtagatgacaacaacccgtcgtccacagtcatgtccaaaatatcctttcttcttttttttcgattcggatatctatcttccttttttttttccaaaaatcttcttgacgcaccagcgcgcacgtttgtggtaaacgccgacacgtcggtcccacgtcgatagaccccacccaccagtgagtagcgtgtacgtattcgggggtgacggacgtgtcgccgtcgtcttgctagtcccattcccatctgagccacacatctctgaacaaaaaaaaggagggaggcctccacgcacatccccctccgtgccacccgccccaaaccctcgcgccgcctccgagacagccgccgcaaccatggccaccgccgccgccgcgtctaccgcgctcactggcgccactaccgctgcgcccaaggcgaggcgccgggcgcacctcctggccacccgccgcgccctcgccgcgcccatcaggtgctcagcggcgtcacccgccatgccgatggctcccccggccaccccgctccggccgtggggccccaccgagccccgcaagggtgctgacatcctcgtcgagtccctcgagcgctgcggcgtccgcgacgtcttcgcctaccccggcggcgcgtccatggagatccaccaggcactcacccgctcccccgtcatcgccaaccacctcttccgccacgagcaaggggaggcctttgccgcctccggctacgcgcgctcctcgggccgcgtcggcgtctgcatcgccacctccggccccggcgccaccaacctagtctccgcgctcgccgacgcgctgctcgattccgtccccatggtcgccatcacgggacaggtggcgcgacgcatgattggcaccgacgccttccaggagacgcccatcgtcgaggtcacccgctccatcaccaagcacaactacctggtcctcgacgtcgacgacatcccccgcgtcgtgcaggaggctttcttcctcgcctcctctggtcgaccagggccggtgcttgtcgacatccccaaggacatccagcagcagatggcggtgcctgtctgggacaagcccatgagtctgcctgggtacattgcgcgccttcccaagccccctgcgactgagttgcttgagcaggtgctgcgtcttgttggtgaatcgcggcgccctgttctttatgtgggcggtggctgcgcagcatctggtgaggagttgcgacgctttgtggagctgactggaatcccggtcacaactactcttatgggcctcggcaacttccccagcgacgacccactgtctctgcgcatgctaggtatgcatgggacggtgtatgcaaattatgcagtggataaggccgatctgttgcttgcacttggtgtgcggtttgatgatcgcgtgacagggaagattgaggcttttgcaagcagggctaagattgtgcacgttgatattgatccggctgagattggcaagaacaagcagccacatgtgtccatctgtgcagatgttaagcttgctttgcagggcatgaatgctcttcttgaaggaagcacatcaaagaagagctttgactttggctcatggaacgatgagttggatcagcagaagagggaattcccccttgggtataaaacatctaatgaggagatccagccacaatatgctattcaggttcttgatgagctgacgaaaggcgaggccatcatcggcacaggtgttgggcagcaccagatgtgggcggcacagtactacacttacaagcggccaaggcagtggttgtcttcagctggtcttggggctatgggatttggtttgccggctgctgctggtgcttctgtggcaaacccaggtgtcactgttgttgacatcgatggagatggtagctttctcatgaacgttcaggagctagctatgatccgaattgagaacctcccagtgaaggtctttgtgctaaacaaccagcacctggggatggtggtgcagttggaggacaggttctataaggccaacagagcgcacacatacttgggaaacccagagaatgaaagtgagatatatccagatttcgtgacgatcgccaaagggttcaacattccagcggtccgtgtgacaaagaagaacgaagtccgcgcagcgataaagaagatgctcgagactccagggccgtacctcttggatataatcgtcccacaccaggagcatgtgttgcctatgatccctagtggtggggctttcaaggatatgatcctggatggtgatggcaggactgtgtactgactagctagtcagttaacctagacttgtccatcttctggattggccaacttaattaatgtatgaaataaaaggatgcacacatagtgacatgctaatcactataatgtgggcatcaaagttgtgtgttatgtgtaattactagttatctgaataaaagagaaagagatcatccatatttcttatcctaaatgaatgtcacgtgtctttataattctttgatgaaccagatgcatttcattaaccaaatccatatacatataaatattaatcatatataattaatatcaattgggttagcaaaacaaatctagtctaggtgtgttttgcgaatgcggccgcctgcagagttaacggcgcgccgactagctagctaaggtaccgagctcgaattcattccgattaatcgtggcctcttgctcttcaggatgaagagctatgtttaaacgtgcaagcgctactagacaattcagtacattaaaaacgtccgcaatgtgttattaagttgtctaagcgtcaatttgtttacaccacaatatatcctgcca

SEQ ID NO: 12 - DNA, 7122 bp, Artificial sequence
  PHP89030
cccagtcttccgactgagcctttcgttttatttgatgcctggcagttccctactctcgcgttaacgctagcatggatgttttcccagtcacgacgttgtaaaacgacggccagtcttaagctcgggccccaaataatgattttattttgactgatagtgacctgttcgttgcaacaaattgatgagcaatgcttttttataatgccaactttgtacaaaaaagcaggctccggccagaatggcccggaccgggttacgttaccgaattcttaccctagctccctgcggctgttacgcggtcccccatcaatcttctgttcttgcggttgtagcctgtgtaacagtgctagagtatgtatgataaataggttttaagtctgcttacatgacattttttattgtggaagagacatataaaaattagagagagtggttctcatgcaacggcggacggcccggtgctaaaagagcttcaagacaaaataatgaaacaggaagagagtagatttatctaagagccaactttattatatgaatgtgtttattgttggctttagatgatatggtaaggagttagagctaataatagataggctctattattattattattaattaaactcgctctaaggaggaaagtgggaggaagggacgaggacgaagactactggaagcatcgtgcatggatgatggatgtggtgtctcttaatgtaggtggccggaggatgtacgtgttaattgcgcgataagcactcagatccaaccgcaaactacctccacactgacacactgatagagagaaagagagacctccgacgactgccgccgcagatgagccacgtacgtatacgacgtctgccggccggctcaggctgccgccatcaccctgctcgaaagtcgcgttaggcggcgccagctacataggagtatctagtctagccagttagtatactactactgcgctgatgatgaattaactctgcatagatactgtacttgcctccctccaacacccaaccacctcctgctcggctcttaataacttggacacggatcgatgccatccaaggaagaacacgacgacgacgacggaacatccaccatgcaagcttgcatccatacgccgatacgcgtgcatccatccatccaccattatttccattttccaccgatcacacgtacacaggcctatttaaggagcgacatcccactgcaactctcctcaccactcatcaccagctagctctagcaaagcacttgccatctaccgaccgccgcattccaaacagcccgacgagctagcagagcggcaggcacctccctcctcaaggaacccatggccactgtgaacaactggctcgctttctccctctccccgcaggagctgccgccctcccagacgacggactccacactcatctcggccgccaccgccgaccatgtctccggcgatgtctgcttcaacatcccccaagattggagcatgaggggatcagagctttcggcgctcgtcgcggagccgaagctggaggacttcctcggcggcatctccttctccgagcagcatcacaaggccaactgcaacatgatacccagcactagcagcacagtttgctacgcgagctcaggtgctagcaccggctaccatcaccagctgtaccaccagcccaccagctcagcgctccacttcgcggactccgtaatggtggcttcctcggccggtgtccacgacggcggtgccatgctcagcgcggccgccgctaacggtgtcgctggcgctgccagtgccaacggcggcggcatcgggctgtccatgattaagaactggctgcggagccaaccggcgcccatgcagccgagggtggcggcggctgagggcgcgcaggggctctctttgtccatgaacatggcggggacgacccaaggcgctgctggcatgccacttctcgctggagagcgcgcacgggcgcccgagagtgtatcgacgtcagcacagggtggagccgtcgtcgtcacggcgccgaaggaggatagcggtggcagcggtgttgccggcgctctagtagccgtgagcacggacacgggtggcagcggcggcgcgtcggctgacaacacggcaaggaagacggtggacacgttcgggcagcgcacgtcgatttaccgtggcgtgacaaggcatagatggactgggagatatgaggcacatctttgggataacagttgcagaagggaagggcaaactcgtaagggtcgtcaagtctatttaggtggctatgataaagaggagaaagctgctagggcttatgatcttgctgctctgaagtactggggtgccacaacaacaacaaattttccagtgagtaactacgaaaaggagctcgaggacatgaagcacatgacaaggcaggagtttgtagcgtctctgagaaggaagagcagtggtttctccagaggtgcatccatttacaggggagtgactaggcatcaccaacatggaagatggcaagcacggattggacgagttgcagggaacaaggatctttacttgggcaccttcagcacccaggaggaggcagcggaggcgtacgacatcgcggcgatcaagttccgcggcctcaacgccgtcaccaacttcgacatgagccgctacgacgtgaagagcatcctggacagcagcgccctccccatcggcagcgccgccaagcgcctcaaggaggccgaggccgcagcgtccgcgcagcaccaccacgccggcgtggtgagctacgacgtcggccgcatcgcctcgcagctcggcgacggcggagccctggcggcggcgtacggcgcgcactaccacggcgccgcctggccgaccatcgcgttccagccgggcgccgccagcacaggcctgtaccacccgtacgcgcagcagccaatgcgcggcggcgggtggtgcaagcaggagcaggaccacgcggtgatcgcggccgcgcacagcctgcaggacctccaccacctgaacctgggcgcggccggcgcgcacgactttttctcggcagggcagcaggccgccgccgctgcgatgcacggcctgggtagcatcgacagtgcgtcgctcgagcacagcaccggctccaactccgtcgtctacaacggcggggtcggcgacagcaacggcgccagcgccgtcggcggcagtggcggtggctacatgatgccgatgagcgctgccggagcaaccactacatcggcaatggtgagccacgagcaggtgcatgcacgggcctacgacgaagccaagcaggctgctcagatggggtacgagagctacctggtgaacgcggagaacaatggtggcggaaggatgtctgcatgggggactgtcgtgtctgcagccgcggcggcagcagcaagcagcaacgacaacatggccgccgacgtcgggcatggcggcgcgcagctcttcagtgtctggaacgacacttaagcgtacctagtggtacctgacatcttatagtctgcaacctctcgtgtctgaattcctatctttatcaagtgttattgcttccacgactataggacagctttcgtcgaaagcttttgctcatgtgatctcgaaggattcatctagtctgatttttcgtgacttgtatcggttttattggattcatccaacatatatcaataaaaaatgagttgtgtttcctttcttcctagttcagttaaaattatttccctcctgcgcttgtgctgtaattgtctgtgtacctgttgtttgtgactgtgttagttcccttggatatgatttcgtatttgatatgtacatggagatagcttagcttcattattggagtatgaagttagtatgacatagtcactctcctggaaaattgacactgcaaaccatatttttattctgaaccacaaatcctagtcagtccgctggcatatgccgtccgtttgctgaatccagaacgtgggtttggagatgtacggctgagatgcctctatgcgaaggggatttcgtggtgaaacgagatgggagtagagcaacgcccgtggaagatgcttcaaacttccacacttttgagcaacgatcggcagtagtaaggtagacgatttcaagatcaaagcatatgaagataaacaacatcaacaacaaaatttgttggggttctatagagagaaacagagctacatacatacactgttttgtatctaccatctgagatgatgaaaagatgaaaaactaaagaatgccccggcgccaacgccaggacacgccgcgcgcgcgtcacccgagccatctcttgacccagccggcgctgtatatttacacacgttgcagcatcgatcaccacctgttcgatcgcgtcgccgtcacccgtacgcgtgcgatcgagcagctggcttgtggggaccagacaaaaaaggaatggtgcagaattgttaggcgcacctaccaaaagcatctttgcctttattgcaaagataaagcagattcctctagtacaagtggggaacaaaataacgtggaaaagagctgtcctgacagcccactcactaatgcgtatgacgaacgcagtgacgaccacaaaaattccggactagtggcgcgcctcaacgagatcatgagccaatcaaagaggagtgatgtagacctaaagcaataatggagccatgacgtaagggcttacgcccatacgaaataattaaaggctgatgtgacctgtcggtctctcagaacctttactttttatgtttggcgtgtatttttaaatttccacggcaatgacgatgtgaccaccggtgcctaggcccgggcacccagctttcttgtacaaagttggcattataagaaagcattgcttatcaatttgttgcaacgaacaggtcactatcagtcaaaataaaatcattatttgccatccagctgatatcccctatagtgagtcgtattacatggtcatagctgtttcctggcagctctggcccgtgtctcaaaatctctgatgttacattgcacaagataaaaatatatcatcatgaacaataaaactgtctgcttacataaacagtaatacaaggggtgttatgagccatattcaacgggaaacgtcgaggccgcgattaaattccaacatggatgctgatttatatgggtataaatgggctcgcgataatgtcgggcaatcaggtgcgacaatctatcgcttgtatgggaagcccgatgcgccagagttgtttctgaaacatggcaaaggtagcgttgccaatgatgttacagatgagatggtcagactaaactggctgacggaatttatgcctcttccgaccatcaagcattttatccgtactcctgatgatgcatggttactcaccactgcgatccccggaaaaacagcattccaggtattagaagaatatcctgattcaggtgaaaatattgttgatgcgctggcagtgttcctgcgccggttgcattcgattcctgtttgtaattgtccttttaacagcgatcgcgtatttcgtctcgctcaggcgcaatcacgaatgaataacggtttggttgatgcgagtgattttgatgacgagcgtaatggctggcctgttgaacaagtctggaaagaaatgcataaacttttgccattctcaccggattcagtcgtcactcatggtgatttctcacttgataaccttatttttgacgaggggaaattaataggttgtattgatgttggacgagtcggaatcgcagaccgataccaggatcttgccatcctatggaactgcctcggtgagttttctccttcattacagaaacggctttttcaaaaatatggtattgataatcctgatatgaataaattgcagtttcatttgatgctcgatgagtttttctaatcagaattggttaattggttgtaacactggcagagcattacgctgacttgacgggacggcgcaagctcatgaccaaaatcccttaacgtgagttacgcgtcgttccactgagcgtcagaccccgtagaaaagatcaaaggatcttcttgagatcctttttttctgcgcgtaatctgctgcttgcaaacaaaaaaaccaccgctaccagcggtggtttgtttgccggatcaagagctaccaactctttttccgaaggtaactggcttcagcagagcgcagataccaaatactgttcttctagtgtagccgtagttaggccaccacttcaagaactctgtagcaccgcctacatacctcgctctgctaatcctgttaccagtggctgctgccagtggcgataagtcgtgtcttaccgggttggactcaagacgatagttaccggataaggcgcagcggtcgggctgaacggggggttcgtgcacacagcccagcttggagcgaacgacctacaccgaactgagatacctacagcgtgagctatgagaaagcgccacgcttcccgaagggagaaaggcggacaggtatccggtaagcggcagggtcggaacaggagagcgcacgagggagcttccagggggaaacgcctggtatctttatagtcctgtcgggtttcgccacctctgacttgagcgtcgatttttgtgatgctcgtcaggggggcggagcctatggaaaaacgccagcaacgcggcctttttacggttcctggccttttgctggccttttgctcacatgttctttcctgcgttatcccctgattctgtggataaccgtattaccgcctttgagtgagctgataccgctcgccgcagccgaacgaccgagcgcagcgagtcagtgagcgaggaagcggaagagcgcccaatacgcaaaccgcctctccccgcgcgttggccgattcattaatgcagctggcacgacaggtttcccgactggaaagcgggcagtgagcgcaacgcaattaatacgcgtaccgctagccaggaagagtttgtagaaacgcaaaaaggccatccgtcaggatggccttctgcttagtttgatgcctggcagtttatggcgggcgtcctgcccgccaccctccgggccgttgcttcacaacgttcaaatccgctcccggcggatttgtcctactcaggagagcgttcaccgacaaacaacagataaaacgaaagg

SEQ ID NO: 13 - DNA, 6805 bp, Artificial sequence
  PHP89179
cccagtcttccgactgagcctttcgttttatttgatgcctggcagttccctactctcgcgttcatggagctccaaataatgattttattttgactgatagtgacctgttcgttgcaacaaattgataagcaatgcttttttataatgccaactttgtatagaaaagttgggccgagctcggtacggccagaatggcccggaccgggttaccgaattcttaccctagctccctgcggctgttacgcggtcccccatcaatcttctgttcttgcggttgtagcctgtgtaacagtgctagagtatgtatgataaataggttttaagtctgcttacatgacattttttattgtggaagagacatataaaaattagagagagtggttctcatgcaacggcggacggcccggtgctaaaagagcttcaagacaaaataatgaaacaggaagagagtagatttatctaagagccaactttattatatgaatgtgtttattgttggctttagatgatatggtaaggagttagagctaataatagataggctctattattattattattaattaaactcgctctaaggaggaaagtgggaggaagggacgaggacgaagactactggaagcatcgtgcatggatgatggatgtggtgtctcttaatgtaggtggccggaggatgtacgtgttaattgcgcgataagcactcagatccaaccgcaaactacctccacactgacacactgatagagagaaagagagacctccgacgactgccgccgcagatgagccacgtacgtatacgacgtctgccggccggctcaggctgccgccatcaccctgctcgaaagtcgcgttaggcggcgccagctacataggagtatctagtctagccagttagtatactactactgcgctgatgatgaattaactctgcatagatactgtacttgcctccctccaacacccaaccacctcctgctcggctcttaataacttggacacggatcgatgccatccaaggaagaacacgacgacgacgacggaacatccaccatgcaagcttgcatccatacgccgatacgcgtgcatccatccatccaccattatttccattttccaccgatcacacgtacacaggcctatttaaggagcgacatcccactgcaactctcctcaccactcatcaccagctagctctagcaaagcacttgccatctaccgaccgccgcattccaaacagcccgacgagctagcagagcggcaggcacctccctcctcaaggaacccatggcggccaatgcgggcggcggtggagcgggaggaggcagcggcagcggcagcgtggctgcgccggcggtgtgccgccccagcggctcgcggtggacgccgacgccggagcagatcaggatgctgaaggagctctactacggctgcggcatccggtcgcccagctcggagcagatccagcgcatcaccgccatgctgcggcagcacggcaagatcgagggcaagaacgtcttctactggttccagaaccacaaggcccgcgagcgccagaagcgccgcctcaccagcctcgacgtcaacgtgcccgccgccggcgcggccgacgccaccaccagccaactcggcgtcctctcgctgtcgtcgccgccgccttcaggcgcggcgcctccctcgcccaccctcggcttctacgccgccggcaatggcggcggatcggctgtgctgctggacacgagttccgactggggcagcagcggcgctgctatggccaccgagacatgcttcctgcaggactacatgggcgtgacggacacgggcagctcgtcgcagtggccacgcttctcgtcgtcggacacgataatggcggcggccgcggcgcgggcggcgacgacgcgggcgcccgagacgctccctctcttcccgacctgcggcgacgacggcggcagcggtagcagcagctacttgccgttctggggtgccgcgtccacaactgccggcgccacttcttccgttgcgatccaacagcaacaccagctgcaggagcagtacagcttttacagcaacagcaacagcacccagctggccggcaccggcaaccaagacgtatcggcaacagcagcagcagccgccgccctggagctgagcctcagctcatggtgctccccttaccctgctgcagggagtatgtgagagcaacgcgagctgccactgctcttcactgatgtctctggaatggaaggaggaggaagtgagaacagatcattcgacaaagcagcattagtccgttgatcggtggaagaccactcgtcagtgttgagttgaatgtttgatcaataaaatacggcaatgctgtaagggttgttttttatgccattgataatacactgtactgttcagttgttgaactctatttcttagccatgccaagtgcttttcttattttgaataacattacagcaaaaagttgaaagacaaaaaaaaaaacccccgaacagagtgctttgggtcccaagcttctttagactgtgttcggcgttccccctaaatttctccccctatatctcactcacttgtcacatcagcgttctctttccccctatatctccacgctctacagcagttccacctatatcaaacctctataccccaccacaacaatattatatactttcatcttcaactaactcatgtaccttccaatttttttctactaataattatttacgtgcacagaaacttagcaaggagagagagagcgggaatttaaatgctcggcgttaggcttttagtccgctaggtggctagaccgaggttaggacgctagttcactaggggcctagtggtgttttaagacgtcacggtcacctgaagaaactatgtgctgtagtatagccgctgcccgctggctagctagctagttgagtcatttagcggcgatgattgagtaataatgtgtcacgcatcaccatgcatgggtggcagtgtcagtgtgagcaatgacctgaatgaacaattgaaatgaaaagaaaaaagtattgttccaaattaaacgttttaaccttttaataggtttatacaataattgatatatgttttctgtatatgtctaatttgttatcatccatttagatatagacaaaaaaaatctaagaactaaaacaaatgctaatttgaaatgaagggagtatatattgggataatgtcgatgagatccctcgtaatatcaccgacatcacacgtgtccagttaatgtatcagtgatacgtgtattcacatttgttgcgcgtaggcgtacccaacaattttgatcgactatcagaaagtcaacggaagcgagtcgacctcgagggggggccccggccgaagcttcggccggggcccatcgataacgagtatcggtccccattgacacatctactcctaacgctaacaacattcttcacttctagtgtatggcatcgacaattggtactttaatcttgggtcttcacttttacaactaaacaacccaaatataaatattatttgagtgggtttggtgttcatcagaacattcccatctttggtaatgctacctagcataaaagtgagctatcacgttgggcagcccattccatgcaatttttaccttcctcaaaaaaaatctttgatatatttatggtataataatttaaacttcacattgatcataattttttcagcaaataagttccataatttggtgtttgcaatatcgaaattgttactcatagggtccagttgatttaatgacattagtgttgttaagttcacatgcttcaaagaattctacatgtctacaatgctgcatttgtctgtaaaatttgggttcttgtaaaaaatacatgtgttgaatatttaccaaaaaaatataatgcgatatgactttgtgtgagcatgtttggacacagttacaagtttacttctaaacttatattatgttttgcttcgtgcaagtacaagtgatttgaatatccaaggccaaagcatgtgtccatcactatatcaaatcaacataccatatatgtatatactcaacaaaaagcacaaataatcacatctatgttataaacacacccccacacaaccaaacattaacattcaataggttgtgctaggacatcattgggatgatgaagtaatattgtattatctatgtattgaccaagcatgagtttaaaattacgatttgatgttttcagttatttatatgatgaacatagttcagaaatatatcgagataaatctcaatcaatatattgattatttctaggaaacacatgccggtatgagggcaccattgtcgagtacatcttaagtgagttaacggatcctctagagtcgacctgcaggcatgcccgcggatatcgatgggccccggccgaagcttcaagtttgtacaaaaaagttgaacgagaaacgtaaaatgatataaatatcaatatattaaattagattttgcataaaaaacagactacataatactgtaaaacacaacatatgcagtcactatgaaccaactacttagatggtattagtgacctgtagaattcgagctctagagctgcagggcggccgcgatatcccctatagtgagtcgtattacatggtcatagctgtttcctggcagctctggcccgtgtctcaaaatctctgatgttacattgcacaagataaaaatatatcatcatgaacaataaaactgtctgcttacataaacagtaatacaaggggtgttatgagccatattcaacgggaaacgtcgaggccgcgattaaattccaacatggatgctgatttatatgggtataaatgggctcgcgataatgtcgggcaatcaggtgcgacaatctatcgcttgtatgggaagcccgatgcgccagagttgtttctgaaacatggcaaaggtagcgttgccaatgatgttacagatgagatggtcagactaaactggctgacggaatttatgcctcttccgaccatcaagcattttatccgtactcctgatgatgcatggttactcaccactgcgatccccggaaaaacagcattccaggtattagaagaatatcctgattcaggtgaaaatattgttgatgcgctggcagtgttcctgcgccggttgcattcgattcctgtttgtaattgtccttttaacagcgatcgcgtatttcgtctcgctcaggcgcaatcacgaatgaataacggtttggttgatgcgagtgattttgatgacgagcgtaatggctggcctgttgaacaagtctggaaagaaatgcataaacttttgccattctcaccggattcagtcgtcactcatggtgatttctcacttgataaccttatttttgacgaggggaaattaataggttgtattgatgttggacgagtcggaatcgcagaccgataccaggatcttgccatcctatggaactgcctcggtgagttttctccttcattacagaaacggctttttcaaaaatatggtattgataatcctgatatgaataaattgcagtttcatttgatgctcgatgagtttttctaatcagaattggttaattggttgtaacactggcagagcattacgctgacttgacgggacggcgcaagctcatgaccaaaatcccttaacgtgagttacgcgtcgttccactgagcgtcagaccccgtagaaaagatcaaaggatcttcttgagatcctttttttctgcgcgtaatctgctgcttgcaaacaaaaaaaccaccgctaccagcggtggtttgtttgccggatcaagagctaccaactctttttccgaaggtaactggcttcagcagagcgcagataccaaatactgttcttctagtgtagccgtagttaggccaccacttcaagaactctgtagcaccgcctacatacctcgctctgctaatcctgttaccagtggctgctgccagtggcgataagtcgtgtcttaccgggttggactcaagacgatagttaccggataaggcgcagcggtcgggctgaacggggggttcgtgcacacagcccagcttggagcgaacgacctacaccgaactgagatacctacagcgtgagctatgagaaagcgccacgcttcccgaagggagaaaggcggacaggtatccggtaagcggcagggtcggaacaggagagcgcacgagggagcttccagggggaaacgcctggtatctttatagtcctgtcgggtttcgccacctctgacttgagcgtcgatttttgtgatgctcgtcaggggggcggagcctatggaaaaacgccagcaacgcggcctttttacggttcctggccttttgctggccttttgctcacatgttctttcctgcgttatcccctgattctgtggataaccgtattaccgcctttgagtgagctgataccgctcgccgcagccgaacgaccgagcgcagcgagtcagtgagcgaggaagcggaagagcgcccaatacgcaaaccgcctctccccgcgcgttggccgattcattaatgcagctggcacgacaggtttcccgactggaaagcgggcagtgagcgcaacgcaattaatacgcgtaccgctagccaggaagagtttgtagaaacgcaaaaaggccatccgtcaggatggccttctgcttagtttgatgcctggcagtttatggcgggcgtcctgcccgccaccctccgggccgttgcttcacaacgttcaaatccgctcccggcggatttgtcctactcaggagagcgttcaccgacaaacaacagataaaacgaaagg

SEQ ID NO: 14 - DNA, 26676 bp, Artificial sequence
  PHP90842
gtttacccgccaatatatcctgtcaaacactgatagtttaaactgaaggcgggaaacgacaatctgatcatgagcctagttagttaggggcagctaacgtcccctagctaactagttgctattaacctttagcctagtttagtgcggtcgcgctagtgaactagtctaatgggtgcctagcttagattagatccccgttcggcttagactaggttagtcggatagggctagtctagtggcttagcttggaactgttaagctaggctgttagtgcgggacttctaggctaacctattgacccctaacgcctagaacctaagaaacgctaaggacacctagctaactttggcgacgtccagaggtccgattccggctaactaactagcttaagcttgatatcgaattcctgcagccccggaccgggttacccggaccgaagcttgcatgcctgcagtgcagcgtgacccggtcgtgcccctctctagagataatgagcattgcatgtctaagttataaaaaattaccacatattttttttgtcacacttgtttgaagtgcagtttatctatctttatacatatatttaaactttactctacgaataatataatctatagtactacaataatatcagtgttttagagaatcatataaatgaacagttagacatggtctaaaggacaattgagtattttgacaacaggactctacagttttatctttttagtgtgcatgtgttctcctttttttttgcaaatagcttcacctatataatacttcatccattttattagtacatccatttagggtttagggttaatggtttttatagactaatttttttagtacatctattttattctattttagcctctaaattaagaaaactaaaactctattttagtttttttatttaataatttagatataaaatagaataaaataaagtgactaaaaattaaacaaataccctttaagaaattaaaaaaactaaggaaacatttttcttgtttcgagtagataatgccagcctgttaaacgccgtcgacgagtctaacggacaccaaccagcgaaccagcagcgtcgcgtcgggccaagcgaagcagacggcacggcatctctgtcgctgcctctggacccctctcgagagttccgctccaccgttggacttgctccgctgtcggcatccagaaattgcgtggcggagcggcagacgtgagccggcacggcaggcggcctcctcctcctctcacggcaccggcagctacgggggattcctttcccaccgctccttcgctttcccttcctcgcccgccgtaataaatagacaccccctccacaccctctttccccaacctcgtgttgttcggagcgcacacacacacaaccagatctcccccaaatccacccgtcggcacctccgcttcaaggtacgccgctcgtcctcccccccccccctctctaccttctctagatcggcgttccggtccatgcatggttagggcccggtagttctacttctgttcatgtttgtgttagatccgtgtttgtgttagatccgtgctgctagcgttcgtacacggatgcgacctgtacgtcagacacgttctgattgctaacttgccagtgtttctctttggggaatcctgggatggctctagccgttccgcagacgggatcgatttcatgattttttttgtttcgttgcatagggtttggtttgcccttttcctttatttcaatatatgccgtgcacttgtttgtcgggtcatcttttcatgcttttttttgtcttggttgtgatgatgtggtctggttgggcggtcgttctagatcggagtagaattctgtttcaaactacctggtggatttattaattttggatctgtatgtgtgtgccatacatattcatagttacgaattgaagatgatggatggaaatatcgatctaggataggtatacatgttgatgcgggttttactgatgcatatacagagatgctttttgttcgcttggttgtgatgatgtggtgtggttgggcggtcgttcattcgttctagatcggagtagaatactgtttcaaactacctggtgtatttattaattttggaactgtatgtgtgtgtcatacatcttcatagttacgagtttaagatggatggaaatatcgatctaggataggtatacatgttgatgtgggttttactgatgcatatacatgatggcatatgcagcatctattcatatgctctaaccttgagtacctatctattataataaacaagtatgttttataattattttgatcttgatatacttggatgatggcatatgcagcagctatatgtggatttttttagccctgccttcatacgctatttatttgcttggtactgtttcttttgtcgatgctcaccctgttgtttggtgttacttctgcaggtcgactttaacttagcctaggatccaacaatgccccagttcgacatcctctgcaagaccccccccaaggtgctcgtgaggcagttcgtggagaggttcgagaggccctccggcgagaagatcgccctctgcgccgccgagctcacctacctctgctggatgatcacccacaacggcaccgccattaagagggccaccttcatgtcatacaacaccatcatctccaactccctctccttcgacatcgtgaacaagtccctccagttcaaatacaagacccagaaggccaccatcctcgaggcctccctcaagaagctcatccccgcctgggagttcaccatcatcccctactacggccagaagcaccagtccgacatcaccgacatcgtgtcatccctccagcttcagttcgagtcctccgaggaggctgacaagggcaactcccactccaagaagatgctgaaggccctcctctccgagggcgagtccatctgggagatcaccgagaagatcctcaactccttcgagtacacctccaggttcactaagaccaagaccctctaccagttcctcttcctcgccaccttcatcaactgcggcaggttctcagacatcaagaacgtggaccccaagtccttcaagctcgtgcagaacaagtacctaggtttgtttctgcttctacctttgatatatatataataattatcattaattagtagtaatataatatttcaaatatttttttcaaaataaaagaatgtagtatatagcaattgcttttctgtagtttataagtgtgtatattttaatttataacttttctaatatatgaccaaaacatggtgatgcctaggtgtcatcatccagtgcctcgtgaccgagaccaagacctccgtgtccaggcacatctacttcttctccgctcgcggcaggatcgaccccctcgtgtacctcgacgagttcctcaggaactcagagcccgtgctcaagagggtgaacaggaccggcaactcctcctccaacaagcaggagtaccagctcctcaaggacaacctcgtgaggtcctacaacaaggccctcaagaagaacgccccctactccatcttcgccatcaagaacggccccaagtcccacatcggtaggcacctcatgacctccttcctctcaatgaagggcctcaccgagctcaccaacgtggtgggcaactggtccgacaagagggcctccgccgtggccaggaccacctacacccaccagatcaccgccatccccgaccactacttcgccctcgtgtcaaggtactacgcctacgaccccatctccaaggagatgatcgccctcaaggacgagactaaccccatcgaggagtggcagcacatcgagcagctcaagggctccgccgagggctccatcaggtaccccgcctggaacggcatcatctcccaggaggtgctcgactacctctcctcctacatcaacaggaggatctgagttaacctagacttgtccatcttctggattggccaacttaattaatgtatgaaataaaaggatgcacacatagtgacatgctaatcactataatgtgggcatcaaagttgtgtgttatgtgtaattactagttatctgaataaaagagaaagagatcatccatatttcttatcctaaatgaatgtcacgtgtctttataattctttgatgaaccagatgcatttcattaaccaaatccatatacatataaatattaatcatatataattaatatcaattgggttagcaaaacaaatctagtctaggtgtgttttgcgaatcctgtgaaaccaatctggatatccctgaaatttgaataaggttatgttgtgagtttatgaagttgtggtctagtgttgtattttgtttttcttaaggataatgcatctgtgtgctttgcttatctaaaatctaaataaagtgggtttctgcattgtgactttgcacaaacttcttttgttaaaatgaataagaaatcacatcaagaaaacagaacaagaccacaacgagaagacttgaaactctctgaaggtatataaacaaacagaacctagtaaattagagtcagcttattcaaaacttttagaccatcatcaagatcattataaacttggagtcaatgttgcggaaaccaatctgctatccccggaatttcaaataaagagactagagaattactttgaacacacttcttttattaaatcggatcacaaaaatccatcaaagacacaacagctacaaacacaaagagaagacttaaaacactgaagcagtaaacaaacagagagaaataaagtagaatcagcttattcaaagtgtgtaaactatcatcaaaagatacttaaaatctccataataacttagcctagcgaagttcctattccgaagttcctattctctagaaagtataggaacttcagatccaccgggatccccgatcatgcaaaaactcattaactcagtgcaaaactatgcctggggcagcaaaacggcgttgactgaactttatggtatggaaaatccgtccagccagccgatggccgagctgtggatgggcgcacatccgaaaagcagttcacgagtgcagaatgccgccggagatatcgtttcactgcgtgatgtgattgagagtgataaatcgactctgctcggagaggccgttgccaaacgctttggcgaactgcctttcctgttcaaagtattatgcgcagcacagccactctccattcaggttcatccaaacaaacacaattctgaaatcggttttgccaaagaaaatgccgcaggtatcccgatggatgccgccgagcgtaactataaagatcctaaccacaagccggagctggtttttgcgctgacgcctttccttgcgatgaacgcgtttcgtgaattttccgagattgtctccctactccagccggtcgcaggtgcacatccggcgattgctcactttttacaacagcctgatgccgaacgtttaagcgaactgttcgccagcctgttgaatatgcagggtgaagaaaaatcccgcgcgctggcgattttaaaatcggccctcgatagccagcagggtgaaccgtggcaaacgattcgtttaatttctgaattttacccggaagacagcggtctgttctccccgctattgctgaatgtggtgaaattgaaccctggcgaagcgatgttcctgttcgctgaaacaccgcacgcttacctgcaaggcgtggcgctggaagtgatggcaaactccgataacgtgctgcgtgcgggtctgacgcctaaatacattgatattccggaactggttgccaatgtgaaattcgaagccaaaccggctaaccagttgttgacccagccggtgaaacaaggtgcagaactggacttcccgattccagtggatgattttgccttctcgctgcatgaccttagtgataaagaaaccaccattagccagcagagtgccgccattttgttctgcgtcgaaggcgatgcaacgttgtggaaaggttctcagcagttacagcttaaaccgggtgaatcagcgtttattgccgccaacgaatcaccggtgactgtcaaaggccacggccgtttagcgcgtgtttacaacaagctgtaagagcttactgaaaaaattaacatctcttgctaagctgggggtggaacctagacttgtccatcttctggattggccaacttaattaatgtatgaaataaaaggatgcacacatagtgacatgctaatcactataatgtgggcatcaaagttgtgtgttatgtgtaattactagttatctgaataaaagagaaagagatcatccatatttcttatcctaaatgaatgtcacgtgtctttataattctttgatgaaccagatgcatttcattaaccaaatccatatacatataaatattaatcatatataattaatatcaattgggttagcaaaacaaatctagtctaggtgtgttttgcgaatgcgaccttcttatgtgcttctagtctccaaatgtggttgatagttattttgctctaagatcaacagtaatgaagtataaatcatcgttgtggtgtgctactcggttaattgagcattaacacacacaaacatgacgaggatggtataatctccaaaaatgtgtactttgttaggtgggaccctatagccttgattaatgtgctatgttaggcatgcctggaaacgtgtgacgcatatgttttgtgaacctgttgatattatatgtgcttttatattaccatattttattaaaatactaatatttattactagtaagatataacattctatctagcttaaaaactaaccataaatattccataataactagatttaccaaactaatatactaaatatacataataaatacaaaattaacaagacaataatcaatatttatgagcttaatatatttagacattatggttggtcgacgataatcatgctaacttttcgtaattgcttgattgaaatatgcttagaataatgcctctttgttctacatggcaaatagggaccattatggtgtaacaccctgggaaccacaaacaccccgaaatgctactaaactacacaactaaccttcatatataaaatttcgacagcatctcctttgaaaatttgcatagacgtggaagcaacagagtataaacagatatcatgataagaaaacatactagacattaataatctgctagaaatgggaagaatcctaacttgctcgagtcgatcgctatcaactttgtatagaaaagttgggccgaattcgagctcggtacggccagaatggcccggaccgaagcttgcatgcctgcagcccatccctcagccgcctttcactatcttttttgcccgagtcattgtcatgtgaaccttggcatgtataatcggtgaattgcgtcgattttcctcttataggtgggccaatgaatccgtgtgatcgcgtctgattggctagagatatgtttcttccttgttggatgtattttcatacataatcatatgcatacaaatatttcattacactttatagaaatggtcagtaataaaccctatcactatgtctggtgtttcattttatttgcttttaaacgaaaattgacttcctgattcaatatttaaggatcgtcaacggtgtgcagttactaaattctggtttgtaggaactatagtaaactattcaagtcttcacttattgtgcactcacctctcgccacatcaccacagatgttattcacgtcttaaatttgaactacacatcatattgacacaatattttttttaaataagcgattaaaacctagcctctatgtcaacaatggtgtacataaccagcgaagtttagggagtaaaaaacatcgccttacacaaagttcgctttaaaaaataaagagtaaattttactttggaccacccttcaaccaatgtttcactttagaacgagtaattttattattgtcactttggaccaccctcaaatcttttttccatctacatccaatttatcatgtcaaagaaatggtctacatacagctaaggagatttatcgacgaatagtagctagcatactcgaggtcattcatatgcttgagaagagagtcgggatagtccaaaataaaacaaaggtaagattacctggtcaaaagtgaaaacatcagttaaaaggtggtataaagtaaaatatcggtaataaaaggtggcccaaagtgaaatttactcttttctactattataaaaattgaggatgtttttgtcggtactttgatacgtcatttttgtatgaattggtttttaagtttattcgcttttggaaatgcatatctgtatttgagtcgggttttaagttcgtttgcttttgtaaatacagagggatttgtataagaaatatctttaaaaaaacccatatgctaatttgacataatttttgagaaaaatatatattcaggcgaattctcacaatgaacaataataagattaaaatagctttcccccgttgcagcgcatgggtattttttctagtaaaaataaaagataaacttagactcaaaacatttacaaaaacaacccctaaagttcctaaagcccaaagtgctatccacgatccatagcaagcccagcccaacccaacccaacccaacccaccccagtccagccaactggacaatagtctccacacccccccactatcaccgtgagttgtccgcacgcaccgcacgtctcgcagccaaaaaaaaaaaaagaaagaaaaaaaagaaaaagaaaaaacagcaggtgggtccgggtcgtgggggccggaaacgcgaggaggatcgcgagccagcgacgaggccggccctccctccgcttccaaagaaacgccccccatcgccactatatacatacccccccctctcctcccatccccccaaccctaccaccaccaccaccaccacctccacctcctcccccctcgctgccggacgacgagctcctcccccctccccctccgccgccgccgcgccggtaaccaccccgcccctctcctctttctttctccgttttttttttccgtcacggtctcgatctttggccttggtagtttgggtgggcgagaggcggcttcgtgcgcgcccagatcggtgcgcgggaggggcgggatctcgcggctggggctctcgccggcgtggatcaggcccggatctcgcggggaatggggctctcggatgtagatctgcgatccgccgttgttgggggagatgatggggggtttaaaatttccgccatgctaaacaagatcaggaagaggggaaaagggcactatggtttatatttttatatatttctgctgcttcgtcaggcttagatgtgctagatctttctttcttctttttgtgggtagaatttgaatccctcagcattgttcatcggtagtttttcttttcatgatttgtgacaaatgcagcctcgtgcggagcttttttgtaggtagaaggatccgcccatggcggccaatgcgggcggcggtggagcgggaggaggcagcggcagcggcagcgtggctgcgccggcggtgtgccgccccagcggctcgcggtggacgccgacgccggagcagatcaggatgctgaaggagctctactacggctgcggcatccggtcgcccagctcggagcagatccagcgcatcaccgccatgctgcggcagcacggcaagatcgagggcaagaacgtcttctactggttccagaaccacaaggcccgcgagcgccagaagcgccgcctcaccagcctcgacgtcaacgtgcccgccgccggcgcggccgacgccaccaccagccaactcggcgtcctctcgctgtcgtcgccgccgccttcaggcgcggcgcctccctcgcccaccctcggcttctacgccgccggcaatggcggcggatcggctgtgctgctggacacgagttccgactggggcagcagcggcgctgctatggccaccgagacatgcttcctgcaggactacatgggcgtgacggacacgggcagctcgtcgcagtggccacgcttctcgtcgtcggacacgataatggcggcggccgcggcgcgggcggcgacgacgcgggcgcccgagacgctccctctcttcccgacctgcggcgacgacggcggcagcggtagcagcagctacttgccgttctggggtgccgcgtccacaactgccggcgccacttcttccgttgcgatccaacagcaacaccagctgcaggagcagtacagcttttacagcaacagcaacagcacccagctggccggcaccggcaaccaagacgtatcggcaacagcagcagcagccgccgccctggagctgagcctcagctcatggtgctccccttaccctgctgcagggagtatgtgagagcaacgcgagctgccactgctcttcactgatgtctctggaatggaaggaggaggaagtgagaacagatcattcgacaaagcagcattagtccgttgatcggtggaagaccactcgtcagtgttgagttgaatgtttgatcaataaaatacggcaatgctgtaagggttgttttttatgccattgataatacactgtactgttcagttgttgaactctatttcttagccatgccaagtgcttttcttattttgaataacattacagcaaaaagttgaaagacaaaaaaaaaaacccccgaacagagtgctttgggtcccaagcttctttagactgtgttcggcgttccccctaaatttctccccctatatctcactcacttgtcacatcagcgttctctttccccctatatctccacgctctacagcagttccacctatatcaaacctctataccccaccacaacaatattatatactttcatcttcaactaactcatgtaccttccaatttttttctactaataattatttacgtgcacagaaacttagcaaggagagagagagcgggaatttaaatgctcggcgttaggcttttagtccgctaggtggctagaccgaggttaggacgctagttcactaggggcctagtggtgttttaagacgtcacggtcaccacgcgtggaccgaagcttgcatgcctgcagtgcagcgtgacccggtcgtgcccctctctagagataatgagcattgcatgtctaagttataaaaaattaccacatattttttttgtcacacttgtttgaagtgcagtttatctatctttatacatatatttaaactttactctacgaataatataatctatagtactacaataatatcagtgttttagagaatcatataaatgaacagttagacatggtctaaaggacaattgagtattttgacaacaggactctacagttttatctttttagtgtgcatgtgttctcctttttttttgcaaatagcttcacctatataatacttcatccattttattagtacatccatttagggtttagggttaatggtttttatagactaatttttttagtacatctattttattctattttagcctctaaattaagaaaactaaaactctattttagtttttttatttaataatttagatataaaatagaataaaataaagtgactaaaaattaaacaaataccctttaagaaattaaaaaaactaaggaaacatttttcttgtttcgagtagataatgccagcctgttaaacgccgtcgacgagtctaacggacaccaaccagcgaaccagcagcgtcgcgtcgggccaagcgaagcagacggcacggcatctctgtcgctgcctctggacccctctcgagagttccgctccaccgttggacttgctccgctgtcggcatccagaaattgcgtggcggagcggcagacgtgagccggcacggcaggcggcctcctcctcctctcacggcaccggcagctacgggggattcctttcccaccgctccttcgctttcccttcctcgcccgccgtaataaatagacaccccctccacaccctctttccccaacctcgtgttgttcggagcgcacacacacacaaccagatctcccccaaatccacccgtcggcacctccgcttcaaggtacgccgctcgtcctcccccccccccctctctaccttctctagatcggcgttccggtccatgcatggttagggcccggtagttctacttctgttcatgtttgtgttagatccgtgtttgtgttagatccgtgctgctagcgttcgtacacggatgcgacctgtacgtcagacacgttctgattgctaacttgccagtgtttctctttggggaatcctgggatggctctagccgttccgcagacgggatcgatttcatgattttttttgtttcgttgcatagggtttggtttgcccttttcctttatttcaatatatgccgtgcacttgtttgtcgggtcatcttttcatgcttttttttgtcttggttgtgatgatgtggtctggttgggcggtcgttctagatcggagtagaattctgtttcaaactacctggtggatttattaattttggatctgtatgtgtgtgccatacatattcatagttacgaattgaagatgatggatggaaatatcgatctaggataggtatacatgttgatgcgggttttactgatgcatatacagagatgctttttgttcgcttggttgtgatgatgtggtgtggttgggcggtcgttcattcgttctagatcggagtagaatactgtttcaaactacctggtgtatttattaattttggaactgtatgtgtgtgtcatacatcttcatagttacgagtttaagatggatggaaatatcgatctaggataggtatacatgttgatgtgggttttactgatgcatatacatgatggcatatgcagcatctattcatatgctctaaccttgagtacctatctattataataaacaagtatgttttataattattttgatcttgatatacttggatgatggcatatgcagcagctatatgtggatttttttagcactgccttcatacgctatttatttgcttggtactgtttcttttgtcgatgctcaccctgttgtttggtgttacttctgcaggtcgactttaacttagcctaggatccatggccactgtgaacaactggctcgctttctccctctccccgcaggagctgccgccctcccagacgacggactccacactcatctcggccgccaccgccgaccatgtctccggcgatgtctgcttcaacatcccccaagattggagcatgaggggatcagagctttcggcgctcgtcgcggagccgaagctggaggacttcctcggcggcatctccttctccgagcagcatcacaaggccaactgcaacatgatacccagcactagcagcacagtttgctacgcgagctcaggtgctagcaccggctaccatcaccagctgtaccaccagcccaccagctcagcgctccacttcgcggactccgtaatggtggcttcctcggccggtgtccacgacggcggtgccatgctcagcgcggccgccgctaacggtgtcgctggcgctgccagtgccaacggcggcggcatcgggctgtccatgattaagaactggctgcggagccaaccggcgcccatgcagccgagggtggcggcggctgagggcgcgcaggggctctctttgtccatgaacatggcggggacgacccaaggcgctgctggcatgccacttctcgctggagagcgcgcacgggcgcccgagagtgtatcgacgtcagcacagggtggagccgtcgtcgtcacggcgccgaaggaggatagcggtggcagcggtgttgccggcgctctagtagccgtgagcacggacacgggtggcagcggcggcgcgtcggctgacaacacggcaaggaagacggtggacacgttcgggcagcgcacgtcgatttaccgtggcgtgacaaggcatagatggactgggagatatgaggcacatctttgggataacagttgcagaagggaagggcaaactcgtaagggtcgtcaagtctatttaggtggctatgataaagaggagaaagctgctagggcttatgatcttgctgctctgaagtactggggtgccacaacaacaacaaattttccagtgagtaactacgaaaaggagctcgaggacatgaagcacatgacaaggcaggagtttgtagcgtctctgagaaggaagagcagtggtttctccagaggtgcatccatttacaggggagtgactaggcatcaccaacatggaagatggcaagcacggattggacgagttgcagggaacaaggatctttacttgggcaccttcagcacccaggaggaggcagcggaggcgtacgacatcgcggcgatcaagttccgcggcctcaacgccgtcaccaacttcgacatgagccgctacgacgtgaagagcatcctggacagcagcgccctccccatcggcagcgccgccaagcgcctcaaggaggccgaggccgcagcgtccgcgcagcaccaccacgccggcgtggtgagctacgacgtcggccgcatcgcctcgcagctcggcgacggcggagccctggcggcggcgtacggcgcgcactaccacggcgccgcctggccgaccatcgcgttccagccgggcgccgccagcacaggcctgtaccacccgtacgcgcagcagccaatgcgcggcggcgggtggtgcaagcaggagcaggaccacgcggtgatcgcggccgcgcacagcctgcaggacctccaccacctgaacctgggcgcggccggcgcgcacgactttttctcggcagggcagcaggccgccgccgctgcgatgcacggcctgggtagcatcgacagtgcgtcgctcgagcacagcaccggctccaactccgtcgtctacaacggcggggtcggcgacagcaacggcgccagcgccgtcggcggcagtggcggtggctacatgatgccgatgagcgctgccggagcaaccactacatcggcaatggtgagccacgagcaggtgcatgcacgggcctacgacgaagccaagcaggctgctcagatggggtacgagagctacctggtgaacgcggagaacaatggtggcggaaggatgtctgcatgggggactgtcgtgtctgcagccgcggcggcagcagcaagcagcaacgacaacatggccgccgacgtcgggcatggcggcgcgcagctcttcagtgtctggaacgacacttaagcgtacctagtggtacctgacatcttatagtctgcaacctctcgtgtctgaattcctatctttatcaagtgttattgcttccacgactataggacagctttcgtcgaaagcttttgctcatgtgatctcgaaggattcatctagtctgatttttcgtgacttgtatcggttttattggattcatccaacatatatcaataaaaaatgagttgtgtttcctttcttcctagttcagttaaaattatttccctcctgcgcttgtgctgtaattgtctgtgtacctgttgtttgtgactgtgttagttcccttggatatgatttcgtatttgatatgtacatggagatagcttagcttcattattggagtatgaagttagtatgacatagtcactctcctggaaaattgacactgcaaaccatatttttattctgaaccacaaatcctagtcagtccgctggcatatgccgtccgtttgctgaatccagaacgtgggtttggagatgtacggctgagatgcctctatgcgaaggggatttcgtggtgaaacgagatgggagtagagcaacgcccgtggaagatgcttcaaacttccacacttttgagcaacgatcggcagtagtaaggtagacgatttcaagatcaaagcatatgaagataaacaacatcaacaacaaaatttgttggggttctatagagagaaacagagctacatacatacactgttttgtatctaccatctgagatgatgaaaagatgaaaaactaaagaatgccccggcgccaacgccaggacacgccgcgcgcgcgtcacccgagccatctcttgacccagccggcgctgtatatttacacacgttgcagcatcgatcaccacctgttcgatcgcgtcgccgtcaccggcgcgccgcgacttattgaactagtctagggcgcggctaacaacctagcttagattgccttgtctaaacccttaggctaacgcgccactctagaaggccgatctcccccgaacgcgccagatcttgaagaaactatgtgctgtagtatagccgctgcccgctggctagctagctagttgagtcatttagcggcgatgattgagtaataatgtgtcacgcatcaccatgcatgggtggcagtgtcagtgtgagcaatgacctgaatgaacaattgaaatgaaaagaaaaaagtattgttccaaattaaacgttttaaccttttaataggtttatacaataattgatatatgttttctgtatatgtctaatttgttatcatccatttagatatagacaaaaaaaatctaagaactaaaacaaatgctaatttgaaatgaagggagtatatattgggataatgtcgatgagatccctcgtaatatcaccgacatcacacgtgtccagttaatgtatcagtgatacgtgtattcacatttgttgcgcgtaggcgtacccaacaattttgatcgactatcagaaagtcaacggaagcgagtcgacctcgagggggggccccggccgaagcttcggccggggcccatcgataacgagtatcggtccccattgacacatctactcctaacgctaacaacattcttcacttctagtgtatggcatcgacaattggtactttaatcttgggtcttcacttttacaactaaacaacccaaatataaatattatttgagtgggtttggtgttcatcagaacattcccatctttggtaatgctacctagcataaaagtgagctatcacgttgggcagcccattccatgcaatttttaccttcctcaaaaaaaatctttgatatatttatggtataataatttaaacttcacattgatcataattttttcagcaaataagttccataatttggtgtttgcaatatcgaaattgttactcatagggtccagttgatttaatgacattagtgttgttaagttcacatgcttcaaagaattctacatgtctacaatgctgcatttgtctgtaaaatttgggttcttgtaaaaaatacatgtgttgaatatttaccaaaaaaatataatgcgatatgactttgtgtgagcatgtttggacacagttacaagtttacttctaaacttatattatgttttgcttcgtgcaagtacaagtgatttgaatatccaaggccaaagcatgtgtccatcactatatcaaatcaacataccatatatgtatatactcaacaaaaagcacaaataatcacatctatgttataaacacacccccacacaaccaaacattaacattcaataggttgtgctaggacatcattgggatgatgaagtaatattgtattatctatgtattgaccaagcatgagtttaaaattacgatttgatgttttcagttatttatatgatgaacatagttcagaaatatatcgagataaatctcaatcaatatattgattatttctaggaaacacatgccggtatgagggcaccattgtcgagtacatcttaagtgagttaacggatcctctagagtcgacctgcaggcatgcccgcggatatcgatgggccccggccgaagcttcaagtttgtacaaaaaagcaggctccggccagaatggcccggaccgggttaccgaattcgagctcggtaccctggttcacaaactcaatacaacacacagtggagtagggtattacgctccggcggcccgaaccactctaaatccttgtgtcctcgtgtgctcttccaccattaatgactgtaattgcagggacacgaagagttgtagcgcttttgccaacaagatccgctatatgctagtagagtggaacctgcacagcaacaagcatccaataatctgagaataagaattatgtgtggtgatggttctcatctctgcaactcgccattttcgcgagagaaccaaatccaagttggtgaagatcatgatttgggctcatgggctggcatagtagctattacctttgcaattgtggttcgaatctatccgatattctccttttcagggagagctaatgcttatgcttattgggtattttggtttgacactgcttcacgcccaaaaaaaggcaactatgtctgagttggatatggcccaaaaaaaggcagctatgtctgagttggatatggaagtcttctttcgtttagggtgaagtaagaccaagctcatgagcttattatcttaggtcggaacaaattagttgataggcatggcacatttatcaaattataatgattttaacagaaaagcaacacctctttttcagcagcaccagctttgcaagctgcaattgacactccaagcatagtatttgctccaaactcagcctgcatttcgcacaatatcatatctatttccatttggataaaatatattttccagaaatatgggaacagaatcaagatacagaaaaaagttgtggtagtagtggtaagtggaaacacaagtacagtgaaaagatagcattatttctgaacagtcaaattaaccgaaataagtagtatcacatactgcccctaaattgactacacccaatgtaaagaattgcttgagcatattgagccatcagttgtttgtttgtgtaacggatttgacaatgcagagttcaggagcaaaaaaccgcaaaggagagaaagagggaaaggatctcctagtatcccaccttgtggcgcgccctgtcaagtgcatgatggcctggtcgatctgcgtctgctgctgcggttccatcccaacgagtgcctccgacaccttgtcgttgatcacccgcaccgcgtaggcgacccccctggcgaggaacttccgcctctcggaggccccggccgcgtcggcggcggcgccctcgagcgcgcccacgctagccgtagatgctcggtgcacggccttgttggtgtgcaactcgacctcaacggccggtgcgctacgcccgtcaaggatctggcgcgcccgcaccctcgtgatcacggtgggcgcctcccgcctcatgtggccgacgatgaaaagcgccgggttaggggccttggcgcgcaccgccgtattcagggcctcctcgctcttgcgcgagagcaggtgcttccccaggtactcctgcactgacaaggctgccacagcggtggaatttgtcctcacgacttcgccacgtcgtcctcacctccctggcttcccacgactccgccgtatcgaggtgctcggtgggtcgtcttaatccgaagtccgaactaggaagacgagacagagaggtctgaggaatgggcctcgtttgatgttgagctgaattatttttccagcataagcccaggtcttggtccatgaacaaaattactagaaacccagcccagtactacgatctaaaagagggactgccactggatagctctctctagcattctccacgctccaatacagcggcgtcgtgtctatccgggtctatccgcgaacacgtgagaactctccagaaactgctttctcctccacttcatctctctcgctttccctctataaaaagaccccttctaggaattgagggagacagcaagcaccaagcagcgatccgaagctcaatcaattcactcaaacctcttccccaaatcttcgattagatcttcgttgacaagaagactagaaccgaacctgacatgtccaacctgctcacggttcaccagaaccttccggctcttccagtggacgcgacgtccgatgaagtcaggaagaacctcatggacatgttccgcgacaggcaagcgttcagcgagcacacctggaagatgctgctctccgtctgccgctcctgggctgcatggtgcaagctgaacaacaggaagtggttccccgctgagcccgaggacgtgagggattaccttctgtacctgcaagcgcgaggtttgtttctgcttctacctttgatatatatataataattatcattaattagtagtaatataatatttcaaatatttttttcaaaataaaagaatgtagtatatagcaattgcttttctgtagtttataagtgtgtatattttaatttataacttttctaatatatgaccaaaacatggtgatgcctaggtctggcagtgaagaccatccagcaacaccttggacaactgaacatgcttcacaggcgctccggcctcccgcgccccagcgactcgaacgccgtgagcctcgtcatgcgccgcatcaggaaggaaaacgtcgatgccggcgaaagggcaaagcaggccctcgcgttcgagaggaccgatttcgaccaggtccgcagcctgatggagaacagcgacaggtgccaggacattaggaacctggcgttcctcggaattgcatacaacacgctcctcaggatcgcggaaattgcccgcattcgcgtgaaggacattagccgcaccgacggcggcaggatgcttatccacattggcaggaccaagacgctcgtttccaccgcaggcgtcgaaaaggccctcagcctcggagtgaccaagctcgtcgaacgctggatctccgtgtccggcgtcgcggacgacccaaacaactacctcttctgccgcgtccgcaagaacggggtggctgcccctagcgccaccagccaactcagcacgagggccttggaaggtattttcgaggccacccaccgcctgatctacggcgcgaaggatgacagcggtcaacgctacctcgcatggtccgggcactccgcccgcgttggagctgctagggacatggcccgcgccggtgtttccatccccgaaatcatgcaggcgggtggatggacgaacgtgaacattgtcatgaactacattcgcaaccttgacagcgagacgggcgcaatggttcgcctcctggaagatggtgactgaggtaccggctccacgtagtcgttatcgacgatcggcgacactactggagttggagcaacgtctagttccagcaataatataatgcaatattactgtagtagtagtagtatactataggacccctcctagctagcatgcggacatgctcttgtgatcttgtctcgggtccagacttcaataaagccatcttggcattatatgtactatacaaaaaagattatcactgctttctctcgatcgcaaatcatcctgtttttttttttggcaaaaagttcagcgtttctttctctctctctgactaccaaactgttgacagaaagaaaaaggtcaaaggagtttgcgaacgtacagtacagacataaaaaaacaaacacaagcagaaatatcaaatactgtgtttggttgttgtggcacgttgggcgtggtggaactgcggcacagttcttcgtgtagttttgcacaacttctgcctaaagttcgcactgatttcttgcactagatattcggggacaccacagctacctgcgcgcgtataaggtaaacaggccctaataacaaccgtctcaatattgtgtgatgtgtttgaggtcagatttgatcaatcaagaacatcttaacctataagatataggtaaataacaagccatctctttaacagtgaacatgtgtctctcaaacatattaaataatattggtgcggttagtgtgaagaaagtactgttagctgatttgttgtgaaagaaaaatattactgaatgactaacatctcttccaaactaaatgtttgcgtgtgaaataatggatattgtcggttccaaactaaatgtttgcgtgtgaaataatggatattgtcggatagagcacaaggtgctcaccttctgcacccaatataatttcactcaagaacgagcaggatatcgatcgacgatctcaaatgagcaacacgagctcagcataatatcgtgagccgtgatccgtcgccccgctaacttaagtataacttcgtatagcatacattatacgaagttattcggtccgggatctcccgggcacccagctttcttgtacaaagtggccgttaacggatcggccagaatggcccggaccgggttaccctgcccttaaggccaattgttcaagattcattcaacaattgaaacatctcccatgattaaatcagtataaggttgctatggtcttgcttgacaaagtttttttttgagggaatttcaactaaatttttgagtgaaactatcaaatactgattttaaaaaatttttataaaaggaagcgcagagataaaaggccatctatgctacaaaagtacccaaaaatgtaatcctaaagtatgaattgcattttttttttgtttggacgaaaggaaaggagtattaccacaagaatgatatcatcttcatatttagatcttttttgggtaaagcttgagattctctaaatatagagaaatcagaagaaaaaaaaaccgtgttttggtggttttgatttctagcctccacaataactttgacggcgtcgacaagtctaacggacaccaagcagcgaaccaccagcgccgagccaagcgaagcagacggccgagacgttgacaccttcggcgcggcatctctcgagagttccgctccggcgctccacctccaccgctggcggtttcttattccgttccgttccgcctcctgctctgctcctctccacaccacacggcacgaaaccgttacggcaccggcagcacccagcacgggagaggggattcctttcccaccgttccttccctttccgccccgccgctataaatagccagccccatccccagcttttttccccaatctcatctcctctctcctgttgttcggagcacacgcacaatccgatcgatccccaaatccccttcgtctctcctcgcgagcctcgtggatcccagcttcaaggtacggcgatcgatcatcccccctccttctctctaccttcttttctctagactacatcggatggcgatccatggttagggcctgctagtttcccttcctgttttgtcgatggctgcgaggcacaatagatctgatggcgttatgacggctaacttgtcatgttgttgcgatttatagtccctttaggagatcagtttaatttctcggatggttcgagatcggtggtccatggttagtaccctaagatccgcgctgttagggttcgtagatggaggcgacctgttctgattgttaacttgtcagtacctgggaaatcctgggatggttctagctcgtccgcagatgagatcgatttcatgatcctctgtatcttgtttcgttgcctaggttccgtctaatctatccgtggtatgatgtagatgttttgatcgtgctaactacgtcttgtaaagttaattgtcaggtcataatttttagcatgcctttttttttgtttggttttgtctaattgggctgtcgttctagatcagagtagaagactgttccaaactacctgctggatttattgaacttggatctgtatgtgtgtcacatatcttcataaattcatgattaagatggattgaaatatcttttatctttttggtatggatagttctatatgttggtgtggctttgttagatgtatacatgcttagatacatgaagcaacgtgctgctactgtttagtaattgctgttcatttgtctaataaacagataaggatatgtatttatgttgctgttggttttgctggtactttgttggatacaaatgcttcaatacagaaaacagcatgctgctacgatttaccatttatctaatcttatcatatgtctaatctaataaacaaacatgcttttaaattatcttcatatgcttggatgatggcatacacagcggctatgtgtggttttttaaatacccagcatcatgggcatgcatgacactgctttaatatgctttttatttgcttgagactgtttcttttgtttatactgaccctttagttcggtgactcttccgcaggtcgactttaacttagcctagtgatcatggcctcctccgagaacgtcatcaccgagttcatgcgcttcaaggtgcgcatggagggcaccgtgaacggccacgagttcgagatcgagggcgagggcgagggccgcccctacgagggccacaacaccgtgaagctgaaggtgacgaagggcggccccctgcccttcgcctgggacatcctgtccccccagttccagtacggctccaaggtgtacgtgaagcaccccgccgacatccccgactacaagaagctgtccttccccgagggcttcaagtgggagcgcgtgatgaacttcgaggacggcggcgtggcgaccgtgacccaggactcctccctgcaggacggctgcttcatctacaaggtgaagttcatcggcgtgaacttcccctccgacggccccgtgatgcagaagaagaccatgggctgggaggcctccaccgagcgcctgtacccccgcgacggcgtgctgaagggcgagacccacaaggccctgaagctgaaggacggcggccactacctggtggagttcaagtccatctacatggccaagaagcccgtgcagctgcccggctactactacgtggacgccaagctggacatcacctcccacaacgaggactacaccatcgtggagcagtacgagcgcaccgagggccgccaccacctgttcctgtagtctggtaccgtttttctcagacagttttctaaaaaaagggcgtttctggggaagttcgagatggttcgtaaggtgttactggctcctgtgaaccaatacatgatactgccatgataagggttataattagtcaagcagagtaagaagaaacaacagtagcagtgactccgattcctgaagatgagtcatatttgtcttgtgctcctgctgtatgaaatggatcgcatgtgtatattcgtcgccgcgccgcactggtgtaacctgttgcctcagagtttgcttttagctggttctgttttaaaaataagtactgttttttggttggctgcaagccattctgaacttcagtttaccaattgtttttatgttgtggttgaatattttaattttttatttaatgtttggttctttttttatatatatttgcaaaaatgatacaagtggtcaagttttcatatagtatgggctctatttcctagagctctacctctaggaacgaattttgtggaggttttcttttggctagttaggcaaagtccccatatcttgcaggctaaatcaagaagaagctctgtcaaacagttttttttactgaaaagtgattaaagagtagtttctcctagatcacttcagagtttatcctagagaatcatgggaatcaaattcagttagaggatcatttcttacaaagaatcaactttcgtagagaatctaaagcagaaagagctttgacaaacttacccttagagcaattccaacattctcgcgtgagtttcttcgcgccgttgttttgcggtgacttcatctggacgtcccgcgacatagagacgcttgtatttatcatgagagcttgtgtggtcatacacaatataattgttaaagatgaaagagatgtggaccttaatgagcgattcgactttgatggtgaaaatgtgcaaccttctcatggtatttctactcgcacactagctgaatttattgaagctcataaaaagatccgagacaaagaaatacattttcaattgaaagaagacctaatcaagcacttatggtgtacacccgggcaactttattatacaaagttgatagatcctacaggccagaatggcctctggattcagcggcctagaaggccgaagtacttggtcttcctaatatcggaccgaggaccgattaaactttaattcggtccgtcaatattcaccgaagcgactaattaactagctgtcccacggcctaactagcacttaatcccctagcctaacctaagagcgctaatctaggctagtggtcacttagggctttaaggctagcgtatacgaagttcctattccgaagttcctattcttcaaaaagtataggaacttctgtacacctgagcctaactaactaggacgtcccgaggtccgattccgggctaattaacacctagctcgccactcgactaattagggactaagcctagcgcttagccgttaaaacctagcacaccctaagcacccttagttaggttcccctcttaattaagccctagtgagcccctaagttaaggggacgctaagagccccctaacctagtattcggctagaggcgaactaggctaaacacctaagcgcacctctttaagctagatcgctagggggctaggctagagcttcgctagattagtctaagggcagctaactaactaggggcgcgccaataccgaattcattccgattaatcgtggcctcttgctcttcaggatgaagagctatgtttaaacgtgcaagcgctactagacaattcagtacattaaaaacgtccgcaatgtgttattaagttgtctaagcgtcaatttgtttacaccacaatatatcctgcca

SEQ ID NO: 15 - DNA, 17152 bp, Artificial sequence
  PHP92365
gtttacccgccaatatatcctgtcaaacactgatagtttaaactgaaggcgggaaacgacaatctgatcatgagcggagaattaagggagtcacgttatgacccccgccgatgacgcgggacaagccgttttacgtttggaactgacagaaccgcaacgttgaaggagccactcagcaagctggtacgattgtaatacgactcactatagggcgaattgagcgctgtttaaacgctcttcaactggaagagcggttacgctgtttaaacgctcttcaactggaagagcggttactaccggttcactagctagctgctaatcgagctagttaccctatgaggtgacatgaagcgctcacggttactatgacggttagcttcacgactgttggtggcagtagcgtacgacttagctatagttccggacttacccttaagcgatttaaatctgcggttaccgaattcgagctcggtacctagtacccttgtacttttggtttcacctgcatagagaaaacccacaagaatatgacagtctgatttgtcagtctcattctcaagcaacatttctctatccgttactttcatggtgaataacacaatccatcatcaatactttgtgttactcagaaactgaaagttattccgagtcttgcatatctttggacctactcgtttttctaccattattgctgattgttaagctctcgctacttgaatcggcattgttggagtgggaaggttcaaaaaattggagttatgactagttgtctctttctatgtacgatggagaaaatgaataaacaactgagaaaatggctcttgtttagttgatgatgctcttaagctttccactggttgccatatatgatttgggcatttcactttgatcttaatgggccttgtaaagcccaagactcatgattatctttagttgatgctcttaattaggtgtgggcaaataattcaaactgtatgtacccgaccaaaaccaaagcaaaaataatcgaaccaaaccgaaaatttaaaaataaccgaatgaaaactaaatcctataactgaaagaactgaaaccgaatcaaaatatttaatgtaaccaaaaatatccgaaatataattatattgtcaaaaatattaataatttctagattaaataattaaaaatacttaaaaatttatataaaatagtaaaaatactcgaaaataaccacaaatattcaaaaacaaccgaaatatcccaaaatattcaaagcaaaataaccgaatggataccaaattttaaaaccgaaaaaactggaacaaaaccaaaatcgaaccaaaatttcaaaaatcgaataaatactaaactttagaacaaaaaaaaacgataaccgaatgtatacgaaccaaagccgaattagataaccgaacgtccaggactactcttaatctttccgccacttatgatttgggctattactttgtttataatgagccttttcaagctcaagttcatgattgtccgtgagatgagaaactgacttgttggattcgaaaccctagctagtattggttaatacttaatacataaatgacctgcattgacatcatcatccaagaaaataaaaattgtatgcttgagatatttagttttcctagctaggttttctttattttagtaccgaatctttaggtgtgccacgttaatttagacccattttttcatacttaccaactgagtctagtttaatcatgactataatcgtataaaatgattcagtcgacgtcattgcgaacgtatataaaatcatccaaattgacgtcattccaaagaggtaagcatgcttatctaagagtccgagcatactaaacaagacgacattttatttgcactccaaatcaaattttgtattgcctaaagaaaaacaatcaaactcaagtttcttaaaattaatttcattcaaactaatcactttcaatatctcacatattattcatgccatttctatttgtctaaacatgatttaaaaaaaaaagtaaaatacaaagattactatgcaaaaactctataaaaaaaaattcaaatttcttatttatttgtgacatcaaattttcaaaataatttttttaattatcggttgatccggtcagtcgataaaaacataaactttcagcgaccgttaaaactttcctactaccgatttagagaaaatcttagcttgaaacgtaattgtaacctgccttcatgcaagtcgcaagatatgtcatcctaagttgtatatgttttctcaaaagatgtatttacttgagaaaatacgtttcaacgttgatggacaaccaattaagaatcaagcacctttcgtaatcaatttaggcttatcgtctaaggtatactgatttacgacagttgactagacttataaggaacaaaataatagaatagtttctaaacacttcacctaatcatagagactaagatggtaattcgtaaacgacaaagcctagtgacactgtccattgtaaaattccacatcatattagtattaaacatatacatgtagtttcctgaacacatgtagtatcaaacacacttcgtggcttcttcctcgaaacctgcggccgcgctatagttccggacttacccttaagataacttcgtatagcatacattatacgaagttatgggcccacgcgtgaagagcggttaccagagctggtcacctttgtccaccaagatggaactgtcttcggccagaatggccatctggattcagcaggcctagaaggccatttatcgctatcaactttgtatagaaaagttgggccagaatggcccggaccgggttaccgaattcttaccctagctccctgcggctgttacgcggtcccccatcaatcttctgttcttgcggttgtagcctgtgtaacagtgctagagtatgtatgataaataggttttaagtctgcttacatgacattttttattgtggaagagacatataaaaattagagagagtggttctcatgcaacggcggacggcccggtgctaaaagagcttcaagacaaaataatgaaacaggaagagagtagatttatctaagagccaactttattatatgaatgtgtttattgttggctttagatgatatggtaaggagttagagctaataatagataggctctattattattattattaattaaactcgctctaaggaggaaagtgggaggaagggacgaggacgaagactactggaagcatcgtgcatggatgatggatgtggtgtctcttaatgtaggtggccggaggatgtacgtgttaattgcgcgataagcactcagatccaaccgcaaactacctccacactgacacactgatagagagaaagagagacctccgacgactgccgccgcagatgagccacgtacgtatacgacgtctgccggccggctcaggctgccgccatcaccctgctcgaaagtcgcgttaggcggcgccagctacataggagtatctagtctagccagttagtatactactactgcgctgatgatgaattaactctgcatagatactgtacttgcctccctccaacacccaaccacctcctgctcggctcttaataacttggacacggatcgatgccatccaaggaagaacacgacgacgacgacggaacatccaccatgcaagcttgcatccatacgccgatacgcgtgcatccatccatccaccattatttccattttccaccgatcacacgtacacaggcctatttaaggagcgacatcccactgcaactctcctcaccactcatcaccagctagctctagcaaagcacttgccatctaccgaccgccgcattccaaacagcccgacgagctagcagagcggcaggcacctccctcctcaaggaacccatggcggccaatgcgggcggcggtggagcgggaggaggcagcggcagcggcagcgtggctgcgccggcggtgtgccgccccagcggctcgcggtggacgccgacgccggagcagatcaggatgctgaaggagctctactacggctgcggcatccggtcgcccagctcggagcagatccagcgcatcaccgccatgctgcggcagcacggcaagatcgagggcaagaacgtcttctactggttccagaaccacaaggcccgcgagcgccagaagcgccgcctcaccagcctcgacgtcaacgtgcccgccgccggcgcggccgacgccaccaccagccaactcggcgtcctctcgctgtcgtcgccgccgccttcaggcgcggcgcctccctcgcccaccctcggcttctacgccgccggcaatggcggcggatcggctgtgctgctggacacgagttccgactggggcagcagcggcgctgctatggccaccgagacatgcttcctgcaggactacatgggcgtgacggacacgggcagctcgtcgcagtggccacgcttctcgtcgtcggacacgataatggcggcggccgcggcgcgggcggcgacgacgcgggcgcccgagacgctccctctcttcccgacctgcggcgacgacggcggcagcggtagcagcagctacttgccgttctggggtgccgcgtccacaactgccggcgccacttcttccgttgcgatccaacagcaacaccagctgcaggagcagtacagcttttacagcaacagcaacagcacccagctggccggcaccggcaaccaagacgtatcggcaacagcagcagcagccgccgccctggagctgagcctcagctcatggtgctccccttaccctgctgcagggagtatgtgagagcaacgcgagctgccactgctcttcactgatgtctctggaatggaaggaggaggaagtgagaacagatcattcgacaaagcagcattagtccgttgatcggtggaagaccactcgtcagtgttgagttgaatgtttgatcaataaaatacggcaatgctgtaagggttgttttttatgccattgataatacactgtactgttcagttgttgaactctatttcttagccatgccaagtgcttttcttattttgaataacattacagcaaaaagttgaaagacaaaaaaaaaaacccccgaacagagtgctttgggtcccaagcttctttagactgtgttcggcgttccccctaaatttctccccctatatctcactcacttgtcacatcagcgttctctttccccctatatctccacgctctacagcagttccacctatatcaaacctctataccccaccacaacaatattatatactttcatcttcaactaactcatgtaccttccaatttttttctactaataattatttacgtgcacagaaacttagcaaggagagagagagcggggtcacccggtccgggcctagaaggccacccggggctcggcgttaggcttttagtccgctaggtggctagaccgaggttaggacgctagttcactaggggcctagtggtgttttaaggatatccccacccagctttcttgtacaaagtggccgttaacggatcggccagaatggcccggaccgggttacccggaccgaagcttgcatgcctgcagtgcagcgtgacccggtcgtgcccctctctagagataatgagcattgcatgtctaagttataaaaaattaccacatattttttttgtcacacttgtttgaagtgcagtttatctatctttatacatatatttaaactttactctacgaataatataatctatagtactacaataatatcagtgttttagagaatcatataaatgaacagttagacatggtctaaaggacaattgagtattttgacaacaggactctacagttttatctttttagtgtgcatgtgttctcctttttttttgcaaatagcttcacctatataatacttcatccattttattagtacatccatttagggtttagggttaatggtttttatagactaatttttttagtacatctattttattctattttagcctctaaattaagaaaactaaaactctattttagtttttttatttaataatttagatataaaatagaataaaataaagtgactaaaaattaaacaaataccctttaagaaattaaaaaaactaaggaaacatttttcttgtttcgagtagataatgccagcctgttaaacgccgtcgacgagtctaacggacaccaaccagcgaaccagcagcgtcgcgtcgggccaagcgaagcagacggcacggcatctctgtcgctgcctctggacccctctcgagagttccgctccaccgttggacttgctccgctgtcggcatccagaaattgcgtggcggagcggcagacgtgagccggcacggcaggcggcctcctcctcctctcacggcaccggcagctacgggggattcctttcccaccgctccttcgctttcccttcctcgcccgccgtaataaatagacaccccctccacaccctctttccccaacctcgtgttgttcggagcgcacacacacacaaccagatctcccccaaatccacccgtcggcacctccgcttcaaggtacgccgctcgtcctcccccccccccctctctaccttctctagatcggcgttccggtccatgcatggttagggcccggtagttctacttctgttcatgtttgtgttagatccgtgtttgtgttagatccgtgctgctagcgttcgtacacggatgcgacctgtacgtcagacacgttctgattgctaacttgccagtgtttctctttggggaatcctgggatggctctagccgttccgcagacgggatcgatttcatgattttttttgtttcgttgcatagggtttggtttgcccttttcctttatttcaatatatgccgtgcacttgtttgtcgggtcatcttttcatgcttttttttgtcttggttgtgatgatgtggtctggttgggcggtcgttctagatcggagtagaattctgtttcaaactacctggtggatttattaattttggatctgtatgtgtgtgccatacatattcatagttacgaattgaagatgatggatggaaatatcgatctaggataggtatacatgttgatgcgggttttactgatgcatatacagagatgctttttgttcgcttggttgtgatgatgtggtgtggttgggcggtcgttcattcgttctagatcggagtagaatactgtttcaaactacctggtgtatttattaattttggaactgtatgtgtgtgtcatacatcttcatagttacgagtttaagatggatggaaatatcgatctaggataggtatacatgttgatgtgggttttactgatgcatatacatgatggcatatgcagcatctattcatatgctctaaccttgagtacctatctattataataaacaagtatgttttataattattttgatcttgatatacttggatgatggcatatgcagcagctatatgtggatttttttagccctgccttcatacgctatttatttgcttggtactgtttcttttgtcgatgctcaccctgttgtttggtgttacttctgcaggtcgactttaacttagcctaggatccgcccatggactccagcagcttcctccctgccgccggcgcggagaatggctcggcggcgggcggcgccaacaatggcggcgctgctcagcagcatgcggcgccggcgatccgcgagcaggaccggctgatgccgatcgcgaacgtgatccgcatcatgcggcgcgtgctgccggcgcacgccaagattagcgacgacgccaaggagacgatccaggagtgcgtgtcggagtacatcagcttcatcacgggggaggccaacgagcggtgccagcgggagcagcgcaagaccatcaccgccgaggacgtgctgtgggccatgagccgcctcggcttcgacgactacgtcgagccgctcggcgcctacctccaccgctaccgcgagttcgagggcgacgcgcgcggcgtcgggctcgtccctggggccgccccatcgcgcggcggcgaccaccacccgcactccatgtcgccagcggcgatgctcaagtcccgcgggccagtctccggagccgccatgctaccgcaccaccaccaccaccacgacatgcagatgcacgccgccatgtacgggggaacggccgtgcccccgccggccgggcctcctcaccacggcgggttcctcatgccacacccacagggtagtagccactacctgccttacgcgtacgagcccacgtacggcggtgagcacgcgatggctgcatactatggaggcgccgcgtacgcgcccggcaacggcgggagcggcgacggcagtggcagtggcggcggtggcgggagcgcgtcgcacacaccgcagggcagcggcggcttggagcacccgcacccgttcgcgtacaagtagttatgtacaggtaccagctgctgctgttctagggttcacaagtctgcctatttgtcttccccaatggagctatggttgtctggtctggtccttggtcgtgtcccgtttcattgtgtactatttacctgtaatgtgtatccttaagtctggtttgatggtgtctgaaacgttttgctgtggtagagcagcatggaagaactataatgaataagtgatccctaatcattgtgtccaaattttgcttctgctatacccttttgtgctgtttcttatgttttgcttaaaaatttgatctgacaaacaaatttgtctaaattatgctcttgttctgactgtgtactgtacacatttgtattgctaccggtttggcacatagttttctctttgattgcagatcaaacccttctgattgcagattgcttggctatggctgatgtgctcactgttcttctttagcttgtatattgctgatggtggcttggctacggctgaaaaagttgctgctgcgccgacttggcaactgttgctccagtaatgctttgtcctctcttcctagccgccgacttggcacttggcagctgttgctcctgtaatgcgttgttatctcttatctcttgagatgtactatgattttgaggctgtttgacttgtgccagattgccagtgctgatgctatattatctcaggtttttatgctagtatatgttttactgtgtgctgcctgtgtcgagttacgtaatctattgaaccgctatgcgtgttgatgccctgttgttgcttgccagattgatgcccctgttgcttgcagcttgcaagctgtagtgaaatcctaaaattccaaaccaaatctattctgaacttttgaagatctgtgatgtccggaagaaaagattcaaacagataaacgggactctccagaatctataaaataaatgatcgacaaacgctttgctttggtaggcttcaagcttggcgcgccggtcacccggtccgggcctagaaggccacccggggcacttaggagcgaagactaacggttagctagggctgatacctaaaccttagtcactagcagcgtctactagcccccaactttattatacaaagttgatagataaatcagatatctggttcctaaggacccggcggaccgattaaactgattcggtccgacgcgttacctaataacttcgtatagcatacattatacgaagttattagctaactaactagtaagcttaagccatgggtcgacggatccgttaactagcgtggcatttggcaccgccgcacactatgcgagctaggagtgctagtttacagatgaaactatgaaaccaagaaaacacaattgtccgtagctagcgcgtggcgtcgtgtcaagcttcacacagtatcttcgttcttcactataaatcgcgcctgttgttcgtgagacccaccaccgtggataacagtcccctaataataagcgatcaacagcactgctgatggctgaacaccgaggcgccgccgcgcgtaaccatccgccggagcagcccgtcgtgccggcgaacgacgccttccccgaccgcgcccagcagctctgcctcgacgccgggcgcgcgctcgcgatgtgcggcgtgctcgtcgccgtccctcccgcattttacgcgtcgacgtcgcggacgacaccgcacttgccttcgtcggcttcgtcctctggatcatcggtgcgtggctgtgcctcctggcgctcacgcccttggctccacgggcggtgagggcgggcggggccgccgccagcaccttgctgatcaggtgcctgtccctttcatgaactactagcgcccgcgcccgcggccgccgggcacaagagaacacatcgatgttcgctgcgtacgtcagcaataaggcactctttgtcagtagtcgagtgcatatgttgggtgtttgccctgggagatttcaagtgttgtggccattatcccgcaggataaaaaatcggcggcttttggattgatacggaaaataacgatgtttcatgctcgtgttgtgtgtgtgacatcttgtcagccaagtttttaaccgttgctactccccctctgtgggctcagtgtgtggaccggaatacgtcgtacataggccgtagcctaagcccaatatgccgtttttcaggttggcctgtgtgacgacaagcgggtctcaaaagcccatcacgcaactggcctgcaattattggaggagagcgcgtcgagttggttccagaggctgcgtggtggggccggactctgcgacgacctctcgttcgcgtccgatttggttgccgtgagccgtgacgtaacgcctccttccgttcctccctatataagttccacccccgggtccggtttccccaagccccagtgacccccgatcccgatcgcgaaatctccgcacccgccggcaagggaccgaagcaagcctctctcccgaccgtcgcatcaaggtacgcgtccgctcgatctgtcctcttccttctcgatttgacttgctgtggtgcccgatcacgggatcagaatcgcaccagtgtagatttcgcatgttctaagatgtgttagtttccaggctaatccagttctcttgacgcccgatccgatcgagctccgtgtttatttcagcctaatcgtagtattcccctaaaatttcctcattagggggttcgcaagattgttggtcgacaggttcacttatgctcgatcgcttacttttagtcgattcatgctgcgtactattgttgccccccgtggttttatcttttctcgtgtgaaatccagtagatatagtagatatcgtagcattaggttttaattcaatcgattgattattgtatcatcaaaattgagaagttcgaatcatgcctatcatgctgcctcaaccgaaatcctgtatattgaagtttcaattcaattgattgatcattcattagattcaaccaaaatctagaaggttagatgacgcatgtcatgctgcctgcgtagtttacctttgatctgtttatgattaccttatcagtaggatatttgtgattttgggaagtagcactaactgattcatgctgacatgatgttccctttcagattatactgttgagtcctatctaattgatgctttgtatgctatatgaatacgtcatggtaaattagcagttaattagcatattagcaattgggcgtacctcatcaggattgctcttgtagatgtgtgtggtgatgtttcttgttcaattcatgttctgctttaaaagtatgtgttctctgtttgttaattaagattcatggttataatgatttggacctaattaatcagggttgcccttttagatgcgtggttacttgttgagttcatttttttcctgctatagttgtatgcgtttgttcattcatggttagatttgatttgtttcttctctattccatgccttccatatacttcaattgtagcttaacatgagatttctgtatatgcaggtcgaccgccggggatccacacgacaccatggcccagtccaagcacggcctgaccaaggagatgaccatgaagtaccgcatggagggctgcgtggacggccacaagttcgtgatcaccggcgagggcatcggctaccccttcaagggcaagcaggccatcaacctgtgcgtggtggagggcggccccttgcccttcgccgaggacatcttgtccgccgccttcatgtacggcaaccgcgtgttcaccgagtacccccaggacatcgtcgactacttcaagaactcctgccccgccggctacacctgggaccgctccttcctgttcgaggacggcgccgtgtgcatctgcaacgccgacatcaccgtgagcgtggaggagaactgcatgtaccacgagtccaagttctacggcgtgaacttccccgccgacggccccgtgatgaagaagatgaccgacaactgggagccctcctgcgagaagatcatccccgtgcccaagcagggcatcttgaagggcgacgtgagcatgtacctgctgctgaaggacggtggccgcttgcgctgccagttcgacaccgtgtacaaggccaagtccgtgccccgcaagatgcccgactggcacttcatccagcacaagctgacccgcgaggaccgcagcgacgccaagaaccagaagtggcacctgaccgagcacgccatcgcctccggctccgccttgccctccggactcagatctcgatagagtcaacctagacttgtccatcttctggattggccaacttaattaatgtatgaaataaaaggatgcacacatagtgacatgctaatcactataatgtgggcatcaaagttgtgtgttatgtgtaattactagttatctgaataaaagagaaagagatcatccatatttcttatcctaaatgaatgtcacgtgtctttataattctttgatgaaccagatgcatttcattaaccaaatccatatacatataaatattaatcatatataattaatatcaattgggttagcaaaacaaatctagtctaggtgtgttttgcgaattgcggcgcccttactttaacgcctctaaccaacacccctttatctttataaggaacaataaacagaatttgccccactgttctaaatcacctaataatatccccagctaaaaacaataaaggtttcctagaattaagacaagcatgactgttcctccaggagggtttggaacattgttgcagtcttgcagatacgggcgaagggtgagaaacagagcggagggctggaggtgacctcggtagtcgacgccggagttgagcttgacaacgacggggcggcccctgatggacttgaggaagtccgatggcgtcttcaccgtcccgccggcgcccgaggcgggcctgtcgctgccgccgccgccgctgctcatcttgcgcgctgtgcccccggcggtgtccctgtgttgcggatcgcgggtgggccaggtggatgcgagggcgacccgtttggactccggccggagccgccggatccctggtcggtgtcagtgccgtttactctgggccccacgtgtcagtaccgtctgtagatgacaacaacccgtcgtccacagtcatgtccaaaatatcctttcttcttttttttcgattcggatatctatcttccttttttttttccaaaaatcttcttgacgcaccagcgcgcacgtttgtggtaaacgccgacacgtcggtcccacgtcgatagaccccacccaccagtgagtagcgtgtacgtattcgggggtgacggacgtgtcgccgtcgtcttgctagtcccattcccatctgagccacacatctctgaacaaaaaaaaggagggaggcctccacgcacatccccctccgtgccacccgccccaaaccctcgcgccgcctccgagacagccgccgcaaccatggccaccgccgccgccgcgtctaccgcgctcactggcgccactaccgctgcgcccaaggcgaggcgccgggcgcacctcctggccacccgccgcgccctcgccgcgcccatcaggtgctcagcggcgtcacccgccatgccgatggctcccccggccaccccgctccggccgtggggccccaccgagccccgcaagggtgctgacatcctcgtcgagtccctcgagcgctgcggcgtccgcgacgtcttcgcctaccccggcggcgcgtccatggagatccaccaggcactcacccgctcccccgtcatcgccaaccacctcttccgccacgagcaaggggaggcctttgccgcctccggctacgcgcgctcctcgggccgcgtcggcgtctgcatcgccacctccggccccggcgccaccaacctagtctccgcgctcgccgacgcgctgctcgattccgtccccatggtcgccatcacgggacaggtggcgcgacgcatgattggcaccgacgccttccaggagacgcccatcgtcgaggtcacccgctccatcaccaagcacaactacctggtcctcgacgtcgacgacatcccccgcgtcgtgcaggaggctttcttcctcgcctcctctggtcgaccagggccggtgcttgtcgacatccccaaggacatccagcagcagatggcggtgcctgtctgggacaagcccatgagtctgcctgggtacattgcgcgccttcccaagccccctgcgactgagttgcttgagcaggtgctgcgtcttgttggtgaatcgcggcgccctgttctttatgtgggcggtggctgcgcagcatctggtgaggagttgcgacgctttgtggagctgactggaatcccggtcacaactactcttatgggcctcggcaacttccccagcgacgacccactgtctctgcgcatgctaggtatgcatgggacggtgtatgcaaattatgcagtggataaggccgatctgttgcttgcacttggtgtgcggtttgatgatcgcgtgacagggaagattgaggcttttgcaagcagggctaagattgtgcacgttgatattgatccggctgagattggcaagaacaagcagccacatgtgtccatctgtgcagatgttaagcttgctttgcagggcatgaatgctcttcttgaaggaagcacatcaaagaagagctttgactttggctcatggaacgatgagttggatcagcagaagagggaattcccccttgggtataaaacatctaatgaggagatccagccacaatatgctattcaggttcttgatgagctgacgaaaggcgaggccatcatcggcacaggtgttgggcagcaccagatgtgggcggcacagtactacacttacaagcggccaaggcagtggttgtcttcagctggtcttggggctatgggatttggtttgccggctgctgctggtgcttctgtggcaaacccaggtgtcactgttgttgacatcgatggagatggtagctttctcatgaacgttcaggagctagctatgatccgaattgagaacctcccagtgaaggtctttgtgctaaacaaccagcacctggggatggtggtgcagttggaggacaggttctataaggccaacagagcgcacacatacttgggaaacccagagaatgaaagtgagatatatccagatttcgtgacgatcgccaaagggttcaacattccagcggtccgtgtgacaaagaagaacgaagtccgcgcagcgataaagaagatgctcgagactccagggccgtacctcttggatataatcgtcccacaccaggagcatgtgttgcctatgatccctagtggtggggctttcaaggatatgatcctggatggtgatggcaggactgtgtactgactagctagtcagttaacagatctgccagatcctcggtgtacaaataacccgtcttatcctatgagacgggccggcgtcagtgtgttctggaggaatttttatgtcagagcctttttctttgtgtgcttgatgtagatgccaagggaagcttattggctgttgaagcttgatgcaaaataaattatggaactctgttttttgtttatctaataataactagcaaatatgcttccattgcattgaaactaacagccttttgtgtttccaagttttattttgtgacaatgtcatctatttcaattagttgtggaatcggaaacttgcaggactaacttggaaactccaatccctcagcatcctggactttttcctggtgtaatccatgtagatattattttaatcatcattttagttctggaggtttttccatctccggttttgctcccctttcttcaaaaaaaaaaaaaaaatgccgtaggcgccgcaacgcccacctgttgttcaaactcatgggcacgagtggctcgaagattttatacaacaattgctgtagtttcaccgttgctggtgaagaagcatttttttaaaaaaatatagtggtattcattttaattagtttagttgtgcagcgagcaaaatttggacatgctctgctcggaatctgatcgacctagacacagattagcagcagtagctttgtcatctgttccaagagttgcgatctgatagaagaaaaaaaaaccttcccttcaatgtaaaaccgaaactaacaagaaagaagcacagtgccgtttaggcaagtatggagtacgtattaagcatgtagaaggccatgcatgaaccactaacaagaaagaagcgcagtgccattcaggcaagcataagcatgtagattggcatgcatgaacaactaacagtagatcgtctctggtctgattagaagttttttgggaagccaagaaatcatgtacaactggttccatctcaaattccgtggcaaaaagaggcctaagcaacatacctcgagtagatcacattcaagcttggtcacccggtccgtcaatattctgattccgatgacttcgtaggttcctagctcaagccgctcgtgtccaagcgtcacttacgattagctaatgattacggcatctaggaccgactagtggcgcgccgactagctagctaaggtaccgagctcgaattcattccgattaatcgtggcctcttgctcttcaggatgaagagctatgtttaaacgtgcaagcgctactagacaattcagtacattaaaaacgtccgcaatgtgttattaagttgtctaagcgtcaatttgtttacaccacaatatatcctgcca

SEQ ID NO: 16 - DNA, 10070 bp, Artificial sequence
  PHP92765
gtttacccgccaatatatcctgtcaaacactgcggccgcacttgaccgcggatggagccggagctgtggtgaggccatcgacgggaggtgggggagaacacagtctcagtgttctttgtgagtccgcaaggtttttagcttttctgtattaattaaggttgctgttggctgtagaatacggtcgtggaagagctgtatcggtagctactacgtaagctattatatactggaagtctggagctcgtcgatctccggtcgtcttcctccatttctcctcgtcttgctttgactgctgctaccatttgcttctgttttctgatgaagcatgccatgtcggccaccagtgtttgtgtggtttttgcagggaatggctttcaagtgctgtgattgaatggccctcgtcgtcctcggctgagctcacatggacgcgtcatgtgagtgagatatatgatcatatgatgagtggggttcgggtgagtgcgtacttgaagtaggatcccgctttcactcattcattcattggcctttaaaccgggaaattttcgcgaggagatggagggaagcaagcagggtgacgagtgcagagtgccgcgagcgctttgtcaaaaggcaccgccgtaggcaaaaaaatcaatggccctgactgactcgatggtagtactactgtagagactagagagggttgctccccatatcttcgtgtgacttttactccagcattgcatttccgtcattgagacgttaattaatagcagctttcgggacagatgactgtggccatgtttcgtcacggccgcttcgtgccagctgggggtactatagtactgtgattttgttagtaaaaactttcattaggccaccattgacgaccgggccttcgcttttgctgcgctaattaaccatttcccggcgaccgaagggaacatgaacatgccccgacacatgagggcatgaggactagtgttctccctgtcgttcgttgacttgactagtgatagtttaaacgctcttcaactggaagagcggttactaccggttcactagctagctgctaatcgagctagttaccctatgaggtgacatgaagcgctcacggttactatgacggttagcttcacgactgttggtggcagtagcgtacgacttagctatagttccggacttacctagctaataacttcgtatagcatacattatacgaagttatggttaccgcggccgcgaattccggaccgggttaccgaattcttaccctagctccctgcggctgttacgcggtcccccatcaatcttctgttcttgcggttgtagcctgtgtaacagtgctagagtatgtatgataaataggttttaagtctgcttacatgacattttttattgtggaagagacatataaaaattagagagagtggttctcatgcaacggcggacggcccggtgctaaaagagcttcaagacaaaataatgaaacaggaagagagtagatttatctaagagccaactttattatatgaatgtgtttattgttggctttagatgatatggtaaggagttagagctaataatagataggctctattattattattattaattaaactcgctctaaggaggaaagtgggaggaagggacgaggacgaagactactggaagcatcgtgcatggatgatggatgtggtgtctcttaatgtaggtggccggaggatgtacgtgttaattgcgcgataagcactcagatccaaccgcaaactacctccacactgacacactgatagagagaaagagagacctccgacgactgccgccgcagatgagccacgtacgtatacgacgtctgccggccggctcaggctgccgccatcaccctgctcgaaagtcgcgttaggcggcgccagctacataggagtatctagtctagccagttagtatactactactgcgctgatgatgaattaactctgcatagatactgtacttgcctccctccaacacccaaccacctcctgctcggctcttaataacttggacacggatcgatgccatccaaggaagaacacgacgacgacgacggaacatccaccatgcaagcttgcatccatacgccgatacgcgtgcatccatccatccaccattatttccattttccaccgatcacacgtacacaggcctatttaaggagcgacatcccactgcaactctcctcaccactcatcaccagctagctctagcaaagcacttgccatctaccgaccgccgcattccaaacagcccgacgagctagcagagcggcaggcacctccctcctcaaggaacccatggcggccaatgcgggcggcggtggagcgggaggaggcagcggcagcggcagcgtggctgcgccggcggtgtgccgccccagcggctcgcggtggacgccgacgccggagcagatcaggatgctgaaggagctctactacggctgcggcatccggtcgcccagctcggagcagatccagcgcatcaccgccatgctgcggcagcacggcaagatcgagggcaagaacgtcttctactggttccagaaccacaaggcccgcgagcgccagaagcgccgcctcaccagcctcgacgtcaacgtgcccgccgccggcgcggccgacgccaccaccagccaactcggcgtcctctcgctgtcgtcgccgccgccttcaggcgcggcgcctccctcgcccaccctcggcttctacgccgccggcaatggcggcggatcggctgtgctgctggacacgagttccgactggggcagcagcggcgctgctatggccaccgagacatgcttcctgcaggactacatgggcgtgacggacacgggcagctcgtcgcagtggccacgcttctcgtcgtcggacacgataatggcggcggccgcggcgcgggcggcgacgacgcgggcgcccgagacgctccctctcttcccgacctgcggcgacgacggcggcagcggtagcagcagctacttgccgttctggggtgccgcgtccacaactgccggcgccacttcttccgttgcgatccaacagcaacaccagctgcaggagcagtacagcttttacagcaacagcaacagcacccagctggccggcaccggcaaccaagacgtatcggcaacagcagcagcagccgccgccctggagctgagcctcagctcatggtgctccccttaccctgctgcagggagtatgtgagagcaacgcgagctgccactgctcttcactgatgtctctggaatggaaggaggaggaagtgagaacagatcattcgacaaagcagcattagtccgttgatcggtggaagaccactcgtcagtgttgagttgaatgtttgatcaataaaatacggcaatgctgtaagggttgttttttatgccattgataatacactgtactgttcagttgttgaactctatttcttagccatgccaagtgcttttcttattttgaataacattacagcaaaaagttgaaagacaaaaaaaaaaacccccgaacagagtgctttgggtcccaagcttctttagactgtgttcggcgttccccctaaatttctccccctatatctcactcacttgtcacatcagcgttctctttccccctatatctccacgctctacagcagttccacctatatcaaacctctataccccaccacaacaatattatatactttcatcttcaactaactcatgtaccttccaatttttttctactaataattatttacgtgcacagaaacttagcaaggagagagagagcggggtcacccggtccgggcctagaaggccacccggggctcggcgttaggcttttagtccgctaggtggctagaccgaggttaggacgctagttcactaggggcctagtggtgttttaaggatgttaacaccaaggagaggattcgatgacgagtttgaggacgccattgctaggatgattaaccctaggctctggttccatgtagaaatcagaggcgcgatggaaataggtggaacgtcggtctccgctccagagatcacgacggcttcgtgtttgatatttctggtggcacaaaaacaaggcgcgagttacatatatatagatgagtatcgccagctttagttctattctaggaaaggataagttttacatggttacaattgatctatttctattaactgcctatagaacttagccggcaatatctcaaccatatttggaatacaacacatatatgttaacaatcagtctagcagctaggttgctgtgtggattcgtgaagcggcaaattcttggatggctgcaggtgcccgacatctttcgagcctccttgcaaattgctagtttttttcttgtttttcctctttgacttggtccgagtgtgctatgcagttgctgtgagagtgcaccttctgcttagtcgcatgatacaaggaactgttgattctaaaaaaaactttattttaatgtaaaggagagagaatttaatatcagttttttttcgatatagactttcatgtgattttgcatcgcccgatacatcagtgtgtttgtttggctttagtccatagcggcttctataacgttttgcctcgatagattacagctagctgcagcagttttaaaagccgtctttaatcggaagccaacatctcgacatatagagcgttcgataggatgcttacttattctagtctattaaatttcccaccgctgctaattaatgctaatgaattaactctctctgcctatccctcgacatgcactaatgtaggagtatatcccaacgcccaaccacctcctaataacttcgacggatggcagctaccgtccttggaagatggtgacggaatgtccagcattccaccgactgccagaaactgcacgcacatctgtcatcagcaatcgctagcctatttaatgagcaacattccattgcaatctcctcaggccacttacctgcagtcaccactcccaagccagtacccacagtcctacgagcagtcgcacgcaagtgtcaagagatctggatccgtcccccagatttgctaggacaccgccgtacccacaccccggatcagttaatatcgtagacataatggccctccctgccatctccacaaccaagcactcccatcatcatgcatgcagcaggctgtgctgtggacctgatcgagtttcaattgatccaagcaagcaagagggatgggagtccttggttgtggaaattgcagagagagaccagtcgttgatcggtcggagatctccccgaatcgatctcgatcggccggaattttgggggccggccgggaggtggatgatggggggtgattaccatctaggcggcgccgtgttggatgatgtaccaacatatcactataggctactttgggaacctcagatccccttcgggattggaggaaattgagatggaaatgaactaatttcttctctaacccccttcaatcacgaaggggattcgagtttccaaactagccctatatatatcagagctagggagggatattgctgcaacatgcatcacgaggtacagatatataattagggttctgctgcaatgttttgactatagatcgttagtgatctgctgtaattaataataatggtgatctcgaagcaattctaaacatcatagtagcaggcccaggtaccgttaacagatctactaactatctatactgtaataatgttgtatagccgccggatagctagctagtttagtcattcagcggcgatgggtaataataaagtgtcatccatccatcaccatgcgtggcaacgtgagcaatgacctgattgaacaaattgaaatgaaaagaagaaatatgttatatgtcaacgagatttcctcataatgccactgacgacgtgtgtccaagaaatgtatcagtgatacgtatattcacaatttttttatgacttatactcacaatttgtttttttactacttatactcacaatttgttgtgcgtaccataacaatttcgatcgaatatatatcagaaagttgacgaaagtaagctcactcaaaaagttaaatgggctgcggaagctgcgtcaggcccaagttttggctattctatccggtatccacgattttgatggctgagggacatatgttcgcttaagcttgagctcggtaccctggttcacaaactcaatacaacacacagtggagtagggtattacgctccggcggcccgaaccactctaaatccttgtgtcctcgtgtgctcttccaccattaatgactgtaattgcagggacacgaagagttgtagcgcttttgccaacaagatccgctatatgctagtagagtggaacctgcacagcaacaagcatccaataatctgagaataagaattatgtgtggtgatggttctcatctctgcaactcgccattttcgcgagagaaccaaatccaagttggtgaagatcatgatttgggctcatgggctggcatagtagctattacctttgcaattgtggttcgaatctatccgatattctccttttcagggagagctaatgcttatgcttattgggtattttggtttgacactgcttcacgcccaaaaaaaggcaactatgtctgagttggatatggcccaaaaaaaggcagctatgtctgagttggatatggaagtcttctttcgtttagggtgaagtaagaccaagctcatgagcttattatcttaggtcggaacaaattagttgataggcatggcacatttatcaaattataatgattttaacagaaaagcaacacctctttttcagcagcaccagctttgcaagctgcaattgacactccaagcatagtatttgctccaaactcagcctgcatttcgcacaatatcatatctatttccatttggataaaatatattttccagaaatatgggaacagaatcaagatacagaaaaaagttgtggtagtagtggtaagtggaaacacaagtacagtgaaaagatagcattatttctgaacagtcaaattaaccgaaataagtagtatcacatactgcccctaaattgactacacccaatgtaaagaattgcttgagcatattgagccatcagttgtttgtttgtgtaacggatttgacaatgcagagttcaggagcaaaaaaccgcaaaggagagaaagagggaaaggatctcctagtatcccaccttgtggcgcgccctgtcaagtgcatgatggcctggtcgatctgcgtctgctgctgcggttccatcccaacgagtgcctccgacaccttgtcgttgatcacccgcaccgcgtaggcgacccccctggcgaggaacttccgcctctcggaggccccggccgcgtcggcggcggcgccctcgagcgcgcccacgctagccgtagatgctcggtgcacggccttgttggtgtgcaactcgacctcaacggccggtgcgctacgcccgtcaaggatctggcgcgcccgcaccctcgtgatcacggtgggcgcctcccgcctcatgtggccgacgatgaaaagcgccgggttaggggccttggcgcgcaccgccgtattcagggcctcctcgctcttgcgcgagagcaggtgcttccccaggtactcctgcactgacaaggctgccacagcggtggaatttgtcctcacgacttcgccacgtcgtcctcacctccctggcttcccacgactccgccgtatcgaggtgctcggtgggtcgtcttaatccgaagtccgaactaggaagacgagacagagaggtctgaggaatgggcctcgtttgatgttgagctgaattatttttccagcataagcccaggtcttggtccatgaacaaaattactagaaacccagcccagtactacgatctaaaagagggactgccactggatagctctctctagcattctccacgctccaatacagcggcgtcgtgtctatccgggtctatccgcgaacacgtgagaactctccagaaactgctttctcctccacttcatctctctcgctttccctctataaaaagaccccttctaggaattgagggagacagcaagcaccaagcagcgatccgaagctcaatcaattcactcaaacctcttccccaaatcttcgattagatcttcgttgacaagaagactagaaccgaacctgacatgtccaacctgctcacggttcaccagaaccttccggctcttccagtggacgcgacgtccgatgaagtcaggaagaacctcatggacatgttccgcgacaggcaagcgttcagcgagcacacctggaagatgctgctctccgtctgccgctcctgggctgcatggtgcaagctgaacaacaggaagtggttccccgctgagcccgaggacgtgagggattaccttctgtacctgcaagcgcgaggtttgtttctgcttctacctttgatatatatataataattatcattaattagtagtaatataatatttcaaatatttttttcaaaataaaagaatgtagtatatagcaattgcttttctgtagtttataagtgtgtatattttaatttataacttttctaatatatgaccaaaacatggtgatgcctaggtctggcagtgaagaccatccagcaacaccttggacaactgaacatgcttcacaggcgctccggcctcccgcgccccagcgactcgaacgccgtgagcctcgtcatgcgccgcatcaggaaggaaaacgtcgatgccggcgaaagggcaaagcaggccctcgcgttcgagaggaccgatttcgaccaggtccgcagcctgatggagaacagcgacaggtgccaggacattaggaacctggcgttcctcggaattgcatacaacacgctcctcaggatcgcggaaattgcccgcattcgcgtgaaggacattagccgcaccgacggcggcaggatgcttatccacattggcaggaccaagacgctcgtttccaccgcaggcgtcgaaaaggccctcagcctcggagtgaccaagctcgtcgaacgctggatctccgtgtccggcgtcgcggacgacccaaacaactacctcttctgccgcgtccgcaagaacggggtggctgcccctagcgccaccagccaactcagcacgagggccttggaaggtattttcgaggccacccaccgcctgatctacggcgcgaaggatgacagcggtcaacgctacctcgcatggtccgggcactccgcccgcgttggagctgctagggacatggcccgcgccggtgtttccatccccgaaatcatgcaggcgggtggatggacgaacgtgaacattgtcatgaactacattcgcaaccttgacagcgagacgggcgcaatggttcgcctcctggaagatggtgactgaggtacccaacctagacttgtccatcttctggattggccaacttaattaatgtatgaaataaaaggatgcacacatagtgacatgctaatcactataatgtgggcatcaaagttgtgtgttatgtgtaattactagttatctgaataaaagagaaagagatcatccatatttcttatcctaaatgaatgtcacgtgtctttataattctttgatgaaccagatgcatttcattaaccaaatccatatacatataaatattaatcatatataattaatatcaattgggttagcaaaacaaatctagtctaggtgtgttttgcgatccgatatcgatataacttcgtatagcatacattatacgaagttataaggcgcgccacttacgcttgattccgatgacttcgtaggttcctagctcaagccgctcgtgtccaagcgtcacttacgattagctaatgattacggcatctaggaccgactagctagctagctaagagctcggtaccgagctcgaattcattccgattaatcgtggcctcttgctcttcaggatgaagagctatgtttaaacgtgcaagcgctactagacaattcagtacattaaaaacgtccgcaatgtgttattaagttgtctaagcgtcaatttgtttacaccacaatatatcctgcca

SEQ ID NO: 17 - DNA, 15693 bp, Artificial sequence
  PHP92928
gtttacccgccaatatatcctgtcaaacactgatagtttaaactgaaggcgggaaacgacaatctgatcatgagcggagaattaagggagtcacgttatgacccccgccgatgacgcgggacaagccgttttacgtttggaactgacagaaccgcaacgttgaaggagccactcagcaagctggtacgattgtaatacgactcactatagggcgaattgagcgctgtttaaacgctcttcaactggaagagcggttacgctgtttaaacgctcttcaactggaagagcgtttactaccggttcactagctagctgctaatcgagctagttaccctatgaggtgacatgaagcgctcacggttactatgacggttagcttcacgactgttggtggcagtagcgtacgacttagctatagttccggacttaccacttaagggtcacctttgtccaccaagatggaactgtcttcggccagaatggccatctggattcagcaggcctagaaggccatttatcgctatcaactttgtatagaaaagttgggccgagctcggtacggccagaatggcccggaccgggttaccaagcggccgcatcgagcagctggcttgtggggaccagacaaaaaaggaatggtgcagaattgttaggcgcacctaccaaaagcatctttgcctttattgcaaagataaagcagattcctctagtacaagtggggaacaaaataacgtggaaaagagctgtcctgacagcccactcactaatgcgtatgacgaacgcagtgacgaccacaaaactcgagcaacgagatcatgagccaatcaaagaggagtgatgtagacctaaagcaataatggagccatgacgtaagggcttacgcccatacgaaataattaaaggctgatgtgacctgtcggtctctcagaacctttactttttatgtttggcgtgtatttttaaatttccacggcaatgacgatgtgaccgtcgacccactaaaacattgctttgtcaaaagctaaaaaagatgatgcccgacagccacttgtgtgaagcatgagaagccggtccctccactaagaaaattagtgaagcatcttccagtggtccctccactcacagctcaatcagtgagcaacaggacgaaggaaatgacgtaagccatgacgtctaatcccagggcccggtgaccaatcgaattcttaccctagctccctgcggctgttacgcggtcccccatcaatcttctgttcttgcggttgtagcctgtgtaacagtgctagagtatgtatgataaataggttttaagtctgcttacatgacattttttattgtggaagagacatataaaaattagagagagtggttctcatgcaacggcggacggcccggtgctaaaagagcttcaagacaaaataatgaaacaggaagagagtagatttatctaagagccaactttattatatgaatgtgtttattgttggctttagatgatatggtaaggagttagagctaataatagataggctctattattattattattaattaaactcgctctaaggaggaaagtgggaggaagggacgaggacgaagactactggaagcatcgtgcatggatgatggatgtggtgtctcttaatgtaggtggccggaggatgtacgtgttaattgcgcgataagcactcagatccaaccgcaaactacctccacactgacacactgatagagagaaagagagacctccgacgactgccgccgcagatgagccacgtacgtatacgacgtctgccggccggctcaggctgccgccatcaccctgctcgaaagtcgcgttaggcggcgccagctacataggagtatctagtctagccagttagtatactactactgcgctgatgatgaattaactctgcatagatactgtacttgcctccctccaacacccaaccacctcctgctcggctcttaataacttggacacggatcgatgccatccaaggaagaacacgacgacgacgacggaacatccaccatgcaagcttgcatccatacgccgatacgcgtgcatccatccatccaccattatttccattttccaccgatcacacgtacacaggcctatttaaggagcgacatcccactgcaactctcctcaccactcatcaccagctagctctagcaaagcacttgccatctaccgaccgccgcattccaaacagcccgacgagctagcagagcggcaggcacctccctcctcaaggaacccatggcggccaatgcgggcggcggtggagcgggaggaggcagcggcagcggcagcgtggctgcgccggcggtgtgccgccccagcggctcgcggtggacgccgacgccggagcagatcaggatgctgaaggagctctactacggctgcggcatccggtcgcccagctcggagcagatccagcgcatcaccgccatgctgcggcagcacggcaagatcgagggcaagaacgtcttctactggttccagaaccacaaggcccgcgagcgccagaagcgccgcctcaccagcctcgacgtcaacgtgcccgccgccggcgcggccgacgccaccaccagccaactcggcgtcctctcgctgtcgtcgccgccgccttcaggcgcggcgcctccctcgcccaccctcggcttctacgccgccggcaatggcggcggatcggctgtgctgctggacacgagttccgactggggcagcagcggcgctgctatggccaccgagacatgcttcctgcaggactacatgggcgtgacggacacgggcagctcgtcgcagtggccacgcttctcgtcgtcggacacgataatggcggcggccgcggcgcgggcggcgacgacgcgggcgcccgagacgctccctctcttcccgacctgcggcgacgacggcggcagcggtagcagcagctacttgccgttctggggtgccgcgtccacaactgccggcgccacttcttccgttgcgatccaacagcaacaccagctgcaggagcagtacagcttttacagcaacagcaacagcacccagctggccggcaccggcaaccaagacgtatcggcaacagcagcagcagccgccgccctggagctgagcctcagctcatggtgctccccttaccctgctgcagggagtatgtgagagcaacgcgagctgccactgctcttcactgatgtctctggaatggaaggaggaggaagtgagaacagatcattcgacaaagcagcattagtccgttgatcggtggaagaccactcgtcagtgttgagttgaatgtttgatcaataaaatacggcaatgctgtaagggttgttttttatgccattgataatacactgtactgttcagttgttgaactctatttcttagccatgccaagtgcttttcttattttgaataacattacagcaaaaagttgaaagacaaaaaaaaaaacccccgaacagagtgctttgggtcccaagcttctttagactgtgttcggcgttccccctaaatttctccccctatatctcactcacttgtcacatcagcgttctctttccccctatatctccacgctctacagcagttccacctatatcaaacctctataccccaccacaacaatattatatactttcatcttcaactaactcatgtaccttccaatttttttctactaataattatttacgtgcacagaaacttagcaaggagagagagagcgggaatttaaatgctcggcgttaggcttttagtccgctaggtggctagaccgaggttaggacgctagttcactaggggcctagtggtgttttaagacgtcacggtcacccggtccgggcctagaaggccagcttcaagtttgtacaaaaaagcaggctccggccagaatggcccggaccgaagcttgcatgcctgcagtgcagcgtgacccggtcgtgcccctctctagagataatgagcattgcatgtctaagttataaaaaattaccacatattttttttgtcacacttgtttgaagtgcagtttatctatctttatacatatatttaaactttactctacgaataatataatctatagtactacaataatatcagtgttttagagaatcatataaatgaacagttagacatggtctaaaggacaattgagtattttgacaacaggactctacagttttatctttttagtgtgcatgtgttctcctttttttttgcaaatagcttcacctatataatacttcatccattttattagtacatccatttagggtttagggttaatggtttttatagactaatttttttagtacatctattttattctattttagcctctaaattaagaaaactaaaactctattttagtttttttatttaataatttagatataaaatagaataaaataaagtgactaaaaattaaacaaataccctttaagaaattaaaaaaactaaggaaacatttttcttgtttcgagtagataatgccagcctgttaaacgccgtcgacgagtctaacggacaccaaccagcgaaccagcagcgtcgcgtcgggccaagcgaagcagacggcacggcatctctgtcgctgcctctggacccctctcgagagttccgctccaccgttggacttgctccgctgtcggcatccagaaattgcgtggcggagcggcagacgtgagccggcacggcaggcggcctcctcctcctctcacggcaccggcagctacgggggattcctttcccaccgctccttcgctttcccttcctcgcccgccgtaataaatagacaccccctccacaccctctttccccaacctcgtgttgttcggagcgcacacacacacaaccagatctcccccaaatccacccgtcggcacctccgcttcaaggtacgccgctcgtcctcccccccccccctctctaccttctctagatcggcgttccggtccatgcatggttagggcccggtagttctacttctgttcatgtttgtgttagatccgtgtttgtgttagatccgtgctgctagcgttcgtacacggatgcgacctgtacgtcagacacgttctgattgctaacttgccagtgtttctctttggggaatcctgggatggctctagccgttccgcagacgggatcgatttcatgattttttttgtttcgttgcatagggtttggtttgcccttttcctttatttcaatatatgccgtgcacttgtttgtcgggtcatcttttcatgcttttttttgtcttggttgtgatgatgtggtctggttgggcggtcgttctagatcggagtagaattctgtttcaaactacctggtggatttattaattttggatctgtatgtgtgtgccatacatattcatagttacgaattgaagatgatggatggaaatatcgatctaggataggtatacatgttgatgcgggttttactgatgcatatacagagatgctttttgttcgcttggttgtgatgatgtggtgtggttgggcggtcgttcattcgttctagatcggagtagaatactgtttcaaactacctggtgtatttattaattttggaactgtatgtgtgtgtcatacatcttcatagttacgagtttaagatggatggaaatatcgatctaggataggtatacatgttgatgtgggttttactgatgcatatacatgatggcatatgcagcatctattcatatgctctaaccttgagtacctatctattataataaacaagtatgttttataattattttgatcttgatatacttggatgatggcatatgcagcagctatatgtggatttttttagccctgccttcatacgctatttatttgcttggtactgtttcttttgtcgatgctcaccctgttgtttggtgttacttctgcaggtcgactttaacttagcctaggatccgcccatggactccagcagcttcctccctgccgccggcgcggagaatggctcggcggcgggcggcgccaacaatggcggcgctgctcagcagcatgcggcgccggcgatccgcgagcaggaccggctgatgccgatcgcgaacgtgatccgcatcatgcggcgcgtgctgccggcgcacgccaagattagcgacgacgccaaggagacgatccaggagtgcgtgtcggagtacatcagcttcatcacgggggaggccaacgagcggtgccagcgggagcagcgcaagaccatcaccgccgaggacgtgctgtgggccatgagccgcctcggcttcgacgactacgtcgagccgctcggcgcctacctccaccgctaccgcgagttcgagggcgacgcgcgcggcgtcgggctcgtccctggggccgccccatcgcgcggcggcgaccaccacccgcactccatgtcgccagcggcgatgctcaagtcccgcgggccagtctccggagccgccatgctaccgcaccaccaccaccaccacgacatgcagatgcacgccgccatgtacgggggaacggccgtgcccccgccggccgggcctcctcaccacggcgggttcctcatgccacacccacagggtagtagccactacctgccttacgcgtacgagcccacgtacggcggtgagcacgcgatggctgcatactatggaggcgccgcgtacgcgcccggcaacggcgggagcggcgacggcagtggcagtggcggcggtggcgggagcgcgtcgcacacaccgcagggcagcggcggcttggagcacccgcacccgttcgcgtacaagtagttatgtacaggtacctgacatcttatagtctgcaacctctcgtgtctgaattcctatctttatcaagtgttattgcttccacgactataggacagctttcgtcgaaagcttttgctcatgtgatctcgaaggattcatctagtctgatttttcgtgacttgtatcggttttattggattcatccaacatatatcaataaaaaatgagttgtgtttcctttcttcctagttcagttaaaattatttccctcctgcgcttgtgctgtaattgtctgtgtacctgttgtttgtgactgtgttagttcccttggatatgatttcgtatttgatatgtacatggagatagcttagcttcattattggagtatgaagttagtatgacatagtcactctcctggaaaattgacactgcaaaccatatttttattctgaaccacaaatcctagtcagtccgctggcatatgccgtccgtttgctgaatccagaacgtgggtttggagatgtacggctgagatgcctctatgcgaaggggatttcgtggtgaaacgagatgggagtagagcaacgcccgtggaagatgcttcaaacttccacacttttgagcaacgatcggcagtagtaaggtagacgatttcaagatcaaagcatatgaagataaacaacatcaacaacaaaatttgttggggttctatagagagaaacagagctacatacatacactgttttgtatctaccatctgagatgatgaaaagatgaaaaactaaagaatgccccggcgccaacgccaggacacgccgcgcgcgcgtcacccgagccatctcttgacccagccggcgctgtatatttacacacgttgcagcatcgatcaccacctgttcgatcgcgtcgccgtcaccggtaccgagctcgaattccgggcgacttattgaactagtctagggcgcggctaacaacctagcttagattgccttgtctaaacccttaggctaacgcgccacccgaacagctgcccttaaggccaattgttcaagattcattcaacaattgaaacatctcccatgattaaatcagtataaggttgctatggtcttgcttgacaaagtttttttttgagggaatttcaactaaatttttgagtgaaactatcaaatactgattttaaaaaatttttataaaaggaagcgcagagataaaaggccatctatgctacaaaagtacccaaaaatgtaatcctaaagtatgaattgcattttttttttgtttggacgaaaggaaaggagtattaccacaagaatgatatcatcttcatatttagatcttttttgggtaaagcttgagattctctaaatatagagaaatcagaagaaaaaaaaaccgtgttttggtggttttgatttctagcctccacaataactttgacggcgtcgacaagtctaacggacaccaagcagcgaaccaccagcgccgagccaagcgaagcagacggccgagacgttgacaccttcggcgcggcatctctcgagagttccgctccggcgctccacctccaccgctggcggtttcttattccgttccgttccgcctcctgctctgctcctctccacaccacacggcacgaaaccgttacggcaccggcagcacccagcacgggagaggggattcctttcccaccgttccttccctttccgccccgccgctataaatagccagccccatccccagcttttttccccaatctcatctcctctctcctgttgttcggagcacacgcacaatccgatcgatccccaaatccccttcgtctctcctcgcgagcctcgtggatcccagcttcaaggtacggcgatcgatcatcccccctccttctctctaccttcttttctctagactacatcggatggcgatccatggttagggcctgctagtttcccttcctgttttgtcgatggctgcgaggcacaatagatctgatggcgttatgacggctaacttgtcatgttgttgcgatttatagtccctttaggagatcagtttaatttctcggatggttcgagatcggtggtccatggttagtaccctaagatccgcgctgttagggttcgtagatggaggcgacctgttctgattgttaacttgtcagtacctgggaaatcctgggatggttctagctcgtccgcagatgagatcgatttcatgatcctctgtatcttgtttcgttgcctaggttccgtctaatctatccgtggtatgatgtagatgttttgatcgtgctaactacgtcttgtaaagttaattgtcaggtcataatttttagcatgcctttttttttgtttggttttgtctaattgggctgtcgttctagatcagagtagaagactgttccaaactacctgctggatttattgaacttggatctgtatgtgtgtcacatatcttcataaattcatgattaagatggattgaaatatcttttatctttttggtatggatagttctatatgttggtgtggctttgttagatgtatacatgcttagatacatgaagcaacgtgctgctactgtttagtaattgctgttcatttgtctaataaacagataaggatatgtatttatgttgctgttggttttgctggtactttgttggatacaaatgcttcaatacagaaaacagcatgctgctacgatttaccatttatctaatcttatcatatgtctaatctaataaacaaacatgcttttaaattatcttcatatgcttggatgatggcatacacagcggctatgtgtggttttttaaatacccagcatcatgggcatgcatgacactgctttaatatgctttttatttgcttgagactgtttcttttgtttatactgaccctttagttcggtgactcttctgcaggtcgactttaacttagcctaggatccatggcccagtccaagcacggcctgaccaaggagatgaccatgaagtaccgcatggagggctgcgtggacggccacaagttcgtgatcaccggcgagggcatcggctaccccttcaagggcaagcaggccatcaacctgtgcgtggtggagggcggccccttgcccttcgccgaggacatcttgtccgccgccttcatgtacggcaaccgcgtgttcaccgagtacccccaggacatcgtcgactacttcaagaactcctgccccgccggctacacctgggaccgctccttcctgttcgaggacggcgccgtgtgcatctgcaacgccgacatcaccgtgagcgtggaggagaactgcatgtaccacgagtccaagttctacggcgtgaacttccccgccgacggccccgtgatgaagaagatgaccgacaactgggagccctcctgcgagaagatcatccccgtgcccaagcagggcatcttgaagggcgacgtgagcatgtacctgctgctgaaggacggtggccgcttgcgctgccagttcgacaccgtgtacaaggccaagtccgtgccccgcaagatgcccgactggcacttcatccagcacaagctgacccgcgaggaccgcagcgacgccaagaaccagaagtggcacctgaccgagcacgccatcgcctccggctccgccttgccctccggactcagatctcgatagggtaccaatggccagttaacagatccagctgctgctgttctagggttcacaagtctgcctatttgtcttccccaatggagctatggttgtctggtctggtccttggtcgtgtcccgtttcattgtgtactatttacctgtaatgtgtatccttaagtctggtttgatggtgtctgaaacgttttgctgtggtagagcagcatggaagaactataatgaataagtgatccctaatcattgtgtccaaattttgcttctgctatacccttttgtgctgtttcttatgttttgcttaaaaatttgatctgacaaacaaatttgtctaaattatgctcttgttctgactgtgtactgtacacatttgtattgctaccggtttggcacatagttttctctttgattgcagatcaaacccttctgattgcagattgcttggctatggctgatgtgctcactgttcttctttagcttgtatattgctgatggtggcttggctacggctgaaaaagttgctgctgcgccgacttggcaactgttgctccagtaatgctttgtcctctcttcctagccgccgacttggcacttggcagctgttgctcctgtaatgcgttgttatctcttatctcttgagatgtactatgattttgaggctgtttgacttgtgccagattgccagtgctgatgctatattatctcaggtttttatgctagtatatgttttactgtgtgctgcctgtgtcgagttacgtaatctattgaaccgctatgcgtgttgatgccctgttgttgcttgccagattgatgcccctgttgcttgcagcttgcaagctgtagtgaaatcctaaaattcgaaaccaaatctattctgaacttttgaagatctgtgatgtccggaagaaaagattcaaacagataaacgggactctccagaatctataaaataaatgatcgacaaacgctttgctttggtaggcttcctagttagttagcggaccgaagcttcggtccgggcctagaaggccagcttcggccgcccctcggtaccctgggatctgcccttactttaacgcctctaaccaacacccctttatctttataaggaacaataaacagaatttgccccactgttctaaatcacctaataatatccccagctaaaaacaataaaggtttcctagaattaagacaagcatgactgttcctccaggagggtttggaacattgttgcagtcttgcagatacgggcgaagggtgagaaacagagcggagggctggaggtgacctcggtagtcgacgccggagttgagcttgacaacgacggggcggcccctgatggacttgaggaagtccgatggcgtcttcaccgtcccgccggcgcccgaggcgggcctgtcgctgccgccgccgccgctgctcatcttgcgcgctgtgcccccggcggtgtccctgtgttgcggatcgcgggtgggccaggtggatgcgagggcgacccgtttggactccggccggagccgccggatccctggtcggtgtcagtgccgtttactctgggccccacgtgtcagtaccgtctgtagatgacaacaacccgtcgtccacagtcatgtccaaaatatcctttcttcttttttttcgattcggatatctatcttccttttttttttccaaaaatcttcttgacgcaccagcgcgcacgtttgtggtaaacgccgacacgtcggtcccacgtcgatagaccccacccaccagtgagtagcgtgtacgtattcgggggtgacggacgtgtcgccgtcgtcttgctagtcccattcccatctgagccacacatctctgaacaaaaaaaaggagggaggcctccacgcacatccccctccgtgccacccgccccaaaccctcgcgccgcctccgagacagccgccgcaaccatggccaccgccgccgccgcgtctaccgcgctcactggcgccactaccgctgcgcccaaggcgaggcgccgggcgcacctcctggccacccgccgcgccctcgccgcgcccatcaggtgctcagcggcgtcacccgccatgccgatggctcccccggccaccccgctccggccgtggggccccaccgagccccgcaagggtgctgacatcctcgtcgagtccctcgagcgctgcggcgtccgcgacgtcttcgcctaccccggcggcgcgtccatggagatccaccaggcactcacccgctcccccgtcatcgccaaccacctcttccgccacgagcaaggggaggcctttgccgcctccggctacgcgcgctcctcgggccgcgtcggcgtctgcatcgccacctccggccccggcgccaccaacctagtctccgcgctcgccgacgcgctgctcgattccgtccccatggtcgccatcacgggacaggtggcgcgacgcatgattggcaccgacgccttccaggagacgcccatcgtcgaggtcacccgctccatcaccaagcacaactacctggtcctcgacgtcgacgacatcccccgcgtcgtgcaggaggctttcttcctcgcctcctctggtcgaccagggccggtgcttgtcgacatccccaaggacatccagcagcagatggcggtgcctgtctgggacaagcccatgagtctgcctgggtacattgcgcgccttcccaagccccctgcgactgagttgcttgagcaggtgctgcgtcttgttggtgaatcgcggcgccctgttctttatgtgggcggtggctgcgcagcatctggtgaggagttgcgacgctttgtggagctgactggaatcccggtcacaactactcttatgggcctcggcaacttccccagcgacgacccactgtctctgcgcatgctaggtatgcatgggacggtgtatgcaaattatgcagtggataaggccgatctgttgcttgcacttggtgtgcggtttgatgatcgcgtgacagggaagattgaggcttttgcaagcagggctaagattgtgcacgttgatattgatccggctgagattggcaagaacaagcagccacatgtgtccatctgtgcagatgttaagcttgctttgcagggcatgaatgctcttcttgaaggaagcacatcaaagaagagctttgactttggctcatggaacgatgagttggatcagcagaagagggaattcccccttgggtataaaacatctaatgaggagatccagccacaatatgctattcaggttcttgatgagctgacgaaaggcgaggccatcatcggcacaggtgttgggcagcaccagatgtgggcggcacagtactacacttacaagcggccaaggcagtggttgtcttcagctggtcttggggctatgggatttggtttgccggctgctgctggtgcttctgtggcaaacccaggtgtcactgttgttgacatcgatggagatggtagctttctcatgaacgttcaggagctagctatgatccgaattgagaacctcccagtgaaggtctttgtgctaaacaaccagcacctggggatggtggtgcagttggaggacaggttctataaggccaacagagcgcacacatacttgggaaacccagagaatgaaagtgagatatatccagatttcgtgacgatcgccaaagggttcaacattccagcggtccgtgtgacaaagaagaacgaagtccgcgcagcgataaagaagatgctcgagactccagggccgtacctcttggatataatcgtcccacaccaggagcatgtgttgcctatgatccctagtggtggggctttcaaggatatgatcctggatggtgatggcaggactgtgtactgatgactagctagtcagttaacagatctgccagatcctcggtgtacaaataacccgtcttatcctatgagacgggccggcgtcagtgtgttctggaggaatttttatgtcagagcctttttctttgtgtgcttgatgtagatgccaagggaagcttattggctgttgaagcttgatgcaaaataaattatggaactctgttttttgtttatctaataataactagcaaatatgcttccattgcattgaaactaacagccttttgtgtttccaagttttattttgtgacaatgtcatctatttcaattagttgtggaatcggaaacttgcaggactaacttggaaactccaatccctcagcatcctggactttttcctggtgtaatccatgtagatattattttaatcatcattttagttctggaggtttttccatctccggttttgctcccctttcttcaaaaaaaaaaaaaaaatgccgtaggcgccgcaacgcccacctgttgttcaaactcatgggcacgagtggctcgaagattttatacaacaattgctgtagtttcaccgttgctggtgaagaagcatttttttaaaaaaatatagtggtattcattttaattagtttagttgtgcagcgagcaaaatttggacatgctctgctcggaatctgatcgacctagacacagattagcagcagtagctttgtcatctgttccaagagttgcgatctgatagaagaaaaaaaaaccttcccttcaatgtaaaaccgaaactaacaagaaagaagcacagtgccgtttaggcaagtatggagtacgtattaagcatgtagaaggccatgcatgaaccactaacaagaaagaagcgcagtgccattcaggcaagcataagcatgtagattggcatgcatgaacaactaacagtagatcgtctctggtctgattagaagttttttgggaagccaagaaatcatgtacaactggttccatctcaaattccgtggcaaaaagaggcctaagcaacataaagcttcggtccgggcctagaaggccgaagtacttggtcttcctagtcgagtagatcacattcaagcttggtcacccggtccgtcaatattctgattccgatgacttcgtaggttcctagctcaagccgctcgtgtccaagcgtcacttacgattagctaatgattacggcatctaggaccgactagtggcgcgccgactagctagctaaggtaccgagctcgaattcattccgattaatcgtggcctcttgctcttcaggatgaagagctatgtttaaacgtgcaagcgctactagacaattcagtacattaaaaacgtccgcaatgtgttattaagttgtctaagcgtcaatttgtttacaccacaatatatcctgcca

SEQ ID NO: 18 - DNA, 14932 bp, Artificial sequence
  PHP93271
gtttacccgccaatatatcctgtcaaacactgatagttttaaactgaaggcgggaaacgacaatctgatcatgagcggagaattaagggagtcacgttatgacccccgccgatgacgcgggacaagccgttttacgtttggaactgacagaaccgcaacgttgaaggagccactcagcaagctggtacgattgtaatacgactcactatagggcgaattgagcgctgtttaaacgctcttcaactggaagagcggttacgctgtttaaacgctcttcaactggaagagcggttactaccggttcactagctagctgctaatcgagctagttaccctatgaggtgacatgaagcgctcacggttactatgacggttagcttcacgactgttggtggcagtagcgtacgacttagctatagttccggacttacccttaagcgatttaaatcctgaggcaattcttaccctagctccctgcggctgttacgcggtcccccatcaatcttctgttcttgcggttgtagcctgtgtaacagtgctagagtatgtatgataaataggttttaagtctgcttacatgacattttttattgtggaagagacatataaaaattagagagagtggttctcatgcaacggcggacggcccggtgctaaaagagcttcaagacaaaataatgaaacaggaagagagtagatttatctaagagccaactttattatatgaatgtgtttattgttggctttagatgatatggtaaggagttagagctaataatagataggctctattattattattattaattaaactcgctctaaggaggaaagtgggaggaagggacgaggacgaagactactggaagcatcgtgcatggatgatggatgtggtgtctcttaatgtaggtggccggaggatgtacgtgttaattgcgcgataagcactcagatccaaccgcaaactacctccacactgacacactgatagagagaaagagagacctccgacgactgccgccgcagatgagccacgtacgtatacgacgtctgccggccggctcaggctgccgccatcaccctgctcgaaagtcgcgttaggcggcgccagctacataggagtatctagtctagccagttagtatactactactgcgctgatgatgaattaactctgcatagatactgtacttgcctccctccaacacccaaccacctcctgctcggctcttaataacttggacacggatcgatgccatccaaggaagaacacgacgacgacgacggaacatccaccatgcaagcttgcatccatacgccgatacgcgtgcatccatccatccaccattatttccattttccaccgatcacacgtacacaggcctatttaaggagcgacatcccactgcaactctcctcaccactcatcaccagctagctctagcaaagcacttgccatctaccgaccgccgcattccaaacagcccgacgagctagcagagcggcaggcacctccctcctcaaggaacccatggcggccaatgcgggcggcggtggagcgggaggaggcagcggcagcggcagcgtggctgcgccggcggtgtgccgccccagcggctcgcggtggacgccgacgccggagcagatcaggatgctgaaggagctctactacggctgcggcatccggtcgcccagctcggagcagatccagcgcatcaccgccatgctgcggcagcacggcaagatcgagggcaagaacgtcttctactggttccagaaccacaaggcccgcgagcgccagaagcgccgcctcaccagcctcgacgtcaacgtgcccgccgccggcgcggccgacgccaccaccagccaactcggcgtcctctcgctgtcgtcgccgccgccttcaggcgcggcgcctccctcgcccaccctcggcttctacgccgccggcaatggcggcggatcggctgtgctgctggacacgagttccgactggggcagcagcggcgctgctatggccaccgagacatgcttcctgcaggactacatgggcgtgacggacacgggcagctcgtcgcagtggccacgcttctcgtcgtcggacacgataatggcggcggccgcggcgcgggcggcgacgacgcgggcgcccgagacgctccctctcttcccgacctgcggcgacgacggcggcagcggtagcagcagctacttgccgttctggggtgccgcgtccacaactgccggcgccacttcttccgttgcgatccaacagcaacaccagctgcaggagcagtacagcttttacagcaacagcaacagcacccagctggccggcaccggcaaccaagacgtatcggcaacagcagcagcagccgccgccctggagctgagcctcagctcatggtgctccccttaccctgctgcagggagtatgtgagagcaacgcgagctgccactgctcttcactgatgtctctggaatggaaggaggaggaagtgagaacagatcattcgacaaagcagcattagtccgttgatcggtggaagaccactcgtcagtgttgagttgaatgtttgatcaataaaatacggcaatgctgtaagggttgttttttatgccattgataatacactgtactgttcagttgttgaactctatttcttagccatgccaagtgcttttcttattttgaataacattacagcaaaaagttgaaagacaaaaaaaaaaacccccgaacagagtgctttgggtcccaagcttctttagactgtgttcggcgttccccctaaatttctccccctatatctcactcacttgtcacatcagcgttctctttccccctatatctccacgctctacagcagttccacctatatcaaacctctataccccaccacaacaatattatatactttcatcttcaactaactcatgtaccttccaatttttttctactaataattatttacgtgcacagaaacttagcaaggagagagagagcgggaatttaaatgctcggcgttaggcttttagtccgctaggtggctagaccgaggttaggacgctagttcactaggggcctagtggtgttttaagacgtcacggtcacccggtccgggcctagaaggccagcttcaagtttgtacaaaaaagcaggctccggccagaatggcccggaccgaagcttgcatgcctgcagtgcagcgtgacccggtcgtgcccctctctagagataatgagcattgcatgtctaagttataaaaaattaccacatattttttttgtcacacttgtttgaagtgcagtttatctatctttatacatatatttaaactttactctacgaataatataatctatagtactacaataatatcagtgttttagagaatcatataaatgaacagttagacatggtctaaaggacaattgagtattttgacaacaggactctacagttttatctttttagtgtgcatgtgttctcctttttttttgcaaatagcttcacctatataatacttcatccattttattagtacatccatttagggtttagggttaatggtttttatagactaatttttttagtacatctattttattctattttagcctctaaattaagaaaactaaaactctattttagtttttttatttaataatttagatataaaatagaataaaataaagtgactaaaaattaaacaaataccctttaagaaattaaaaaaactaaggaaacatttttcttgtttcgagtagataatgccagcctgttaaacgccgtcgacgagtctaacggacaccaaccagcgaaccagcagcgtcgcgtcgggccaagcgaagcagacggcacggcatctctgtcgctgcctctggacccctctcgagagttccgctccaccgttggacttgctccgctgtcggcatccagaaattgcgtggcggagcggcagacgtgagccggcacggcaggcggcctcctcctcctctcacggcaccggcagctacgggggattcctttcccaccgctccttcgctttcccttcctcgcccgccgtaataaatagacaccccctccacaccctctttccccaacctcgtgttgttcggagcgcacacacacacaaccagatctcccccaaatccacccgtcggcacctccgcttcaaggtacgccgctcgtcctcccccccccccctctctaccttctctagatcggcgttccggtccatgcatggttagggcccggtagttctacttctgttcatgtttgtgttagatccgtgtttgtgttagatccgtgctgctagcgttcgtacacggatgcgacctgtacgtcagacacgttctgattgctaacttgccagtgtttctctttggggaatcctgggatggctctagccgttccgcagacgggatcgatttcatgattttttttgtttcgttgcatagggtttggtttgcccttttcctttatttcaatatatgccgtgcacttgtttgtcgggtcatcttttcatgcttttttttgtcttggttgtgatgatgtggtctggttgggcggtcgttctagatcggagtagaattctgtttcaaactacctggtggatttattaattttggatctgtatgtgtgtgccatacatattcatagttacgaattgaagatgatggatggaaatatcgatctaggataggtatacatgttgatgcgggttttactgatgcatatacagagatgctttttgttcgcttggttgtgatgatgtggtgtggttgggcggtcgttcattcgttctagatcggagtagaatactgtttcaaactacctggtgtatttattaattttggaactgtatgtgtgtgtcatacatcttcatagttacgagtttaagatggatggaaatatcgatctaggataggtatacatgttgatgtgggttttactgatgcatatacatgatggcatatgcagcatctattcatatgctctaaccttgagtacctatctattataataaacaagtatgttttataattattttgatcttgatatacttggatgatggcatatgcagcagctatatgtggatttttttagccctgccttcatacgctatttatttgcttggtactgtttcttttgtcgatgctcaccctgttgtttggtgttacttctgcaggtcgactttaacttagcctaggatccatggcctcttcatctgcacccaggttccgtgtctattccaagtacctctttctaacatatcctgaatgtacccttgagccacagtacgccttggattcacttcgcactctcttgaacaaatatgagcccctctacatcgctgctgttagagagctccacgaagatggatcaccacatctgcacgttctcgtgcagaacaagcttcgtgcttccatcaccaatcccaatgccttaaacctccgtatggatacatctccattctccatattccatccaaatatacaagctgccaaagactgcaaccaagttcgtgattacatcacgaaggaggttgactccgatgtaaacacagctgagtggggaacattcgtggctgtttcaactccaggtcgtaaagaccgtgatgcggatatgaaacagatcattgaatctagttcctctcgcgaggaattcctcagcatggtttgcaatcgttttccgtttgaatggtctatccgtctcaaagacttcgagtacacggcacgccatctatttcctgacccagttgccacttacacacctgagtttccaaccgaatcactcatttgccatgagaccattgaaagctggaaaaatgaacatctctactctctgtccctcgagagctacatcctgtgcaccagcacccctgccgaccaggcccagtccgacctcgaatggatggacgactacagccgtagtcaccggggaggcataagtccatctacatctgcgggccaaccagaacaggaaagacttcctgggcaaggtctctaggcgtacctagtggtacctgacatcttatagtctgcaacctctcgtgtctgaattcctatctttatcaagtgttattgcttccacgactataggacagctttcgtcgaaaggttttgctcatgtgatctcgaaggattcatctagtctgatttttcgtgacttgtatcggttttattggattcatccaacatatatcaataaaaaatgagttgtgtttcctttcttcctagttcagttaaaattatttccctcctgcgcttgtgctgtaattgtctgtgtacctgttgtttgtgactgtgttagttcccttggatatgatttcgtatttgatatgtacatggagatagcttagcttcattattggagtatgaagttagtatgacatagtcactctcctggaaaattgacactgcaaaccatatttttattctgaaccacaaatcctagtcagtccgctggcatatgccgtccgtttgctgaatccagaacgtgggtttggagatgtacggctgagatgcctctatgcgaaggggatttcgtggtgaaacgagatgggagtagagcaacgcccgtggaagatgcttcaaacttccacacttttgagcaacgatcggcagtagtaaggtagacgatttcaagatcaaagcatatgaagataaacaacatcaacaacaaaatttgttggggttctatagagagaaacagagctacatacatacactgttttgtatctaccatctgagatgatgaaaagatgaaaaactaaagaatgccccggcgccaacgccaggacacgccgcgcgcgcgtcacccgagccatctcttgacccagccggcgctgtatatttacacacgttgcagcatcgatcaccacctgttcgatcgcgtcgccgtcaccaagcttggcgcgccggtcacccggtccgggcctagaaggccacccggggcgacttattgaactagtctagggcgcggctaacaacctagcttagattgccttgtctaaacccttaggctaacgcgccaccccccgaattcctgcccttaaggccaattgttcaagattcattcaacaattgaaacatctcccatgattaaatcagtataaggttgctatggtcttgcttgacaaagtttttttttgagggaatttcaactaaatttttgagtgaaactatcaaatactgattttaaaaaatttttataaaaggaagcgcagagataaaaggccatctatgctacaaaagtacccaaaaatgtaatcctaaagtatgaattgcattttttttttgtttggacgaaaggaaaggagtattaccacaagaatgatatcatcttcatatttagatcttttttgggtaaagcttgagattctctaaatatagagaaatcagaagaaaaaaaaaccgtgttttggtggttttgatttctagcctccacaataactttgacggcgtcgacaagtctaacggacaccaagcagcgaaccaccagcgccgagccaagcgaagcagacggccgagacgttgacaccttcggcgcggcatctctcgagagttccgctccggcgctccacctccaccgctggcggtttcttattccgttccgttccgcctcctgctctgctcctctccacaccacacggcacgaaaccgttacggcaccggcagcacccagcacgggagaggggattcctttcccaccgttccttccctttccgccccgccgctataaatagccagccccatccccagcttttttccccaatctcatctcctctctcctgttgttcggagcacacgcacaatccgatcgatccccaaatccccttcgtctctcctcgcgagcctcgtggatcccagcttcaaggtacggcgatcgatcatcccccctccttctctctaccttcttttctctagactacatcggatggcgatccatggttagggcctgctagtttcccttcctgttttgtcgatggctgcgaggcacaatagatctgatggcgttatgacggctaacttgtcatgttgttgcgatttatagtccctttaggagatcagtttaatttctcggatggttcgagatcggtggtccatggttagtaccctaagatccgcgctgttagggttcgtagatggaggcgacctgttctgattgttaacttgtcagtacctgggaaatcctgggatggttctagctcgtccgcagatgagatcgatttcatgatcctctgtatcttgtttcgttgcctaggttccgtctaatctatccgtggtatgatgtagatgttttgatcgtgctaactacgtcttgtaaagttaattgtcaggtcataatttttagcatgcctttttttttgtttggttttgtctaattgggctgtcgttctagatcagagtagaagactgttccaaactacctgctggatttattgaacttggatctgtatgtgtgtcacatatcttcataaattcatgattaagatggattgaaatatcttttatctttttggtatggatagttctatatgttggtgtggctttgttagatgtatacatgcttagatacatgaagcaacgtgctgctactgtttagtaattgctgttcatttgtctaataaacagataaggatatgtatttatgttgctgttggttttgctggtactttgttggatacaaatgcttcaatacagaaaacagcatgctgctacgatttaccatttatctaatcttatcatatgtctaatctaataaacaaacatgcttttaaattatcttcatatgcttggatgatggcatacacagcggctatgtgtggttttttaaatacccagcatcatgggcatgcatgacactgctttaatatgctttttatttgcttgagactgtttcttttgtttatactgaccctttagttcggtgactcttctgcaggtcgactttaacttagcctaggatccatggcccagtccaagcacggcctgaccaaggagatgaccatgaagtaccgcatggagggctgcgtggacggccacaagttcgtgatcaccggcgagggcatcggctaccccttcaagggcaagcaggccatcaacctgtgcgtggtggagggcggccccttgcccttcgccgaggacatcttgtccgccgccttcatgtacggcaaccgcgtgttcaccgagtacccccaggacatcgtcgactacttcaagaactcctgccccgccggctacacctgggaccgctccttcctgttcgaggacggcgccgtgtgcatctgcaacgccgacatcaccgtgagcgtggaggagaactgcatgtaccacgagtccaagttctacggcgtgaacttccccgccgacggccccgtgatgaagaagatgaccgacaactgggagccctcctgcgagaagatcatccccgtgcccaagcagggcatcttgaagggcgacgtgagcatgtacctgctgctgaaggacggtggccgcttgcgctgccagttcgacaccgtgtacaaggccaagtccgtgccccgcaagatgcccgactggcacttcatccagcacaagctgacccgcgaggaccgcagcgacgccaagaaccagaagtggcacctgaccgagcacgccatcgcctccggctccgccttgccctccggactcagatctcgatagggtaccaatggccagttaacagatccagctgctgctgttctagggttcacaagtctgcctatttgtcttccccaatggagctatggttgtctggtctggtccttggtcgtgtcccgtttcattgtgtactatttacctgtaatgtgtatccttaagtctggtttgatggtgtctgaaacgttttgctgtggtagagcagcatggaagaactataatgaataagtgatccctaatcattgtgtccaaattttgcttctgctatacccttttgtgctgtttcttatgttttgcttaaaaatttgatctgacaaacaaatttgtctaaattatgctcttgttctgactgtgtactgtacacatttgtattgctaccggtttggcacatagttttctctttgattgcagatcaaacccttctgattgcagattgcttggctatggctgatgtgctcactgttcttctttagcttgtatattgctgatggtggcttggctacggctgaaaaagttgctgctgcgccgacttggcaactgttgctccagtaatgctttgtcctctcttcctagccgccgacttggcacttggcagctgttgctcctgtaatgcgttgttatctcttatctcttgagatgtactatgattttgaggctgtttgacttgtgccagattgccagtgctgatgctatattatctcaggtttttatgctagtatatgttttactgtgtgctgcctgtgtcgagttacgtaatctattgaaccgctatgcgtgttgatgccctgttgttgcttgccagattgatgcccctgttgcttgcagcttgcaagctgtagtgaaatcctaaaattcgaaaccaaatctattctgaacttttgaagatctgtgatgtccggaagaaaagattcaaacagataaacgggactctccagaatctataaaataaatgatcgacaaacgctttgctttggtaggcttcctagttagttagcggaccgaagcttcggtccgggcctagaaggccagcttcggccgcccctcggtaccctgggatctgcccttactttaacgcctctaaccaacacccctttatctttataaggaacaataaacagaatttgccccactgttctaaatcacctaataatatccccagctaaaaacaataaaggtttcctagaattaagacaagcatgactgttcctccaggagggtttggaacattgttgcagtcttgcagatacgggcgaagggtgagaaacagagcggagggctggaggtgacctcggtagtcgacgccggagttgagcttgacaacgacggggcggcccctgatggacttgaggaagtccgatggcgtcttcaccgtcccgccggcgcccgaggcgggcctgtcgctgccgccgccgccgctgctcatcttgcgcgctgtgcccccggcggtgtccctgtgttgcggatcgcgggtgggccaggtggatgcgagggcgacccgtttggactccggccggagccgccggatccctggtcggtgtcagtgccgtttactctgggccccacgtgtcagtaccgtctgtagatgacaacaacccgtcgtccacagtcatgtccaaaatatcctttcttcttttttttcgattcggatatctatcttccttttttttttccaaaaatcttcttgacgcaccagcgcgcacgtttgtggtaaacgccgacacgtcggtcccacgtcgatagaccccacccaccagtgagtagcgtgtacgtattcgggggtgacggacgtgtcgccgtcgtcttgctagtcccattcccatctgagccacacatctctgaacaaaaaaaaggagggaggcctccacgcacatccccctccgtgccacccgccccaaaccctcgcgccgcctccgagacagccgccgcaaccatggccaccgccgccgccgcgtctaccgcgctcactggcgccactaccgctgcgcccaaggcgaggcgccgggcgcacctcctggccacccgccgcgccctcgccgcgcccatcaggtgctcagcggcgtcacccgccatgccgatggctcccccggccaccccgctccggccgtggggccccaccgagccccgcaagggtgctgacatcctcgtcgagtccctcgagcgctgcggcgtccgcgacgtcttcgcctaccccggcggcgcgtccatggagatccaccaggcactcacccgctcccccgtcatcgccaaccacctcttccgccacgagcaaggggaggcctttgccgcctccggctacgcgcgctcctcgggccgcgtcggcgtctgcatcgccacctccggccccggcgccaccaacctagtctccgcgctcgccgacgcgctgctcgattccgtccccatggtcgccatcacgggacaggtggcgcgacgcatgattggcaccgacgccttccaggagacgcccatcgtcgaggtcacccgctccatcaccaagcacaactacctggtcctcgacgtcgacgacatcccccgcgtcgtgcaggaggctttcttcctcgcctcctctggtcgaccagggccggtgcttgtcgacatccccaaggacatccagcagcagatggcggtgcctgtctgggacaagcccatgagtctgcctgggtacattgcgcgccttcccaagccccctgcgactgagttgcttgagcaggtgctgcgtcttgttggtgaatcgcggcgccctgttctttatgtgggcggtggctgcgcagcatctggtgaggagttgcgacgctttgtggagctgactggaatcccggtcacaactactcttatgggcctcggcaacttccccagcgacgacccactgtctctgcgcatgctaggtatgcatgggacggtgtatgcaaattatgcagtggataaggccgatctgttgcttgcacttggtgtgcggtttgatgatcgcgtgacagggaagattgaggcttttgcaagcagggctaagattgtgcacgttgatattgatccggctgagattggcaagaacaagcagccacatgtgtccatctgtgcagatgttaagcttgctttgcagggcatgaatgctcttcttgaaggaagcacatcaaagaagagctttgactttggctcatggaacgatgagttggatcagcagaagagggaattcccccttgggtataaaacatctaatgaggagatccagccacaatatgctattcaggttcttgatgagctgacgaaaggcgaggccatcatcggcacaggtgttgggcagcaccagatgtgggcggcacagtactacacttacaagcggccaaggcagtggttgtcttcagctggtcttggggctatgggatttggtttgccggctgctgctggtgcttctgtggcaaacccaggtgtcactgttgttgacatcgatggagatggtagctttctcatgaacgttcaggagctagctatgatccgaattgagaacctcccagtgaaggtctttgtgctaaacaaccagcacctggggatggtggtgcagttggaggacaggttctataaggccaacagagcgcacacatacttgggaaacccagagaatgaaagtgagatatatccagatttcgtgacgatcgccaaagggttcaacattccagcggtccgtgtgacaaagaagaacgaagtccgcgcagcgataaagaagatgctcgagactccagggccgtacctcttggatataatcgtcccacaccaggagcatgtgttgcctatgatccctagtggtggggctttcaaggatatgatcctggatggtgatggcaggactgtgtactgactagctagtcagttaacagatctgccagatcctcggtgtacaaataacccgtcttatcctatgagacgggccggcgtcagtgtgttctggaggaatttttatgtcagagcctttttctttgtgtgcttgatgtagatgccaagggaagcttattggctgttgaagcttgatgcaaaataaattatggaactctgttttttgtttatctaataataactagcaaatatgcttccattgcattgaaactaacagccttttgtgtttccaagttttattttgtgacaatgtcatctatttcaattagttgtggaatcggaaacttgcaggactaacttggaaactccaatccctcagcatcctggactttttcctggtgtaatccatgtagatattattttaatcatcattttagttctggaggtttttccatctccggttttgctcccctttcttcaaaaaaaaaaaaaaaatgccgtaggcgccgcaacgcccacctgttgttcaaactcatgggcacgagtggctcgaagattttatacaacaattgctgtagtttcaccgttgctggtgaagaagcatttttttaaaaaaatatagtggtattcattttaattagtttagttgtgcagcgagcaaaatttggacatgctctgctcggaatctgatcgacctagacacagattagcagcagtagctttgtcatctgttccaagagttgcgatctgatagaagaaaaaaaaaccttcccttcaatgtaaaaccgaaactaacaagaaagaagcacagtgccgtttaggcaagtatggagtacgtattaagcatgtagaaggccatgcatgaaccactaacaagaaagaagcgcagtgccattcaggcaagcataagcatgtagattggcatgcatgaacaactaacagtagatcgtctctggtctgattagaagttttttgggaagccaagaaatcatgtacaactggttccatctcaaattccgtggcaaaaagaggcctaagcaacataaagcttcggtccgggcctagaaggccgaagtacttggtcttcctagtcgagtagatcacattcaagcttggtcacccggtccgtcaatattctgattccgatgacttcgtaggttcctagctcaagccgctcgtgtccaagcgtcacttacgattagctaatgattacggcatctaggaccgactagtggcgcgccgactagctagctaaggtaccgagctcgaattcattccgattaatcgtggcctcttgctcttcaggatgaagagctatgtttaaacgtgcaagcgctactagacaattcagtacattaaaaacgtccgcaatgtgttattaagttgtctaagcgtcaatttgtttacaccacaatatatcctgcca

SEQ ID NO: 19 - DNA, 20419 bp, Artificial sequence
  PHP93559
gtttacccgccaatatatcctgtcaaacactgcggccgcacttgaccgcggatggagccggagctgtggtgaggccatcgacgggaggtgggggagaacacagtctcagtgttctttgtgagtccgcaaggtttttagcttttctgtattaattaaggttgctgttggctgtagaatacggtcgtggaagagctgtatcggtagctactacgtaagctattatatactggaagtctggagctcgtcgatctccggtcgtcttcctccatttctcctcgtcttgctttgactgctgctaccatttgcttctgttttctgatgaagcatgccatgtcggccaccagtgtttgtgtggtttttgcagggaatggctttcaagtgctgtgattgaatggccctcgtcgtcctcggctgagctcacatggacgcgtcatgtgagtgagatatatgatcatatgatgagtggggttcgggtgagtgcgtacttgaagtaggatcccgctttcactcattcattcattggcctttaaaccgggaaattttcgcgaggagatggagggaagcaagcagggtgacgagtgcagagtgccgcgagcgctttgtcaaaaggcaccgccgtaggcaaaaaaatcaatggccctgactgactcgatggtagtactactgtagagactagagagggttgctccccatatcttcgtgtgacttttactccagcattgcatttccgtcattgagacgttaattaatagcagctttcgggacagatgactgtggccatgtttcgtcacggccgcttcgtgccagctgggggtactatagtactgtgattttgttagtaaaaactttcattaggccaccattgacgaccgggccttcgcttttgctgcgctaattaaccatttcccggcgaccgaagggaacatgaacatgccccgacacatgagggcatgaggactagtgttctccctgtcgttcgttgacttgactagtgatagtttaaacgctcttcaactggaagagcggttactaccggttcactagctagctgctaatcgagctagttaccctatgaggtgacatgaagcgctcacggttactatgacggttagcttcacgactgttggtggcagtagcgtacgacttagctatagttccggacttacctagctaataacttcgtatagcatacattatacgaagttatggttaccgaattcgagctcggtaccctggttcacaaactcaatacaacacacagtggagtagggtattacgctccggcggcccgaaccactctaaatccttgtgtcctcgtgtgctcttccaccattaatgactgtaattgcagggacacgaagagttgtagcgcttttgccaacaagatccgctatatgctagtagagtggaacctgcacagcaacaagcatccaataatctgagaataagaattatgtgtggtgatggttctcatctctgcaactcgccattttcgcgagagaaccaaatccaagttggtgaagatcatgatttgggctcatgggctggcatagtagctattacctttgcaattgtggttcgaatctatccgatattctccttttcagggagagctaatgcttatgcttattgggtattttggtttgacactgcttcacgcccaaaaaaaggcaactatgtctgagttggatatggcccaaaaaaaggcagctatgtctgagttggatatggaagtcttctttcgtttagggtgaagtaagaccaagctcatgagcttattatcttaggtcggaacaaattagttgataggcatggcacatttatcaaattataatgattttaacagaaaagcaacacctctttttcagcagcaccagctttgcaagctgcaattgacactccaagcatagtatttgctccaaactcagcctgcatttcgcacaatatcatatctatttccatttggataaaatatattttccagaaatatgggaacagaatcaagatacagaaaaaagttgtggtagtagtggtaagtggaaacacaagtacagtgaaaagatagcattatttctgaacagtcaaattaaccgaaataagtagtatcacatactgcccctaaattgactacacccaatgtaaagaattgcttgagcatattgagccatcagttgtttgtttgtgtaacggatttgacaatgcagagttcaggagcaaaaaaccgcaaaggagagaaagagggaaaggatctcctagtatcccaccttgtggcgcgccctgtcaagtgcatgatggcctggtcgatctgcgtctgctgctgcggttccatcccaacgagtgcctccgacaccttgtcgttgatcacccgcaccgcgtaggcgacccccctggcgaggaacttccgcctctcggaggccccggccgcgtcggcggcggcgccctcgagcgcgcccacgctagccgtagatgctcggtgcacggccttgttggtgtgcaactcgacctcaacggccggtgcgctacgcccgtcaaggatctggcgcgcccgcaccctcgtgatcacggtgggcgcctcccgcctcatgtggccgacgatgaaaagcgccgggttaggggccttggcgcgcaccgccgtattcagggcctcctcgctcttgcgcgagagcaggtgcttccccaggtactcctgcactgacaaggctgccacagcggtggaatttgtcctcacgacttcgccacgtcgtcctcacctccctggcttcccacgactccgccgtatcgaggtgctcggtgggtcgtcttaatccgaagtccgaactaggaagacgagacagagaggtctgaggaatgggcctcgtttgatgttgagctgaattatttttccagcataagcccaggtcttggtccatgaacaaaattactagaaacccagcccagtactacgatctaaaagagggactgccactggatagctctctctagcattctccacgctccaatacagcggcgtcgtgtctatccgggtctatccgcgaacacgtgagaactctccagaaactgctttctcctccacttcatctctctcgctttccctctataaaaagaccccttctaggaattgagggagacagcaagcaccaagcagcgatccgaagctcaatcaattcactcaaacctcttccccaaatcttcgattagatcttcgttgacaagaagactagaaccgaacctgacatgtccaacctgctcacggttcaccagaaccttccggctcttccagtggacgcgacgtccgatgaagtcaggaagaacctcatggacatgttccgcgacaggcaagcgttcagcgagcacacctggaagatgctgctctccgtctgccgctcctgggctgcatggtgcaagctgaacaacaggaagtggttccccgctgagcccgaggacgtgagggattaccttctgtacctgcaagcgcgaggtttgtttctgcttctacctttgatatatatataataattatcattaattagtagtaatataatatttcaaatatttttttcaaaataaaagaatgtagtatatagcaattgcttttctgtagtttataagtgtgtatattttaatttataacttttctaatatatgaccaaaacatggtgatgcctaggtctggcagtgaagaccatccagcaacaccttggacaactgaacatgcttcacaggcgctccggcctcccgcgccccagcgactcgaacgccgtgagcctcgtcatgcgccgcatcaggaaggaaaacgtcgatgccggcgaaagggcaaagcaggccctcgcgttcgagaggaccgatttcgaccaggtccgcagcctgatggagaacagcgacaggtgccaggacattaggaacctggcgttcctcggaattgcatacaacacgctcctcaggatcgcggaaattgcccgcattcgcgtgaaggacattagccgcaccgacggcggcaggatgcttatccacattggcaggaccaagacgctcgtttccaccgcaggcgtcgaaaaggccctcagcctcggagtgaccaagctcgtcgaacgctggatctccgtgtccggcgtcgcggacgacccaaacaactacctcttctgccgcgtccgcaagaacggggtggctgcccctagcgccaccagccaactcagcacgagggccttggaaggtattttcgaggccacccaccgcctgatctacggcgcgaaggatgacagcggtcaacgctacctcgcatggtccgggcactccgcccgcgttggagctgctagggacatggcccgcgccggtgtttccatccccgaaatcatgcaggcgggtggatggacgaacgtgaacattgtcatgaactacattcgcaaccttgacagcgagacgggcgcaatggttcgcctcctggaagatggtgactgaggtacccaacctagacttgtccatcttctggattggccaacttaattaatgtatgaaataaaaggatgcacacatagtgacatgctaatcactataatgtgggcatcaaagttgtgtgttatgtgtaattactagttatctgaataaaagagaaagagatcatccatatttcttatcctaaatgaatgtcacgtgtctttataattctttgatgaaccagatgcatttcattaaccaaatccatatacatataaatattaatcatatataattaatatcaattgggttagcaaaacaaatctagtctaggtgtgttttgcgatccgatcgaggccggccacactgatagtttaaactgaaggcgggaaacgacaatctgatcatgagcggagaattaagggagtcacgttatgacccccgccgatgacgcgggacaagccgttttacgtttggaactgacagaaccgcaacgattgaaggagccactcagccgcgggtttctggagtttaatgagctaagcacatacgtcagaaaccattattgcgcgttcaaaagtcgcctaaggtcactatcagctagcaaatatttcttgtcaaaaatgctccactgacgttccataaattcccctcggtatccaattagagtctcatattcactctcccggcggatctcgactctagaggatcgctcaggaaggccgctgagatagagccatggcggccaatgcgggcggcggtggagcgggaggaggcagcggcagcggcagcgtggctgcgccggcggtgtgccgccccagcggctcgcggtggacgccgacgccggagcagatcaggatgctgaaggagctctactacggctgcggcatccggtcgcccagctcggagcagatccagcgcatcaccgccatgctgcggcagcacggcaagatcgagggcaagaacgtcttctactggttccagaaccacaaggcccgcgagcgccagaagcgccgcctcaccagcctcgacgtcaacgtgcccgccgccggcgcggccgacgccaccaccagccaactcggcgtcctctcgctgtcgtcgccgccgccttcaggcgcggcgcctccctcgcccaccctcggcttctacgccgccggcaatggcggcggatcggctgtgctgctggacacgagttccgactggggcagcagcggcgctgctatggccaccgagacatgcttcctgcaggactacatgggcgtgacggacacgggcagctcgtcgcagtggccacgcttctcgtcgtcggacacgataatggcggcggccgcggcgcgggcggcgacgacgcgggcgcccgagacgctccctctcttcccgacctgcggcgacgacggcggcagcggtagcagcagctacttgccgttctggggtgccgcgtccacaactgccggcgccacttcttccgttgcgatccaacagcaacaccagctgcaggagcagtacagcttttacagcaacagcaacagcacccagctggccggcaccggcaaccaagacgtatcggcaacagcagcagcagccgccgccctggagctgagcctcagctcatggtgctccccttaccctgctgcagggagtatgtgagagcaacgcgagctgccactgctcttcactgatgtctctggaatggaaggaggaggaagtgagaacagatcattcgacaaagcagcattagtccgttgatcggtggaagaccactcgtcagtgttgagttgaatgtttgatcaataaaatacggcaatgctgtaagggttgttttttatgccattgataatacactgtactgttcagttgttgaactctatttcttagccatgccaagtgcttttcttattttgaataacattacagcaaaaagttgaaagacaaaaaaaaaaacccccgaacagagtgctttgggtcccaagcttctttagactgtgttcggcgttccccctaaatttctccccctatatctcactcacttgtcacatcagcgttctctttccccctatatctccacgctctacagcagttccacctatatcaaacctctataccccaccacaacaatattatatactttcatcttcaactaactcatgtaccttccaatttttttctactaataattatttacgtgcacagaaacttagcaaggagagagagagcgggaatttaaatgctcggcgttaggcttttagtccgctaggtggctagaccgaggttaggacgctagttcactaggggcctagtggtgttttaagacgtcacggtcacccggtccgggcctagaaggccagcttcaagtttgtacaaaaaagcaggctccggccagaatggcccggaccgaagcttgcatgcctgcagtgcagcgtgacccggtcgtgcccctctctagagataatgagcattgcatgtctaagttataaaaaattaccacatattttttttgtcacacttgtttgaagtgcagtttatctatctttatacatatatttaaactttactctacgaataatataatctatagtactacaataatatcagtgttttagagaatcatataaatgaacagttagacatggtctaaaggacaattgagtattttgacaacaggactctacagttttatctttttagtgtgcatgtgttctcctttttttttgcaaatagcttcacctatataatacttcatccattttattagtacatccatttagggtttagggttaatggtttttatagactaatttttttagtacatctattttattctattttagcctctaaattaagaaaactaaaactctattttagtttttttatttaataatttagatataaaatagaataaaataaagtgactaaaaattaaacaaataccctttaagaaattaaaaaaactaaggaaacatttttcttgtttcgagtagataatgccagcctgttaaacgccgtcgacgagtctaacggacaccaaccagcgaaccagcagcgtcgcgtcgggccaagcgaagcagacggcacggcatctctgtcgctgcctctggacccctctcgagagttccgctccaccgttggacttgctccgctgtcggcatccagaaattgcgtggcggagcggcagacgtgagccggcacggcaggcggcctcctcctcctctcacggcaccggcagctacgggggattcctttcccaccgctccttcgctttcccttcctcgcccgccgtaataaatagacaccccctccacaccctctttccccaacctcgtgttgttcggagcgcacacacacacaaccagatctcccccaaatccacccgtcggcacctccgcttcaaggtacgccgctcgtcctcccccccccccctctctaccttctctagatcggcgttccggtccatgcatggttagggcccggtagttctacttctgttcatgtttgtgttagatccgtgtttgtgttagatccgtgctgctagcgttcgtacacggatgcgacctgtacgtcagacacgttctgattgctaacttgccagtgtttctctttggggaatcctgggatggctctagccgttccgcagacgggatcgatttcatgattttttttgtttcgttgcatagggtttggtttgcccttttcctttatttcaatatatgccgtgcacttgtttgtcgggtcatcttttcatgcttttttttgtcttggttgtgatgatgtggtctggttgggcggtcgttctagatcggagtagaattctgtttcaaactacctggtggatttattaattttggatctgtatgtgtgtgccatacatattcatagttacgaattgaagatgatggatggaaatatcgatctaggataggtatacatgttgatgcgggttttactgatgcatatacagagatgctttttgttcgcttggttgtgatgatgtggtgtggttgggcggtcgttcattcgttctagatcggagtagaatactgtttcaaactacctggtgtatttattaattttggaactgtatgtgtgtgtcatacatcttcatagttacgagtttaagatggatggaaatatcgatctaggataggtatacatgttgatgtgggttttactgatgcatatacatgatggcatatgcagcatctattcatatgctctaaccttgagtacctatctattataataaacaagtatgttttataattattttgatcttgatatacttggatgatggcatatgcagcagctatatgtggatttttttagcactgccttcatacgctatttatttgcttggtactgtttcttttgtcgatgctcaccctgttgtttggtgttacttctgcaggtcgactttaacttagcctaggatccatggccactgtgaacaactggctcgctttctccctctccccgcaggagctgccgccctcccagacgacggactccacactcatctcggccgccaccgccgaccatgtctccggcgatgtctgcttcaacatcccccaagattggagcatgaggggatcagagctttcggcgctcgtcgcggagccgaagctggaggacttcctcggcggcatctccttctccgagcagcatcacaaggccaactgcaacatgatacccagcactagcagcacagtttgctacgcgagctcaggtgctagcaccggctaccatcaccagctgtaccaccagcccaccagctcagcgctccacttcgcggactccgtaatggtggcttcctcggccggtgtccacgacggcggtgccatgctcagcgcggccgccgctaacggtgtcgctggcgctgccagtgccaacggcggcggcatcgggctgtccatgattaagaactggctgcggagccaaccggcgcccatgcagccgagggtggcggcggctgagggcgcgcaggggctctctttgtccatgaacatggcggggacgacccaaggcgctgctggcatgccacttctcgctggagagcgcgcacgggcgcccgagagtgtatcgacgtcagcacagggtggagccgtcgtcgtcacggcgccgaaggaggatagcggtggcagcggtgttgccggcgctctagtagccgtgagcacggacacgggtggcagcggcggcgcgtcggctgacaacacggcaaggaagacggtggacacgttcgggcagcgcacgtcgatttaccgtggcgtgacaaggcatagatggactgggagatatgaggcacatctttgggataacagttgcagaagggaagggcaaactcgtaagggtcgtcaagtctatttaggtggctatgataaagaggagaaagctgctagggcttatgatcttgctgctctgaagtactggggtgccacaacaacaacaaattttccagtgagtaactacgaaaaggagctcgaggacatgaagcacatgacaaggcaggagtttgtagcgtctctgagaaggaagagcagtggtttctccagaggtgcatccatttacaggggagtgactaggcatcaccaacatggaagatggcaagcacggattggacgagttgcagggaacaaggatctttacttgggcaccttcagcacccaggaggaggcagcggaggcgtacgacatcgcggcgatcaagttccgcggcctcaacgccgtcaccaacttcgacatgagccgctacgacgtgaagagcatcctggacagcagcgccctccccatcggcagcgccgccaagcgcctcaaggaggccgaggccgcagcgtccgcgcagcaccaccacgccggcgtggtgagctacgacgtcggccgcatcgcctcgcagctcggcgacggcggagccctggcggcggcgtacggcgcgcactaccacggcgccgcctggccgaccatcgcgttccagccgggcgccgccagcacaggcctgtaccacccgtacgcgcagcagccaatgcgcggcggcgggtggtgcaagcaggagcaggaccacgcggtgatcgcggccgcgcacagcctgcaggacctccaccacctgaacctgggcgcggccggcgcgcacgactttttctcggcagggcagcaggccgccgccgctgcgatgcacggcctgggtagcatcgacagtgcgtcgctcgagcacagcaccggctccaactccgtcgtctacaacggcggggtcggcgacagcaacggcgccagcgccgtcggcggcagtggcggtggctacatgatgccgatgagcgctgccggagcaaccactacatcggcaatggtgagccacgagcaggtgcatgcacgggcctacgacgaagccaagcaggctgctcagatggggtacgagagctacctggtgaacgcggagaacaatggtggcggaaggatgtctgcatgggggactgtcgtgtctgcagccgcggcggcagcagcaagcagcaacgacaacatggccgccgacgtcgggcatggcggcgcgcagctcttcagtgtctggaacgacacttaatattggtaccgtcatgggtcgtttaagctgccgatgtgcctgcgtcgtctggtgccctctctccatatggaggttgtcaaagtatctgctgttcgtgtcatgagtcgtgtcagtgttggtttaataatggaccggttgtgttgtgtgtgcgtactacccagaactatgacaaatcatgaataagtttgatgtttgaaattaaagcctgtgctcattatgttctgtctttcagttgtctcctaatatttgcctgcaggtactggctatctaccgtttcttacttaggaggtgtttgaatgcactaaaactaatagttagtggctaaaattagttaaaacatccaaacaccatagctaatagttgaactattagctatttttggaaaattagttaatagtgaggtagttatttgttagctagctaattcaactaacaatttttagccaactaacaattagtttcagtgcattcaaacacccccttaatgttaaggtggttctatctaccgtctcctaatatatggttgattgttcggtttgttgctatgctattgggttctgattgctgctagttcttgctgaatccagaagttctcgtagtatagctcagattcatattatttatttgagtgataagtgatccaggttattactatgttagctaggttttttttacaaggataaattatctgtgatcataattcttatgaaagctttatgtttcctggaggcagtggcatgcaatgcatgacagcaacttgatcacaccagctgaggtagatacggtaacaaggttcttaaatctgttcaccaaatcattggagaacacacatacacattcttgccagtcttggttagagaaatttcatgacaaaatgccaaagctgtcttgactcttcacttttggccatgagtcgtgacgcgacttattgaactagtctagggcgcggctaacaacctagcttagattgccttgtctaaacccttaggctaacgcgccactctagaaggccgatctcccgggataacttcgtatagcatacattatacgaagttatgaattccggaccgggttaccgaattcctgcccttaaggccaattgttcaagattcattcaacaattgaaacatctcccatgattaaatcagtataaggttgctatggtcttgcttgacaaagtttttttttgagggaatttcaactaaatttttgagtgaaactatcaaatactgattttaaaaaatttttataaaaggaagcgcagagataaaaggccatctatgctacaaaagtacccaaaaatgtaatcctaaagtatgaattgcattttttttttgtttggacgaaaggaaaggagtattaccacaagaatgatatcatcttcatatttagatcttttttgggtaaagcttgagattctctaaatatagagaaatcagaagaaaaaaaaaccgtgttttggtggttttgatttctagcctccacaataactttgacggcgtcgacaagtctaacggacaccaagcagcgaaccaccagcgccgagccaagcgaagcagacggccgagacgttgacaccttcggcgcggcatctctcgagagttccgctccggcgctccacctccaccgctggcggtttcttattccgttccgttccgcctcctgctctgctcctctccacaccacacggcacgaaaccgttacggcaccggcagcacccagcacgggagaggggattcctttcccaccgttccttccctttccgccccgccgctataaatagccagccccatccccagcttttttccccaatctcatctcctctctcctgttgttcggagcacacgcacaatccgatcgatccccaaatccccttcgtctctcctcgcgagcctcgtggatcccagcttcaaggtacggcgatcgatcatcccccctccttctctctaccttcttttctctagactacatcggatggcgatccatggttagggcctgctagtttcccttcctgttttgtcgatggctgcgaggcacaatagatctgatggcgttatgacggctaacttgtcatgttgttgcgatttatagtccctttaggagatcagtttaatttctcggatggttcgagatcggtggtccatggttagtaccctaagatccgcgctgttagggttcgtagatggaggcgacctgttctgattgttaacttgtcagtacctgggaaatcctgggatggttctagctcgtccgcagatgagatcgatttcatgatcctctgtatcttgtttcgttgcctaggttccgtctaatctatccgtggtatgatgtagatgttttgatcgtgctaactacgtcttgtaaagttaattgtcaggtcataatttttagcatgcctttttttttgtttggttttgtctaattgggctgtcgttctagatcagagtagaagactgttccaaactacctgctggatttattgaacttggatctgtatgtgtgtcacatatcttcataaattcatgattaagatggattgaaatatcttttatctttttggtatggatagttctatatgttggtgtggctttgttagatgtatacatgcttagatacatgaagcaacgtgctgctactgtttagtaattgctgttcatttgtctaataaacagataaggatatgtatttatgttgctgttggttttgctggtactttgttggatacaaatgcttcaatacagaaaacagcatgctgctacgatttaccatttatctaatcttatcatatgtctaatctaataaacaaacatgcttttaaattatcttcatatgcttggatgatggcatacacagcggctatgtgtggttttttaaatacccagcatcatgggcatgcatgacactgctttaatatgctttttatttgcttgagactgtttcttttgtttatactgaccctttagttcggtgactcttctgcaggtcgactttaacttagcctaggatccatggcccagtccaagcacggcctgaccaaggagatgaccatgaagtaccgcatggagggctgcgtggacggccacaagttcgtgatcaccggcgagggcatcggctaccccttcaagggcaagcaggccatcaacctgtgcgtggtggagggcggccccttgcccttcgccgaggacatcttgtccgccgccttcatgtacggcaaccgcgtgttcaccgagtacccccaggacatcgtcgactacttcaagaactcctgccccgccggctacacctgggaccgctccttcctgttcgaggacggcgccgtgtgcatctgcaacgccgacatcaccgtgagcgtggaggagaactgcatgtaccacgagtccaagttctacggcgtgaacttccccgccgacggccccgtgatgaagaagatgaccgacaactgggagccctcctgcgagaagatcatccccgtgcccaagcagggcatcttgaagggcgacgtgagcatgtacctgctgctgaaggacggtggccgcttgcgctgccagttcgacaccgtgtacaaggccaagtccgtgccccgcaagatgcccgactggcacttcatccagcacaagctgacccgcgaggaccgcagcgacgccaagaaccagaagtggcacctgaccgagcacgccatcgcctccggctccgccttgccctccggactcagatctcgatagggtaccaatggccagttaacagatccagctgctgctgttctagggttcacaagtctgcctatttgtcttccccaatggagctatggttgtctggtctggtccttggtcgtgtcccgtttcattgtgtactatttacctgtaatgtgtatccttaagtctggtttgatggtgtctgaaacgttttgctgtggtagagcagcatggaagaactataatgaataagtgatccctaatcattgtgtccaaattttgcttctgctatacccttttgtgctgtttcttatgttttgcttaaaaatttgatctgacaaacaaatttgtctaaattatgctcttgttctgactgtgtactgtacacatttgtattgctaccggtttggcacatagttttctctttgattgcagatcaaacccttctgattgcagattgcttggctatggctgatgtgctcactgttcttctttagcttgtatattgctgatggtggcttggctacggctgaaaaagttgctgctgcgccgacttggcaactgttgctccagtaatgctttgtcctctcttcctagccgccgacttggcacttggcagctgttgctcctgtaatgcgttgttatctcttatctcttgagatgtactatgattttgaggctgtttgacttgtgccagattgccagtgctgatgctatattatctcaggtttttatgctagtatatgttttactgtgtgctgcctgtgtcgagttacgtaatctattgaaccgctatgcgtgttgatgccctgttgttgcttgccagattgatgcccctgttgcttgcagcttgcaagctgtagtgaaatcctaaaattcgaaaccaaatctattctgaacttttgaagatctgtgatgtccggaagaaaagattcaaacagataaacgggactctccagaatctataaaataaatgatcgacaaacgctttgctttggtaggcttcctagttagttagcggaccgggactgcccttaaggccaattgttcaagattcattcaacaattgaaacatctcccatgattaaatcagtataaggttgctatggtcttgcttgacaaagtttttttttgagggaatttcaactaaatttttgagtgaaactatcaaatactgattttaaaaaatttttataaaaggaagcgcagagataaaaggccatctatgctacaaaagtacccaaaaatgtaatcctaaagtatgaattgcattttttttttgtttggacgaaaggaaaggagtattaccacaagaatgatatcatcttcatatttagatcttttttgggtaaagcttgagattctctaaatatagagaaatcagaagaaaaaaaaaccgtgttttggtggttttgatttctagcctccacaataactttgacggcgtcgacaagtctaacggacaccaagcagcgaaccaccagcgccgagccaagcgaagcagacggccgagacgttgacaccttcggcgcggcatctctcgagagttccgctccggcgctccacctccaccgctggcggtttcttattccgttccgttccgcctcctgctctgctcctctccacaccacacggcacgaaaccgttacggcaccggcagcacccagcacgggagaggggattcctttcccaccgttccttccctttccgccccgccgctataaatagccagccccatccccagcttttttccccaatctcatctcctctctcctgttgttcggagcacacgcacaatccgatcgatccccaaatccccttcgtctctcctcgcgagcctcgtggatcccagcttcaaggtacggcgatcgatcatcccccctccttctctctaccttcttttctctagactacatcggatggcgatccatggttagggcctgctagtttcccttcctgttttgtcgatggctgcgaggcacaatagatctgatggcgttatgacggctaacttgtcatgttgttgcgatttatagtccctttaggagatcagtttaatttctcggatggttcgagatcggtggtccatggttagtaccctaagatccgcgctgttagggttcgtagatggaggcgacctgttctgattgttaacttgtcagtacctgggaaatcctgggatggttctagctcgtccgcagatgagatcgatttcatgatcctctgtatcttgtttcgttgcctaggttccgtctaatctatccgtggtatgatgtagatgttttgatcgtgctaactacgtcttgtaaagttaattgtcaggtcataatttttagcatgcctttttttttgtttggttttgtctaattgggctgtcgttctagatcagagtagaagactgttccaaactacctgctggatttattgaacttggatctgtatgtgtgtcacatatcttcataaattcatgattaagatggattgaaatatcttttatctttttggtatggatagttctatatgttggtgtggctttgttagatgtatacatgcttagatacatgaagcaacgtgctgctactgtttagtaattgctgttcatttgtctaataaacagataaggatatgtatttatgttgctgttggttttgctggtactttgttggatacaaatgcttcaatacagaaaacagcatgctgctacgatttaccatttatctaatcttatcatatgtctaatctaataaacaaacatgcttttaaattatcttcatatgcttggatgatggcatacacagcggctatgtgtggttttttaaatacccagcatcatgggcatgcatgacactgctttaatatgctttttatttgcttgagactgtttcttttgtttatactgaccctttagttcggtgactcttctgcaggtcgactttaacttagcctaggatccatgcaaaaactcattaactcagtgcaaaactatgcctggggcagcaaaacggcgttgactgaactttatggtatggaaaatccgtccagccagccgatggccgagctgtggatgggcgcacatccgaaaagcagttcacgagtgcagaatgccgccggagatatcgtttcactgcgtgatgtgattgagagtgataaatcgactctgctcggagaggccgttgccaaacgctttggcgaactgcctttcctgttcaaagtattatgcgcagcacagccactctccattcaggttcatccaaacaaacacaattctgaaatcggttttgccaaagaaaatgccgcaggtatcccgatggatgccgccgagcgtaactataaagatcctaaccacaagccggagctggtttttgcgctgacgcctttccttgcgatgaacgcgtttcgtgaattttccgagattgtctccctactccagccggtcgcaggtgcacatccggcgattgctcactttttacaacagcctgatgccgaacgtttaagcgaactgttcgccagcctgttgaatatgcagggtgaagaaaaatcccgcgcgctggcgattttaaaatcggccctcgatagccagcagggtgaaccgtggcaaacgattcgtttaatttctgaattttacccggaagacagcggtctgttctccccgctattgctgaatgtggtgaaattgaaccctggcgaagcgatgttcctgttcgctgaaacaccgcacgcttacctgcaaggcgtggcgctggaagtgatggcaaactccgataacgtgctgcgtgcgggtctgacgcctaaatacattgatattccggaactggttgccaatgtgaaattcgaagccaaaccggctaaccagttgttgacccagccggtgaaacaaggtgcagaactggacttcccgattccagtggatgattttgccttctcgctgcatgaccttagtgataaagaaaccaccattagccagcagagtgccgccattttgttctgcgtcgaaggcgatgcaacgttgtggaaaggttctcagcagttacagcttaaaccgggtgaatcagcgtttattgccgccaacgaatcaccggtgactgtcaaaggccacggccgtttagcgcgcgtttacaacaagctgtaaatcactagcgaacgcgtaggtacccgggccgtgggtcgtttaagctgccgctgtacctgtgtcgtctggtgccttctggtgtacctgggaggttgtcgtctatcaagtatctgtggttggtgtcatgagtcagtgagtcccaatactgttcgtgtcctgtgtgcattatacccaaaactgttatgggcaaatcatgaataagcttgatgttcgaacttaaaagtctctgctcaatatggtattatggttgtttttgttcgtctcctaatatttgcctgggatcaaattttattggctggtgttcatttgacctccatgttcttgctaggctccattttttactctacagccataatatgtttgattgtttggtttgttctttgttgtacacctggttctgtcgagcttagttttcgacactggcttacagcttaacatgttgctattttattgggttctgattgctattttattgggttctgattgctagtttttgctaaatccaaaaaccatgttatttatttaagcgatccaggttattattatgatggtggctaagtttttttttttccaagggtaaattttctggattctccagtgtttctgtggccgaattgggcaactttattatacaaagttgatagatatcggaccgattaaactttaattcggtccggtggcgccgctagcgtatactgtacacctgagctgattccgatgacttcgtaggttcctagctcaagccgctcgtgtccaagcgtcacttacgattagctaatgattacggcatctaggaccgactagttcttatgtgcttctagtctccaaatgtggttgatagttattttgctctaagatcaacagtaatgaagtataaatcatcgttgtggtgtgctactcggttaattgagcattaacacacacaaacatgacgaggatggtataatctccaaaaatgtgtactttgttaggtgggaccctatagccttgattaatgtgctatgttaggcatgcctggaaacgtgtgacgcatatgttttgtgaacctgttgatattatatgtgcttttatattaccatattttattaaaatactaatatttattactagtaagatataacattctatctagcttaaaaactaaccataaatattccataataactagatttaccaaactaatatactaaatatacataataaatacaaaattaacaagacaataatcaatatttatgagcttaatatatttagacattatggttggtcgacgataatcatgctaacttttcgtaattgcttgattgaaatatgcttagaataatgcctctttgttctacatggcaaatagggaccattatggtgtaacaccctgggaaccacaaacaccccgaaatgctactaaactacacaactaaccttcatatataaaatttcgacagcatctcctttgaaaatttgcatagacgtggaagcaacagagtataaacagatctgcgtttaaacgtgcaagcgctactagacaattcagtacattaaaaacgtccgcaatgtgttattaagttgtctaagcgtcaatttgtttacaccacaatatatcctgcca

SEQ ID NO: 20 - DNA, 19810 bp, Artificial sequence
  PHP93613
gtttacccgccaatatatcctgtcaaacactgcggccgcacttgaccgcggatggagccggagctgtggtgaggccatcgacgggaggtgggggagaacacagtctcagtgttctttgtgagtccgcaaggtttttagcttttctgtattaattaaggttgctgttggctgtagaatacggtcgtggaagagctgtatcggtagctactacgtaagctattatatactggaagtctggagctcgtcgatctccggtcgtcttcctccatttctcctcgtcttgctttgactgctgctaccatttgcttctgttttctgatgaagcatgccatgtcggccaccagtgtttgtgtggtttttgcagggaatggctttcaagtgctgtgattgaatggccctcgtcgtcctcggctgagctcacatggacgcgtcatgtgagtgagatatatgatcatatgatgagtggggttcgggtgagtgcgtacttgaagtaggatcccgctttcactcattcattcattggcctttaaaccgggaaattttcgcgaggagatggagggaagcaagcagggtgacgagtgcagagtgccgcgagcgctttgtcaaaaggcaccgccgtaggcaaaaaaatcaatggccctgactgactcgatggtagtactactgtagagactagagagggttgctccccatatcttcgtgtgacttttactccagcattgcatttccgtcattgagacgttaattaatagcagctttcgggacagatgactgtggccatgtttcgtcacggccgcttcgtgccagctgggggtactatagtactgtgattttgttagtaaaaactttcattaggccaccattgacgaccgggccttcgcttttgctgcgctaattaaccatttcccggcgaccgaagggaacatgaacatgccccgacacatgagggcatgaggactagtgttctccctgtcgttcgttgacttgactagtgatagtttaaacgctcttcaactggaagagcggttactaccggttcactagctagctgctaatcgagctagttaccctatgaggtgacatgaagcgctcacggttactatgacggttagcttcacgactgttggtggcagtagcgtacgacttagctatagttccggacttacctagctaataacttcgtatagcatacattatacgaagttatggttaccgaattcgagctcggtaccctggttcacaaactcaatacaacacacagtggagtagggtattacgctccggcggcccgaaccactctaaatccttgtgtcctcgtgtgctcttccaccattaatgactgtaattgcagggacacgaagagttgtagcgcttttgccaacaagatccgctatatgctagtagagtggaacctgcacagcaacaagcatccaataatctgagaataagaattatgtgtggtgatggttctcatctctgcaactcgccattttcgcgagagaaccaaatccaagttggtgaagatcatgatttgggctcatgggctggcatagtagctattacctttgcaattgtggttcgaatctatccgatattctccttttcagggagagctaatgcttatgcttattgggtattttggtttgacactgcttcacgcccaaaaaaaggcaactatgtctgagttggatatggcccaaaaaaaggcagctatgtctgagttggatatggaagtcttctttcgtttagggtgaagtaagaccaagctcatgagcttattatcttaggtcggaacaaattagttgataggcatggcacatttatcaaattataatgattttaacagaaaagcaacacctctttttcagcagcaccagctttgcaagctgcaattgacactccaagcatagtatttgctccaaactcagcctgcatttcgcacaatatcatatctatttccatttggataaaatatattttccagaaatatgggaacagaatcaagatacagaaaaaagttgtggtagtagtggtaagtggaaacacaagtacagtgaaaagatagcattatttctgaacagtcaaattaaccgaaataagtagtatcacatactgcccctaaattgactacacccaatgtaaagaattgcttgagcatattgagccatcagttgtttgtttgtgtaacggatttgacaatgcagagttcaggagcaaaaaaccgcaaaggagagaaagagggaaaggatctcctagtatcccaccttgtggcgcgccctgtcaagtgcatgatggcctggtcgatctgcgtctgctgctgcggttccatcccaacgagtgcctccgacaccttgtcgttgatcacccgcaccgcgtaggcgacccccctggcgaggaacttccgcctctcggaggccccggccgcgtcggcggcggcgccctcgagcgcgcccacgctagccgtagatgctcggtgcacggccttgttggtgtgcaactcgacctcaacggccggtgcgctacgcccgtcaaggatctggcgcgcccgcaccctcgtgatcacggtgggcgcctcccgcctcatgtggccgacgatgaaaagcgccgggttaggggccttggcgcgcaccgccgtattcagggcctcctcgctcttgcgcgagagcaggtgcttccccaggtactcctgcactgacaaggctgccacagcggtggaatttgtcctcacgacttcgccacgtcgtcctcacctccctggcttcccacgactccgccgtatcgaggtgctcggtgggtcgtcttaatccgaagtccgaactaggaagacgagacagagaggtctgaggaatgggcctcgtttgatgttgagctgaattatttttccagcataagcccaggtcttggtccatgaacaaaattactagaaacccagcccagtactacgatctaaaagagggactgccactggatagctctctctagcattctccacgctccaatacagcggcgtcgtgtctatccgggtctatccgcgaacacgtgagaactctccagaaactgctttctcctccacttcatctctctcgctttccctctataaaaagaccccttctaggaattgagggagacagcaagcaccaagcagcgatccgaagctcaatcaattcactcaaacctcttccccaaatcttcgattagatcttcgttgacaagaagactagaaccgaacctgacatgtccaacctgctcacggttcaccagaaccttccggctcttccagtggacgcgacgtccgatgaagtcaggaagaacctcatggacatgttccgcgacaggcaagcgttcagcgagcacacctggaagatgctgctctccgtctgccgctcctgggctgcatggtgcaagctgaacaacaggaagtggttccccgctgagcccgaggacgtgagggattaccttctgtacctgcaagcgcgaggtttgtttctgcttctacctttgatatatatataataattatcattaattagtagtaatataatatttcaaatatttttttcaaaataaaagaatgtagtatatagcaattgcttttctgtagtttataagtgtgtatattttaatttataacttttctaatatatgaccaaaacatggtgatgcctaggtctggcagtgaagaccatccagcaacaccttggacaactgaacatgcttcacaggcgctccggcctcccgcgccccagcgactcgaacgccgtgagcctcgtcatgcgccgcatcaggaaggaaaacgtcgatgccggcgaaagggcaaagcaggccctcgcgttcgagaggaccgatttcgaccaggtccgcagcctgatggagaacagcgacaggtgccaggacattaggaacctggcgttcctcggaattgcatacaacacgctcctcaggatcgcggaaattgcccgcattcgcgtgaaggacattagccgcaccgacggcggcaggatgcttatccacattggcaggaccaagacgctcgtttccaccgcaggcgtcgaaaaggccctcagcctcggagtgaccaagctcgtcgaacgctggatctccgtgtccggcgtcgcggacgacccaaacaactacctcttctgccgcgtccgcaagaacggggtggctgcccctagcgccaccagccaactcagcacgagggccttggaaggtattttcgaggccacccaccgcctgatctacggcgcgaaggatgacagcggtcaacgctacctcgcatggtccgggcactccgcccgcgttggagctgctagggacatggcccgcgccggtgtttccatccccgaaatcatgcaggcgggtggatggacgaacgtgaacattgtcatgaactacattcgcaaccttgacagcgagacgggcgcaatggttcgcctcctggaagatggtgactgagctagacccagctttcttgtacaaagtggccgttaacggatgcagacttgtccatcttctggattggccaacttaattaatgtatgaaataaaaggatgcacacatagtgacatgctaatcactataatgtgggcatcaaagttgtgtgttatgtgtaattactagttatctgaataaaagagaaagagatcatccatatttcttatcctaaatgaatgtcacgtgtctttataattctttgatgaaccagatgcatttcattaaccaaatccatatacatataaatattaatcatatataattaatatcaattgggttagcaaaacaaatctagtctaggtgtgttttgcgaattgcggcaaggttgcgcccgccccagcttggtcagccgctccgggcttagaaggccgatctcgcgggcacccagctttcttctacaaagtggccgtttacggatcggctagaatgtcccgcaccggcttaccgatttgcacctcgctaccctgggttcgaccgaagctgaccgatgcttgcgcccgctcgcgaggccggccaagcttgatatcgaattcctgcagcccatccctcagccgcctttcactatcttttttgcccgagtcattgtcatgtgaaccttggcatgtataatcggtgaattgcgtcgattttcctcttataggtgggccaatgaatccgtgtgatcgcgtctgattggctagagatatgtttcttccttgttggatgtattttcatacataatcatatgcatacaaatatttcattacactttatagaaatggtcagtaataaaccctatcactatgtctggtgtttcattttatttgcttttaaacgaaaattgacttcctgattcaatatttaaggatcgtcaacggtgtgcagttactaaattctggtttgtaggaactatagtaaactattcaagtcttcacttattgtgcactcacctctcgccacatcaccacagatgttattcacgtcttaaatttgaactacacatcatattgacacaatattttttttaaataagcgattaaaacctagcctctatgtcaacaatggtgtacataaccagcgaagtttagggagtaaaaaacatcgccttacacaaagttcgctttaaaaaataaagagtaaattttactttggaccacccttcaaccaatgtttcactttagaacgagtaattttattattgtcactttggaccaccctcaaatcttttttccatctacatccaatttatcatgtcaaagaaatggtctacatacagctaaggagatttatcgacgaatagtagctagcatactcgaggtcattcatatgcttgagaagagagtcgggatagtccaaaataaaacaaaggtaagattacctggtcaaaagtgaaaacatcagttaaaaggtggtataaagtaaaatatcggtaataaaaggtggcccaaagtgaaatttactcttttctactattataaaaattgaggatgtttttgtcggtactttgatacgtcatttttgtatgaattggtttttaagtttattcgcttttggaaatgcatatctgtatttgagtcgggttttaagttcgtttgcttttgtaaatacagagggatttgtataagaaatatctttaaaaaaacccatatgctaatttgacataatttttgagaaaaatatatattcaggcgaattctcacaatgaacaataataagattaaaatagctttcccccgttgcagcgcatgggtattttttctagtaaaaataaaagataaacttagactcaaaacatttacaaaaacaacccctaaagttcctaaagcccaaagtgctatccacgatccatagcaagcccagcccaacccaacccaacccaacccaccccagtccagccaactggacaatagtctccacacccccccactatcaccgtgagttgtccgcacgcaccgcacgtctcgcagccaaaaaaaaaaaaagaaagaaaaaaaagaaaaagaaaaaacagcaggtgggtccgggtcgtgggggccggaaacgcgaggaggatcgcgagccagcgacgaggccggccctccctccgcttccaaagaaacgccccccatcgccactatatacatacccccccctctcctcccatccccccaaccctaccaccaccaccaccaccacctccacctcctcccccctcgctgccggacgacgagctcctcccccctccccctccgccgccgccgcgccggtaaccaccccgcccctctcctctttctttctccgttttttttttccgtcacggtctcgatctttggccttggtagtttgggtgggcgagaggcggcttcgtgcgcgcccagatcggtgcgcgggaggggcgggatctcgcggctggggctctcgccggcgtggatcaggcccggatctcgcggggaatggggctctcggatgtagatctgcgatccgccgttgttgggggagatgatggggggtttaaaatttccgccatgctaaacaagatcaggaagaggggaaaagggcactatggtttatatttttatatatttctgctgcttcgtcaggcttagatgtgctagatctttctttcttctttttgtgggtagaatttgaatccctcagcattgttcatcggtagtttttcttttcatgatttgtgacaaatgcagcctcgtgcggagcttttttgtaggtagaaggatccgcccatggcggccaatgcgggcggcggtggagcgggaggaggcagcggcagcggcagcgtggctgcgccggcggtgtgccgccccagcggctcgcggtggacgccgacgccggagcagatcaggatgctgaaggagctctactacggctgcggcatccggtcgcccagctcggagcagatccagcgcatcaccgccatgctgcggcagcacggcaagatcgagggcaagaacgtcttctactggttccagaaccacaaggcccgcgagcgccagaagcgccgcctcaccagcctcgacgtcaacgtgcccgccgccggcgcggccgacgccaccaccagccaactcggcgtcctctcgctgtcgtcgccgccgccttcaggcgcggcgcctccctcgcccaccctcggcttctacgccgccggcaatggcggcggatcggctgtgctgctggacacgagttccgactggggcagcagcggcgctgctatggccaccgagacatgcttcctgcaggactacatgggcgtgacggacacgggcagctcgtcgcagtggccacgcttctcgtcgtcggacacgataatggcggcggccgcggcgcgggcggcgacgacgcgggcgcccgagacgctccctctcttcccgacctgcggcgacgacggcggcagcggtagcagcagctacttgccgttctggggtgccgcgtccacaactgccggcgccacttcttccgttgcgatccaacagcaacaccagctgcaggagcagtacagcttttacagcaacagcaacagcacccagctggccggcaccggcaaccaagacgtatcggcaacagcagcagcagccgccgccctggagctgagcctcagctcatggtgctccccttaccctgctgcagggagtatgtgagagcaacgcgagctgccactgctcttcactgatgtctctggaatggaaggaggaggaagtgagaacagatcattcgacaaagcagcattagtccgttgatcggtggaagaccactcgtcagtgttgagttgaatgtttgatcaataaaatacggcaatgctgtaagggttgttttttatgccattgataatacactgtactgttcagttgttgaactctatttcttagccatgccaagtgcttttcttattttgaataacattacagcaaaaagttgaaagacaaaaaaaaaaacccccgaacagagtgctttgggtcccaagcttctttagactgtgttcggcgttccccctaaatttctccccctatatctcactcacttgtcacatcagcgttctctttccccctatatctccacgctctacagcagttccacctatatcaaacctctataccccaccacaacaatattatatactttcatcttcaactaactcatgtaccttccaatttttttctactaataattatttacgtgcacagaaacttagcaaggagagagagagcgggaatttaaatgctcggcgttaggcttttagtccgctaggtggctagaccgaggttaggacgctagttcactaggggcctagtggtgttttaagacgtcacggtcaccacgcgtggaccgaagcttgcatgcctgcagtgcagcgtgacccggtcgtgcccctctctagagataatgagcattgcatgtctaagttataaaaaattaccacatattttttttgtcacacttgtttgaagtgcagtttatctatctttatacatatatttaaactttactctacgaataatataatctatagtactacaataatatcagtgttttagagaatcatataaatgaacagttagacatggtctaaaggacaattgagtattttgacaacaggactctacagttttatctttttagtgtgcatgtgttctcctttttttttgcaaatagcttcacctatataatacttcatccattttattagtacatccatttagggtttagggttaatggtttttatagactaatttttttagtacatctattttattctattttagcctctaaattaagaaaactaaaactctattttagtttttttatttaataatttagatataaaatagaataaaataaagtgactaaaaattaaacaaataccctttaagaaattaaaaaaactaaggaaacatttttcttgtttcgagtagataatgccagcctgttaaacgccgtcgacgagtctaacggacaccaaccagcgaaccagcagcgtcgcgtcgggccaagcgaagcagacggcacggcatctctgtcgctgcctctggacccctctcgagagttccgctccaccgttggacttgctccgctgtcggcatccagaaattgcgtggcggagcggcagacgtgagccggcacggcaggcggcctcctcctcctctcacggcaccggcagctacgggggattcctttcccaccgctccttcgctttcccttcctcgcccgccgtaataaatagacaccccctccacaccctctttccccaacctcgtgttgttcggagcgcacacacacacaaccagatctcccccaaatccacccgtcggcacctccgcttcaaggtacgccgctcgtcctcccccccccccctctctaccttctctagatcggcgttccggtccatgcatggttagggcccggtagttctacttctgttcatgtttgtgttagatccgtgtttgtgttagatccgtgctgctagcgttcgtacacggatgcgacctgtacgtcagacacgttctgattgctaacttgccagtgtttctctttggggaatcctgggatggctctagccgttccgcagacgggatcgatttcatgattttttttgtttcgttgcatagggtttggtttgcccttttcctttatttcaatatatgccgtgcacttgtttgtcgggtcatcttttcatgcttttttttgtcttggttgtgatgatgtggtctggttgggcggtcgttctagatcggagtagaattctgtttcaaactacctggtggatttattaattttggatctgtatgtgtgtgccatacatattcatagttacgaattgaagatgatggatggaaatatcgatctaggataggtatacatgttgatgcgggttttactgatgcatatacagagatgctttttgttcgcttggttgtgatgatgtggtgtggttgggcggtcgttcattcgttctagatcggagtagaatactgtttcaaactacctggtgtatttattaattttggaactgtatgtgtgtgtcatacatcttcatagttacgagtttaagatggatggaaatatcgatctaggataggtatacatgttgatgtgggttttactgatgcatatacatgatggcatatgcagcatctattcatatgctctaaccttgagtacctatctattataataaacaagtatgttttataattattttgatcttgatatacttggatgatggcatatgcagcagctatatgtggatttttttagccctgccttcatacgctatttatttgcttggtactgtttcttttgtcgatgctcaccctgttgtttggtgttacttctgcaggtcgactttaacttagcctaggatccgcccatggactccagcagcttcctccctgccgccggcgcggagaatggctcggcggcgggcggcgccaacaatggcggcgctgctcagcagcatgcggcgccggcgatccgcgagcaggaccggctgatgccgatcgcgaacgtgatccgcatcatgcggcgcgtgctgccggcgcacgccaagattagcgacgacgccaaggagacgatccaggagtgcgtgtcggagtacatcagcttcatcacgggggaggccaacgagcggtgccagcgggagcagcgcaagaccatcaccgccgaggacgtgctgtgggccatgagccgcctcggcttcgacgactacgtcgagccgctcggcgcctacctccaccgctaccgcgagttcgagggcgacgcgcgcggcgtcgggctcgtccctggggccgccccatcgcgcggcggcgaccaccacccgcactccatgtcgccagcggcgatgctcaagtcccgcgggccagtctccggagccgccatgctaccgcaccaccaccaccaccacgacatgcagatgcacgccgccatgtacgggggaacggccgtgcccccgccggccgggcctcctcaccacggcgggttcctcatgccacacccacagggtagtagccactacctgccttacgcgtacgagcccacgtacggcggtgagcacgcgatggctgcatactatggaggcgccgcgtacgcgcccggcaacggcgggagcggcgacggcagtggcagtggcggcggtggcgggagcgcgtcgcacacaccgcagggcagcggcggcttggagcacccgcacccgttcgcgtacaagtagttatgtacaggtacctgacatcttatagtctgcaacctctcgtgtctgaattcctatctttatcaagtgttattgcttccacgactataggacagctttcgtcgaaagcttttgctcatgtgatctcgaaggattcatctagtctgatttttcgtgacttgtatcggttttattggattcatccaacatatatcaataaaaaatgagttgtgtttcctttcttcctagttcagttaaaattatttccctcctgcgcttgtgctgtaattgtctgtgtacctgttgtttgtgactgtgttagttcccttggatatgatttcgtatttgatatgtacatggagatagcttagcttcattattggagtatgaagttagtatgacatagtcactctcctggaaaattgacactgcaaaccatatttttattctgaaccacaaatcctagtcagtccgctggcatatgccgtccgtttgctgaatccagaacgtgggtttggagatgtacggctgagatgcctctatgcgaaggggatttcgtggtgaaacgagatgggagtagagcaacgcccgtggaagatgcttcaaacttccacacttttgagcaacgatcggcagtagtaaggtagacgatttcaagatcaaagcatatgaagataaacaacatcaacaacaaaatttgttggggttctatagagagaaacagagctacatacatacactgttttgtatctaccatctgagatgatgaaaagatgaaaaactaaagaatgccccggcgccaacgccaggacacgccgcgcgcgcgtcacccgagccatctcttgacccagccggcgctgtatatttacacacgttgcagcatcgatcaccacctgttcgatcgcgtcgccgtcaccggtaccgagctcgaattccggattaagacccgtcgtcaagtaggaattccagaaatcaacgcacggtaactaaatcctcgcgctaagctgggtcagtgcgcacgataacttcgtatagcatacattatacgaagttataacagcggaccgggttaccgaattcctgcccttaaggccaattgttcaagattcattcaacaattgaaacatctcccatgattaaatcagtataaggttgctatggtcttgcttgacaaagtttttttttgagggaatttcaactaaatttttgagtgaaactatcaaatactgattttaaaaaatttttataaaaggaagcgcagagataaaaggccatctatgctacaaaagtacccaaaaatgtaatcctaaagtatgaattgcattttttttttgtttggacgaaaggaaaggagtattaccacaagaatgatatcatcttcatatttagatcttttttgggtaaagcttgagattctctaaatatagagaaatcagaagaaaaaaaaaccgtgttttggtggttttgatttctagcctccacaataactttgacggcgtcgacaagtctaacggacaccaagcagcgaaccaccagcgccgagccaagcgaagcagacggccgagacgttgacaccttcggcgcggcatctctcgagagttccgctccggcgctccacctccaccgctggcggtttcttattccgttccgttccgcctcctgctctgctcctctccacaccacacggcacgaaaccgttacggcaccggcagcacccagcacgggagaggggattcctttcccaccgttccttccctttccgccccgccgctataaatagccagccccatccccagcttttttccccaatctcatctcctctctcctgttgttcggagcacacgcacaatccgatcgatccccaaatccccttcgtctctcctcgcgagcctcgtggatcccagcttcaaggtacggcgatcgatcatcccccctccttctctctaccttcttttctctagactacatcggatggcgatccatggttagggcctgctagtttcccttcctgttttgtcgatggctgcgaggcacaatagatctgatggcgttatgacggctaacttgtcatgttgttgcgatttatagtccctttaggagatcagtttaatttctcggatggttcgagatcggtggtccatggttagtaccctaagatccgcgctgttagggttcgtagatggaggcgacctgttctgattgttaacttgtcagtacctgggaaatcctgggatggttctagctcgtccgcagatgagatcgatttcatgatcctctgtatcttgtttcgttgcctaggttccgtctaatctatccgtggtatgatgtagatgttttgatcgtgctaactacgtcttgtaaagttaattgtcaggtcataatttttagcatgcctttttttttgtttggttttgtctaattgggctgtcgttctagatcagagtagaagactgttccaaactacctgctggatttattgaacttggatctgtatgtgtgtcacatatcttcataaattcatgattaagatggattgaaatatcttttatctttttggtatggatagttctatatgttggtgtggctttgttagatgtatacatgcttagatacatgaagcaacgtgctgctactgtttagtaattgctgttcatttgtctaataaacagataaggatatgtatttatgttgctgttggttttgctggtactttgttggatacaaatgcttcaatacagaaaacagcatgctgctacgatttaccatttatctaatcttatcatatgtctaatctaataaacaaacatgcttttaaattatcttcatatgcttggatgatggcatacacagcggctatgtgtggttttttaaatacccagcatcatgggcatgcatgacactgctttaatatgctttttatttgcttgagactgtttcttttgtttatactgaccctttagttcggtgactcttctgcaggtcgactttaacttagcctaggatccatggcccagtccaagcacggcctgaccaaggagatgaccatgaagtaccgcatggagggctgcgtggacggccacaagttcgtgatcaccggcgagggcatcggctaccccttcaagggcaagcaggccatcaacctgtgcgtggtggagggcggccccttgcccttcgccgaggacatcttgtccgccgccttcatgtacggcaaccgcgtgttcaccgagtacccccaggacatcgtcgactacttcaagaactcctgccccgccggctacacctgggaccgctccttcctgttcgaggacggcgccgtgtgcatctgcaacgccgacatcaccgtgagcgtggaggagaactgcatgtaccacgagtccaagttctacggcgtgaacttccccgccgacggccccgtgatgaagaagatgaccgacaactgggagccctcctgcgagaagatcatccccgtgcccaagcagggcatcttgaagggcgacgtgagcatgtacctgctgctgaaggacggtggccgcttgcgctgccagttcgacaccgtgtacaaggccaagtccgtgccccgcaagatgcccgactggcacttcatccagcacaagctgacccgcgaggaccgcagcgacgccaagaaccagaagtggcacctgaccgagcacgccatcgcctccggctccgccttgccctccggactcagatctcgatagggtaccaatggccagttaacagatccagctgctgctgttctagggttcacaagtctgcctatttgtcttccccaatggagctatggttgtctggtctggtccttggtcgtgtcccgtttcattgtgtactatttacctgtaatgtgtatccttaagtctggtttgatggtgtctgaaacgttttgctgtggtagagcagcatggaagaactataatgaataagtgatccctaatcattgtgtccaaattttgcttctgctatacccttttgtgctgtttcttatgttttgcttaaaaatttgatctgacaaacaaatttgtctaaattatgctcttgttctgactgtgtactgtacacatttgtattgctaccggtttggcacatagttttctctttgattgcagatcaaacccttctgattgcagattgcttggctatggctgatgtgctcactgttcttctttagcttgtatattgctgatggtggcttggctacggctgaaaaagttgctgctgcgccgacttggcaactgttgctccagtaatgctttgtcctctcttcctagccgccgacttggcacttggcagctgttgctcctgtaatgcgttgttatctcttatctcttgagatgtactatgattttgaggctgtttgacttgtgccagattgccagtgctgatgctatattatctcaggtttttatgctagtatatgttttactgtgtgctgcctgtgtcgagttacgtaatctattgaaccgctatgcgtgttgatgccctgttgttgcttgccagattgatgcccctgttgcttgcagcttgcaagctgtagtgaaatcctaaaattcgaaaccaaatctattctgaacttttgaagatctgtgatgtccggaagaaaagattcaaacagataaacgggactctccagaatctataaaataaatgatcgacaaacgctttgctttggtaggcttcctagttagttagcggaccgggatccgacggcgtcttcaccgccccgccgccgcccgagccggacttgtcgctgccgccgccgctgctcatcttgcgcgcttgtgtccctccctcagtccctgcgttcgcggatcgcgggcgggtgcgacccgtttggactccggccggtagccttcgtgccgacctcgctcggtccaccggtttgtcggggacccacatgtcagtgaaggtacgcgtccacgtccacagaccctactaccccagacgagtccaaatcgctgttccctcacactctcgtgtaccagcgcgcggcggaaagcacctttccaacaaccgccgacacgtcggtcccacgtcggcatgctccaccggtcagtgtttggcgtgtacggctcccggcgacgaacgagtgtggcctaagctttcctactcccatcccatctgagccacacatctctctcacgccacgcgcacaaaacagccaggctcccacgcgcatcaaccggctctccctttccgtgccactcgcccccaagccccaaaccctcgccgccgcctccgagacagccgccgccacctaggccatggccaccgccgccgccgcgtctaccgcgctcactggcgccactaccgctgcgcccaaggcgaggcgccgggcgcacctcctggccacccgccgcgccctcgccgcgcccatcaggtgctcagcggcgtcacccgccatgccgatggctcccccggccaccccgctccggccgtggggccccaccgagccccgcaagggtgctgacatcctcgtcgagtccctcgagcgctgcggcgtccgcgacgtcttcgcctaccccggcggcgcgtcgatggagatccaccaggcactcacccgctcccccgtcatcgccaaccacctcttccgccacgagcaaggggaggcctttgccgcctccggctacgcgcgctcctcgggccgcgtcggcgtctgcatcgccacctccggccccggcgccaccaacctagtctccgcgctcgccgacgcgctgctcgattccgtcccgatggtcgccatcacgggacaggtggcgcgacgcatgattggcaccgacgccttccaggagacgcccatcgtcgaggtcacgcgctccatcaccaagcacaactacctggtcctcgacgtcgacgacatcccccgcgtcgtgcaggaggctttcttcctcgcctcctctggtcgaccagggccggtgcttgtcgacatccccaaggacatccagcagcagatggcggtgcctgtctgggacaagcccatgagtctgcctgggtacattgcgcgccttcccaagccccctgcgactgagttgcttgagcaggtgctgcgtcttgttggtgaatcgcggcgccctgttctttatgtgggcggtggctgcgcagcatctggtgaggagttgcgacgctttgtggagctgactggaatcccggtcacaactactcttatgggcctcggcaacttccccagcgacgacccactgtctctgcgcatgctaggtatgcatgggacggtgtatgcaaattatgcagtggataaggccgatctgttgcttgcacttggtgtgcggtttgatgatcgcgtgacagggaagattgaggcttttgcaagcagggctaagattgtgcacgttgatattgatccggctgagattggcaagaacaagcagccacatgtgtccatctgtgcagatgttaagcttgctttgcagggcatgaatgctcttcttgaaggaagcacatcaaagaagagctttgactttggctcatggaacgatgagttggatcagcagaagagggaattcccccttgggtataaaacatctaatgaggagatccagccacaatatgctattcaggttcttgatgagctgacgaaaggcgaggccatcatcggcacaggtgttgggcagcaccagatgtgggcggcacagtactacacttacaagcggccaaggcagtggttgtcttcagctggtcttggggctatgggatttggtttgccggctgctgctggtgcttctgtggcaaacccaggtgtcactgttgttgacatcgatggagatggtagctttctcatgaacgttcaggagctagctatgatccgaattgagaacctcccagtgaaggtctttgtgctaaacaaccagcacctggggatggtggtgcagttggaggacaggttctataaggccaacagagcgcacacatacttgggaaacccagagaatgaaagtgagatatatccagatttcgtgacgatcgccaaagggttcaacattccagccgtccgtgtgacaaagaagaacgaagtccgcgcagcgataaagaagatgctcgagactccagggccgtacctcttggatataatcgtcccacaccaggagcatgtgttgcctatgatccctagtggtggggctttcaaggatatgatcctggatggtgatggcaggactgtgtactgacttcgaataggtacccggggatcctctagtgccgtgggtcgtttaagctgccgctgtacctgtgtcgtctggtgccttctggtgtacctgggaggttgtcgtctatcaagtatctgtggttggtgtcatgagtcagtgagtcccaatactgttcgtgtcctgtgtgcattatacccaaaactgttatgggcaaatcatgaataagcttgatgttcgaacttaaaagtctctgctcaatatggtattatggttgtttttgttcgtctcctaatatttgcctgggatcaaattttattggctggtgttcatttgacctccatgttcttgctaggctccattttttactctacagccataatatgtttgattgtttggtttgttctttgttgtacacctggttctgtcgagcttagttttcgacactggcttacagcttaacatgttgctattttattgggttctgattgctattttattgggttctgattgctagtttttgctgaatccaaaaaccatgttatttatttaagcgatccaggttattattatgatggtggctaagtttttttttttccaagggtaaattttctggattctccagtgtttctgtggccgaattcaatcactagagtcgacctgcaaagcttcggtccgggcctagaaggcccgcgccacttacgcttgattccgatgacttcgtaggttcctagctcaagccgctcgtgtccaagcgtcacttacgattagctaatgattacggcatctaggaccgactagctagctagctaagagctcggtaccgagctcgaattcattccgattaatcgtggcctcttgctcttcaggatgaagagctatgtttaaacgtgcaagcgctactagacaattcagtacattaaaaacgtccgcaatgtgttattaagttgtctaagcgtcaatttgtttacaccacaatatatcctgcca

SEQ ID NO: 21 - DNA, 17767 bp, Artificial sequence
  PHP93696
gtttacccgccaatatatcctgtcaaacactgcggccgcacttgaccgcggatggagccggagctgtggtgaggccatcgacgggaggtgggggagaacacagtctcagtgttctttgtgagtccgcaaggtttttagcttttctgtattaattaaggttgctgttggctgtagaatacggtcgtggaagagctgtatcggtagctactacgtaagctattatatactggaagtctggagctcgtcgatctccggtcgtcttcctccatttctcctcgtcttgctttgactgctgctaccatttgcttctgttttctgatgaagcatgccatgtcggccaccagtgtttgtgtggtttttgcagggaatggctttcaagtgctgtgattgaatggccctcgtcgtcctcggctgagctcacatggacgcgtcatgtgagtgagatatatgatcatatgatgagtggggttcgggtgagtgcgtacttgaagtaggatcccgctttcactcattcattcattggcctttaaaccgggaaattttcgcgaggagatggagggaagcaagcagggtgacgagtgcagagtgccgcgagcgctttgtcaaaaggcaccgccgtaggcaaaaaaatcaatggccctgactgactcgatggtagtactactgtagagactagagagggttgctccccatatcttcgtgtgacttttactccagcattgcatttccgtcattgagacgttaattaatagcagctttcgggacagatgactgtggccatgtttcgtcacggccgcttcgtgccagctgggggtactatagtactgtgattttgttagtaaaaactttcattaggccaccattgacgaccgggccttcgcttttgctgcgctaattaaccatttcccggcgaccgaagggaacatgaacatgccccgacacatgagggcatgaggactagtgttctccctgtcgttcgttgacttgactagtgatagtttaaacgctcttcaactggaagagcggttactaccggttcactagctagctgctaatcgagctagttaccctatgaggtgacatgaagcgctcacggttactatgacggttagcttcacgactgttggtggcagtagcgtacgacttagctatagttccggacttacctagctagaattcgagctcggtaccctggttcacaaactcaatacaacacacagtggagtagggtattacgctccggcggcccgaaccactctaaatccttgtgtcctcgtgtgctcttccaccattaatgactgtaattgcagggacacgaagagttgtagcgcttttgccaacaagatccgctatatgctagtagagtggaacctgcacagcaacaagcatccaataatctgagaataagaattatgtgtggtgatggttctcatctctgcaactcgccattttcgcgagagaaccaaatccaagttggtgaagatcatgatttgggctcatgggctggcatagtagctattacctttgcaattgtggttcgaatctatccgatattctccttttcagggagagctaatgcttatgcttattgggtattttggtttgacactgcttcacgcccaaaaaaaggcaactatgtctgagttggatatggcccaaaaaaaggcagctatgtctgagttggatatggaagtcttctttcgtttagggtgaagtaagaccaagctcatgagcttattatcttaggtcggaacaaattagttgataggcatggcacatttatcaaattataatgattttaacagaaaagcaacacctctttttcagcagcaccagctttgcaagctgcaattgacactccaagcatagtatttgctccaaactcagcctgcatttcgcacaatatcatatctatttccatttggataaaatatattttccagaaatatgggaacagaatcaagatacagaaaaaagttgtggtagtagtggtaagtggaaacacaagtacagtgaaaagatagcattatttctgaacagtcaaattaaccgaaataagtagtatcacatactgcccctaaattgactacacccaatgtaaagaattgcttgagcatattgagccatcagttgtttgtttgtgtaacggatttgacaatgcagagttcaggagcaaaaaaccgcaaaggagagaaagagggaaaggatctcctagtatcccaccttgtggcgcgccctgtcaagtgcatgatggcctggtcgatctgcgtctgctgctgcggttccatcccaacgagtgcctccgacaccttgtcgttgatcacccgcaccgcgtaggcgacccccctggcgaggaacttccgcctctcggaggccccggccgcgtcggcggcggcgccctcgagcgcgcccacgctagccgtagatgctcggtgcacggccttgttggtgtgcaactcgacctcaacggccggtgcgctacgcccgtcaaggatctggcgcgcccgcaccctcgtgatcacggtgggcgcctcccgcctcatgtggccgacgatgaaaagcgccgggttaggggccttggcgcgcaccgccgtattcagggcctcctcgctcttgcgcgagagcaggtgcttccccaggtactcctgcactgacaaggctgccacagcggtggaatttgtcctcacgacttcgccacgtcgtcctcacctccctggcttcccacgactccgccgtatcgaggtgctcggtgggtcgtcttaatccgaagtccgaactaggaagacgagacagagaggtctgaggaatgggcctcgtttgatgttgagctgaattatttttccagcataagcccaggtcttggtccatgaacaaaattactagaaacccagcccagtactacgatctaaaagagggactgccactggatagctctctctagcattctccacgctccaatacagcggcgtcgtgtctatccgggtctatccgcgaacacgtgagaactctccagaaactgctttctcctccacttcatctctctcgctttccctctataaaaagaccccttctaggaattgagggagacagcaagcaccaagcagcgatccgaagctcaatcaattcactcaaacctcttccccaaatcttcgattagatcttcgttgacaagaagactagaaccgaacctgacatgtccaacctgctcacggttcaccagaaccttccggctcttccagtggacgcgacgtccgatgaagtcaggaagaacctcatggacatgttccgcgacaggcaagcgttcagcgagcacacctggaagatgctgctctccgtctgccgctcctgggctgcatggtgcaagctgaacaacaggaagtggttccccgctgagcccgaggacgtgagggattaccttctgtacctgcaagcgcgaggtttgtttctgcttctacctttgatatatatataataattatcattaattagtagtaatataatatttcaaatatttttttcaaaataaaagaatgtagtatatagcaattgcttttctgtagtttataagtgtgtatattttaatttataacttttctaatatatgaccaaaacatggtgatgcctaggtctggcagtgaagaccatccagcaacaccttggacaactgaacatgcttcacaggcgctccggcctcccgcgccccagcgactcgaacgccgtgagcctcgtcatgcgccgcatcaggaaggaaaacgtcgatgccggcgaaagggcaaagcaggccctcgcgttcgagaggaccgatttcgaccaggtccgcagcctgatggagaacagcgacaggtgccaggacattaggaacctggcgttcctcggaattgcatacaacacgctcctcaggatcgcggaaattgcccgcattcgcgtgaaggacattagccgcaccgacggcggcaggatgcttatccacattggcaggaccaagacgctcgtttccaccgcaggcgtcgaaaaggccctcagcctcggagtgaccaagctcgtcgaacgctggatctccgtgtccggcgtcgcggacgacccaaacaactacctcttctgccgcgtccgcaagaacggggtggctgcccctagcgccaccagccaactcagcacgagggccttggaaggtattttcgaggccacccaccgcctgatctacggcgcgaaggatgacagcggtcaacgctacctcgcatggtccgggcactccgcccgcgttggagctgctagggacatggcccgcgccggtgtttccatccccgaaatcatgcaggcgggtggatggacgaacgtgaacattgtcatgaactacattcgcaaccttgacagcgagacgggcgcaatggttcgcctcctggaagatggtgactgaggtacccaacctagacttgtccatcttctggattggccaacttaattaatgtatgaaataaaaggatgcacacatagtgacatgctaatcactataatgtgggcatcaaagttgtgtgttatgtgtaattactagttatctgaataaaagagaaagagatcatccatatttcttatcctaaatgaatgtcacgtgtctttataattctttgatgaaccagatgcatttcattaaccaaatccatatacatataaatattaatcatatataattaatatcaattgggttagcaaaacaaatctagtctaggtgtgttttgcgatccgatatcacgtaagcgcttacgacgtaagcgcttacgcacgtgcagcgtgacccggtcgtgcccctctctagagataatgagcattgcatgtctaagttataaaaaattaccacatattttttttgtcacacttgtttgaagtgcagtttatctatctttatacatatatttaaactttactctacgaataatataatctatagtactacaataatatcagtgttttagagaatcatataaatgaacagttagacatggtctaaaggacaattgagtattttgacaacaggactctacagttttatctttttagtgtgcatgtgttctcctttttttttgcaaatagcttcacctatataatacttcatccattttattagtacatccatttagggtttagggttaatggtttttatagactaatttttttagtacatctattttattctattttagcctctaaattaagaaaactaaaactctattttagtttttttatttaataatttagatataaaatagaataaaataaagtgactaaaaattaaacaaataccctttaagaaattaaaaaaactaaggaaacatttttcttgtttcgagtagataatgccagcctgttaaacgccgtcgacgagtctaacggacaccaaccagcgaaccagcagcgtcgcgtcgggccaagcgaagcagacggcacggcatctctgtcgctgcctctggacccctctcgagagttccgctccaccgttggacttgctccgctgtcggcatccagaaattgcgtggcggagcggcagacgtgagccggcacggcaggcggcctcctcctcctctcacggcaccggcagctacgggggattcctttcccaccgctccttcgctttcccttcctcgcccgccgtaataaatagacaccccctccacaccctctttccccaacctcgtgttgttcggagcgcacacacacacaaccagatctcccccaaatccacccgtcggcacctccgcttcaaggtacgccgctcgtcctcccccccccccctctctaccttctctagatcggcgttccggtccatgcatggttagggcccggtagttctacttctgttcatgtttgtgttagatccgtgtttgtgttagatccgtgctgctagcgttcgtacacggatgcgacctgtacgtcagacacgttctgattgctaacttgccagtgtttctctttggggaatcctgggatggctctagccgttccgcagacgggatcgatttcatgattttttttgtttcgttgcatagggtttggtttgcccttttcctttatttcaatatatgccgtgcacttgtttgtcgggtcatcttttcatgcttttttttgtcttggttgtgatgatgtggtctggttgggcggtcgttctagatcggagtagaattctgtttcaaactacctggtggatttattaattttggatctgtatgtgtgtgccatacatattcatagttacgaattgaagatgatggatggaaatatcgatctaggataggtatacatgttgatgcgggttttactgatgcatatacagagatgctttttgttcgcttggttgtgatgatgtggtgtggttgggcggtcgttcattcgttctagatcggagtagaatactgtttcaaactacctggtgtatttattaattttggaactgtatgtgtgtgtcatacatcttcatagttacgagtttaagatggatggaaatatcgatctaggataggtatacatgttgatgtgggttttactgatgcatatacatgatggcatatgcagcatctattcatatgctctaaccttgagtacctatctattataataaacaagtatgttttataattattttgatcttgatatacttggatgatggcatatgcagcagctatatgtggatttttttagccctgccttcatacgctatttatttgcttggtactgtttcttttgtcgatgctcaccctgttgtttggtgttacttctgcagataacttcgtatagcatacattatacgaagttatacgtaagcgcttacgacgtaagcgcttacgccggctttaattcgtaacgagcagtttataccgttttgcgctgcattcaccttcgtgagtccggaccccggaagacaggaactgtagcctttttccctttgctagcatgaatatgaatagaataacacgaatttaacatcaattcagctcatattggaacaatctacgcctaaaatttagtggaacacgttttgctcattttccttgaaaagcaacagtgaagcaacatcggtaaaggttcttttggttgcctctaacggtctaacctgaggattcagttataatctggaacatgacagaaacagagcctcgcacccgttttgggaccaaaaccacatgatcgatctccaagaagattattttggacaatatttttccagccacaggcaatccgaagaccacaaatcagaggcactccaaatgcagcccatccattggaccatacagataagacccggataaggcaggatccatggcggccaatgcgggcggcggtggagcgggaggaggcagcggcagcggcagcgtggctgcgccggcggtgtgccgccccagcggctcgcggtggacgccgacgccggagcagatcaggatgctgaaggagctctactacggctgcggcatccggtcgcccagctcggagcagatccagcgcatcaccgccatgctgcggcagcacggcaagatcgagggcaagaacgtcttctactggttccagaaccacaaggcccgcgagcgccagaagcgccgcctcaccagcctcgacgtcaacgtgcccgccgccggcgcggccgacgccaccaccagccaactcggcgtcctctcgctgtcgtcgccgccgccttcaggcgcggcgcctccctcgcccaccctcggcttctacgccgccggcaatggcggcggatcggctgtgctgctggacacgagttccgactggggcagcagcggcgctgctatggccaccgagacatgcttcctgcaggactacatgggcgtgacggacacgggcagctcgtcgcagtggccacgcttctcgtcgtcggacacgataatggcggcggccgcggcgcgggcggcgacgacgcgggcgcccgagacgctccctctcttcccgacctgcggcgacgacggcggcagcggtagcagcagctacttgccgttctggggtgccgcgtccacaactgccggcgccacttcttccgttgcgatccaacagcaacaccagctgcaggagcagtacagcttttacagcaacagcaacagcacccagctggccggcaccggcaaccaagacgtatcggcaacagcagcagcagccgccgccctggagctgagcctcagctcatggtgctccccttaccctgctgcagggagtatgtgagatctgacaaagcagcattagtccgttgatcggtggaagaccactcgtcagtgttgagttgaatgtttgatcaataaaatacggcaatgctgtaagggttgttttttatgccattgataatacactgtactgttcagttgttgaactctatttcttagccatgccaagtgcttttcttattttgaataacattacagcaaaaagttgaaagacaaaaaaaaaaacccccgaacagagtgctttgggtcccaacgttctttagactgtgttcggcgttccccctaaatttctccccctatatctcactcacttgtcacatcagcgttctctttccccctatatctccacgctctacagcagttccacctatatcaaacctctataccccaccacaacaatattatatactttcatcttcaactaactcatgtaccttccaatttttttctactaataattatttacgtgcacagaaacttaggcaagggagagagagagctctagatgctcggcgttaggcttttagtccgctaggtggctagaccgaggttaggacgctagttcactaggggcctagtggtgttttaagtgcgcataacttcgtatagcatacattatacgaagttataggatccatggactccagcagcttcctccctgccgccggcgcggagaatggctcggcggcgggcggcgccaacaatggcggcgctgctcagcagcatgcggcgccggcgatccgcgagcaggaccggctgatgccgatcgcgaacgtgatccgcatcatgcggcgcgtgctgccggcgcacgccaagattagcgacgacgccaaggagacgatccaggagtgcgtgtcggagtacatcagcttcatcacgggggaggccaacgagcggtgccagcgggagcagcgcaagaccatcaccgccgaggacgtgctgtgggccatgagccgcctcggcttcgacgactacgtcgagccgctcggcgcctacctccaccgctaccgcgagttcgagggcgacgcgcgcggcgtcgggctcgtccctggggccgccccatcgcgcggcggcgaccaccacccgcactccatgtcgccagcggcgatgctcaagtcccgcgggccagtctccggagccgccatgctaccgcaccaccaccaccaccacgacatgcagatgcacgccgccatgtacgggggaacggccgtgcccccgccggccgggcctcctcaccacggcgggttcctcatgccacacccacagggtagtagccactacctgccttacgcgtacgagcccacgtacggcggtgagcacgcgatggctgcatactatggaggcgccgcgtacgcgcccggcaacggcgggagcggcgacggcagtggcagtggcggcggtggcgggagcgcgtcgcacacaccgcagggcagcggcggcttggagcacccgcacccgttcgcgtacaagtagtggtacctgacatcttatagtctgcaacctctcgtgtctgaattcctatctttatcaagtgttattgcttccacgactataggacagctttcgtcgaaagcttttgctcatgtgatctcgaaggattcatctagtctgatttttcgtgacttgtatcggttttattggattcatccaacatatatcaataaaaaatgagttgtgtttcctttcttcctagttcagttaaaattatttccctcctgcgcttgtgctgtaattgtctgtgtacctgttgtttgtgactgtgttagttcccttggatatgatttcgtatttgatatgtacatggagatagcttagcttcattattggagtatgaagttagtatgacatagtcactctcctggaaaattgacactgcaaaccatatttttattctgaaccacaaatcctagtcagtccgctggcatatgccgtccgtttgctgaatccagaacgtgggtttggagatgtacggctgagatgcctctatgcgaaggggatttcgtggtgaaacgagatgggagtagagcaacgcccgtggaagatgcttcaaacttccacacttttgagcaacgatcggcagtagtaaggtagacgatttcaagatcaaagcatatgaagataaacaacatcaacaacaaaatttgttggggttctatagagagaaacagagctacatacatacactgttttgtatctaccatctgagatgatgaaaagatgaaaaactaaagaatgccccggcgccaacgccaggacacgccgcgcgcgcgtcacccgagccatctcttgacccagccggcgctgtatatttacacacgttgcagcatcgatcaccacctgttcgatcgcgtcgccgtcacccgtacgcgtattaagacccgtcgtcaagtaggaattccagaaatcaacgcacggtaactaaatcctcgcgctaagctgggtcagcggaccgcggaccgggttaccgaattcctgcccttaaggccaattgttcaagattcattcaacaattgaaacatctcccatgattaaatcagtataaggttgctatggtcttgcttgacaaagtttttttttgagggaatttcaactaaatttttgagtgaaactatcaaatactgattttaaaaaatttttataaaaggaagcgcagagataaaaggccatctatgctacaaaagtacccaaaaatgtaatcctaaagtatgaattgcattttttttttgtttggacgaaaggaaaggagtattaccacaagaatgatatcatcttcatatttagatcttttttgggtaaagcttgagattctctaaatatagagaaatcagaagaaaaaaaaaccgtgttttggtggttttgatttctagcctccacaataactttgacggcgtcgacaagtctaacggacaccaagcagcgaaccaccagcgccgagccaagcgaagcagacggccgagacgttgacaccttcggcgcggcatctctcgagagttccgctccggcgctccacctccaccgctggcggtttcttattccgttccgttccgcctcctgctctgctcctctccacaccacacggcacgaaaccgttacggcaccggcagcacccagcacgggagaggggattcctttcccaccgttccttccctttccgccccgccgctataaatagccagccccatccccagcttttttccccaatctcatctcctctctcctgttgttcggagcacacgcacaatccgatcgatccccaaatccccttcgtctctcctcgcgagcctcgtggatcccagcttcaaggtacggcgatcgatcatcccccctccttctctctaccttcttttctctagactacatcggatggcgatccatggttagggcctgctagtttcccttcctgttttgtcgatggctgcgaggcacaatagatctgatggcgttatgacggctaacttgtcatgttgttgcgatttatagtccctttaggagatcagtttaatttctcggatggttcgagatcggtggtccatggttagtaccctaagatccgcgctgttagggttcgtagatggaggcgacctgttctgattgttaacttgtcagtacctgggaaatcctgggatggttctagctcgtccgcagatgagatcgatttcatgatcctctgtatcttgtttcgttgcctaggttccgtctaatctatccgtggtatgatgtagatgttttgatcgtgctaactacgtcttgtaaagttaattgtcaggtcataatttttagcatgcctttttttttgtttggttttgtctaattgggctgtcgttctagatcagagtagaagactgttccaaactacctgctggatttattgaacttggatctgtatgtgtgtcacatatcttcataaattcatgattaagatggattgaaatatcttttatctttttggtatggatagttctatatgttggtgtggctttgttagatgtatacatgcttagatacatgaagcaacgtgctgctactgtttagtaattgctgttcatttgtctaataaacagataaggatatgtatttatgttgctgttggttttgctggtactttgttggatacaaatgcttcaatacagaaaacagcatgctgctacgatttaccatttatctaatcttatcatatgtctaatctaataaacaaacatgcttttaaattatcttcatatgcttggatgatggcatacacagcggctatgtgtggttttttaaatacccagcatcatgggcatgcatgacactgctttaatatgctttttatttgcttgagactgtttcttttgtttatactgaccctttagttcggtgactcttctgcaggtcgactttaacttagcctaggatccatggcccagtccaagcacggcctgaccaaggagatgaccatgaagtaccgcatggagggctgcgtggacggccacaagttcgtgatcaccggcgagggcatcggctaccccttcaagggcaagcaggccatcaacctgtgcgtggtggagggcggccccttgcccttcgccgaggacatcttgtccgccgccttcatgtacggcaaccgcgtgttcaccgagtacccccaggacatcgtcgactacttcaagaactcctgccccgccggctacacctgggaccgctccttcctgttcgaggacggcgccgtgtgcatctgcaacgccgacatcaccgtgagcgtggaggagaactgcatgtaccacgagtccaagttctacggcgtgaacttccccgccgacggccccgtgatgaagaagatgaccgacaactgggagccctcctgcgagaagatcatccccgtgcccaagcagggcatcttgaagggcgacgtgagcatgtacctgctgctgaaggacggtggccgcttgcgctgccagttcgacaccgtgtacaaggccaagtccgtgccccgcaagatgcccgactggcacttcatccagcacaagctgacccgcgaggaccgcagcgacgccaagaaccagaagtggcacctgaccgagcacgccatcgcctccggctccgccttgccctccggactcagatctcgatagggtaccaatggccagttaacagatccagctgctgctgttctagggttcacaagtctgcctatttgtcttccccaatggagctatggttgtctggtctggtccttggtcgtgtcccgtttcattgtgtactatttacctgtaatgtgtatccttaagtctggtttgatggtgtctgaaacgttttgctgtggtagagcagcatggaagaactataatgaataagtgatccctaatcattgtgtccaaattttgcttctgctatacccttttgtgctgtttcttatgttttgcttaaaaatttgatctgacaaacaaatttgtctaaattatgctcttgttctgactgtgtactgtacacatttgtattgctaccggtttggcacatagttttctctttgattgcagatcaaacccttctgattgcagattgcttggctatggctgatgtgctcactgttcttctttagcttgtatattgctgatggtggcttggctacggctgaaaaagttgctgctgcgccgacttggcaactgttgctccagtaatgctttgtcctctcttcctagccgccgacttggcacttggcagctgttgctcctgtaatgcgttgttatctcttatctcttgagatgtactatgattttgaggctgtttgacttgtgccagattgccagtgctgatgctatattatctcaggtttttatgctagtatatgttttactgtgtgctgcctgtgtcgagttacgtaatctattgaaccgctatgcgtgttgatgccctgttgttgcttgccagattgatgcccctgttgcttgcagcttgcaagctgtagtgaaatcctaaaattcgaaaccaaatctattctgaacttttgaagatctgtgatgtccggaagaaaagattcaaacagataaacgggactctccagaatctataaaataaatgatcgacaaacgctttgctttggtaggcttcctagttagttagcggaccgggatccgacggcgtcttcaccgccccgccgccgcccgagccggacttgtcgctgccgccgccgctgctcatcttgcgcgcttgtgtccctccctcagtccctgcgttcgcggatcgcgggcgggtgcgacccgtttggactccggccggtagccttcgtgccgacctcgctcggtccaccggtttgtcggggacccacatgtcagtgaaggtacgcgtccacgtccacagaccctactaccccagacgagtccaaatcgctgttccctcacactctcgtgtaccagcgcgcggcggaaagcacctttccaacaaccgccgacacgtcggtcccacgtcggcatgctccaccggtcagtgtttggcgtgtacggctcccggcgacgaacgagtgtggcctaagctttcctactcccatcccatctgagccacacatctctctcacgccacgcgcacaaaacagccaggctcccacgcgcatcaaccggctctccctttccgtgccactcgcccccaagccccaaaccctcgccgccgcctccgagacagccgccgccacctaggccatggccaccgccgccgccgcgtctaccgcgctcactggcgccactaccgctgcgcccaaggcgaggcgccgggcgcacctcctggccacccgccgcgccctcgccgcgcccatcaggtgctcagcggcgtcacccgccatgccgatggctcccccggccaccccgctccggccgtggggccccaccgagccccgcaagggtgctgacatcctcgtcgagtccctcgagcgctgcggcgtccgcgacgtcttcgcctaccccggcggcgcgtcgatggagatccaccaggcactcacccgctcccccgtcatcgccaaccacctcttccgccacgagcaaggggaggcctttgccgcctccggctacgcgcgctcctcgggccgcgtcggcgtctgcatcgccacctccggccccggcgccaccaacctagtctccgcgctcgccgacgcgctgctcgattccgtcccgatggtcgccatcacgggacaggtggcgcgacgcatgattggcaccgacgccttccaggagacgcccatcgtcgaggtcacgcgctccatcaccaagcacaactacctggtcctcgacgtcgacgacatcccccgcgtcgtgcaggaggctttcttcctcgcctcctctggtcgaccagggccggtgcttgtcgacatccccaaggacatccagcagcagatggcggtgcctgtctgggacaagcccatgagtctgcctgggtacattgcgcgccttcccaagccccctgcgactgagttgcttgagcaggtgctgcgtcttgttggtgaatcgcggcgccctgttctttatgtgggcggtggctgcgcagcatctggtgaggagttgcgacgctttgtggagctgactggaatcccggtcacaactactcttatgggcctcggcaacttccccagcgacgacccactgtctctgcgcatgctaggtatgcatgggacggtgtatgcaaattatgcagtggataaggccgatctgttgcttgcacttggtgtgcggtttgatgatcgcgtgacagggaagattgaggcttttgcaagcagggctaagattgtgcacgttgatattgatccggctgagattggcaagaacaagcagccacatgtgtccatctgtgcagatgttaagcttgctttgcagggcatgaatgctcttcttgaaggaagcacatcaaagaagagctttgactttggctcatggaacgatgagttggatcagcagaagagggaattcccccttgggtataaaacatctaatgaggagatccagccacaatatgctattcaggttcttgatgagctgacgaaaggcgaggccatcatcggcacaggtgttgggcagcaccagatgtgggcggcacagtactacacttacaagcggccaaggcagtggttgtcttcagctggtcttggggctatgggatttggtttgccggctgctgctggtgcttctgtggcaaacccaggtgtcactgttgttgacatcgatggagatggtagctttctcatgaacgttcaggagctagctatgatccgaattgagaacctcccagtgaaggtctttgtgctaaacaaccagcacctggggatggtggtgcagttggaggacaggttctataaggccaacagagcgcacacatacttgggaaacccagagaatgaaagtgagatatatccagatttcgtgacgatcgccaaagggttcaacattccagccgtccgtgtgacaaagaagaacgaagtccgcgcagcgataaagaagatgctcgagactccagggccgtacctcttggatataatcgtcccacaccaggagcatgtgttgcctatgatccctagtggtggggctttcaaggatatgatcctggatggtgatggcaggactgtgtactgacttcgaataggtacccggggatcctctagtgccgtgggtcgtttaagctgccgctgtacctgtgtcgtctggtgccttctggtgtacctgggaggttgtcgtctatcaagtatctgtggttggtgtcatgagtcagtgagtcccaatactgttcgtgtcctgtgtgcattatacccaaaactgttatgggcaaatcatgaataagcttgatgttcgaacttaaaagtctctgctcaatatggtattatggttgtttttgttcgtctcctaatatttgcctgggatcaaattttattggctggtgttcatttgacctccatgttcttgctaggctccattttttactctacagccataatatgtttgattgtttggtttgttctttgttgtacacctggttctgtcgagcttagttttcgacactggcttacagcttaacatgttgctattttattgggttctgattgctattttattgggttctgattgctagtttttgctgaatccaaaaaccatgttatttatttaagcgatccaggttattattatgatggtggctaagtttttttttttccaagggtaaattttctggattctccagtgtttctgtggccgaattcaatcactagagtcgacctgcaaagcttcggtccgggcctagaaggcccgcgccacttacgcttgattccgatgacttcgtaggttcctagctcaagccgctcgtgtccaagcgtcacttacgattagctaatgattacggcatctaggaccgactagctagctagctaagagctcggtaccgagctcgaattcattccgattaatcgtggcctcttgctcttcaggatgaagagctatgtttaaacgtgcaagcgctactagacaattcagtacattaaaaacgtccgcaatgtgttattaagttgtctaagcgtcaatttgtttacaccacaatatatcctgcca

SEQ ID NO: 22 - DNA, 21105 bp, Artificial sequence
  PHP93738
gtttacccgccaatatatcctgtcaaacactgcggccgcacttgaccgcggatggagccggagctgtggtgaggccatcgacgggaggtgggggagaacacagtctcagtgttctttgtgagtccgcaaggtttttagcttttctgtattaattaaggttgctgttggctgtagaatacggtcgtggaagagctgtatcggtagctactacgtaagctattatatactggaagtctggagctcgtcgatctccggtcgtcttcctccatttctcctcgtcttgctttgactgctgctaccatttgcttctgttttctgatgaagcatgccatgtcggccaccagtgtttgtgtggtttttgcagggaatggctttcaagtgctgtgattgaatggccctcgtcgtcctcggctgagctcacatggacgcgtcatgtgagtgagatatatgatcatatgatgagtggggttcgggtgagtgcgtacttgaagtaggatcccgctttcactcattcattcattggcctttaaaccgggaaattttcgcgaggagatggagggaagcaagcagggtgacgagtgcagagtgccgcgagcgctttgtcaaaaggcaccgccgtaggcaaaaaaatcaatggccctgactgactcgatggtagtactactgtagagactagagagggttgctccccatatcttcgtgtgacttttactccagcattgcatttccgtcattgagacgttaattaatagcagctttcgggacagatgactgtggccatgtttcgtcacggccgcttcgtgccagctgggggtactatagtactgtgattttgttagtaaaaactttcattaggccaccattgacgaccgggccttcgcttttgctgcgctaattaaccatttcccggcgaccgaagggaacatgaacatgccccgacacatgagggcatgaggactagtgttctccctgtcgttcgttgacttgactagtgatagtttaaacgctcttcaactggaagagcggttactaccggttcactagctagctgctaatcgagctagttaccctatgaggtgacatgaagcgctcacggttactatgacggttagcttcacgactgttggtggcagtagcgtacgacttagctatagttccggacttacctagctaataacttcgtatagcatacattatacgaagttatggttaccgaattcgagctcggtaccctggttcacaaactcaatacaacacacagtggagtagggtattacgctccggcggcccgaaccactctaaatccttgtgtcctcgtgtgctcttccaccattaatgactgtaattgcagggacacgaagagttgtagcgcttttgccaacaagatccgctatatgctagtagagtggaacctgcacagcaacaagcatccaataatctgagaataagaattatgtgtggtgatggttctcatctctgcaactcgccattttcgcgagagaaccaaatccaagttggtgaagatcatgatttgggctcatgggctggcatagtagctattacctttgcaattgtggttcgaatctatccgatattctccttttcagggagagctaatgcttatgcttattgggtattttggtttgacactgcttcacgcccaaaaaaaggcaactatgtctgagttggatatggcccaaaaaaaggcagctatgtctgagttggatatggaagtcttctttcgtttagggtgaagtaagaccaagctcatgagcttattatcttaggtcggaacaaattagttgataggcatggcacatttatcaaattataatgattttaacagaaaagcaacacctctttttcagcagcaccagctttgcaagctgcaattgacactccaagcatagtatttgctccaaactcagcctgcatttcgcacaatatcatatctatttccatttggataaaatatattttccagaaatatgggaacagaatcaagatacagaaaaaagttgtggtagtagtggtaagtggaaacacaagtacagtgaaaagatagcattatttctgaacagtcaaattaaccgaaataagtagtatcacatactgcccctaaattgactacacccaatgtaaagaattgcttgagcatattgagccatcagttgtttgtttgtgtaacggatttgacaatgcagagttcaggagcaaaaaaccgcaaaggagagaaagagggaaaggatctcctagtatcccaccttgtggcgcgccctgtcaagtgcatgatggcctggtcgatctgcgtctgctgctgcggttccatcccaacgagtgcctccgacaccttgtcgttgatcacccgcaccgcgtaggcgacccccctggcgaggaacttccgcctctcggaggccccggccgcgtcggcggcggcgccctcgagcgcgcccacgctagccgtagatgctcggtgcacggccttgttggtgtgcaactcgacctcaacggccggtgcgctacgcccgtcaaggatctggcgcgcccgcaccctcgtgatcacggtgggcgcctcccgcctcatgtggccgacgatgaaaagcgccgggttaggggccttggcgcgcaccgccgtattcagggcctcctcgctcttgcgcgagagcaggtgcttccccaggtactcctgcactgacaaggctgccacagcggtggaatttgtcctcacgacttcgccacgtcgtcctcacctccctggcttcccacgactccgccgtatcgaggtgctcggtgggtcgtcttaatccgaagtccgaactaggaagacgagacagagaggtctgaggaatgggcctcgtttgatgttgagctgaattatttttccagcataagcccaggtcttggtccatgaacaaaattactagaaacccagcccagtactacgatctaaaagagggactgccactggatagctctctctagcattctccacgctccaatacagcggcgtcgtgtctatccgggtctatccgcgaacacgtgagaactctccagaaactgctttctcctccacttcatctctctcgctttccctctataaaaagaccccttctaggaattgagggagacagcaagcaccaagcagcgatccgaagctcaatcaattcactcaaacctcttccccaaatcttcgattagatcttcgttgacaagaagactagaaccgaacctgacatgtccaacctgctcacggttcaccagaaccttccggctcttccagtggacgcgacgtccgatgaagtcaggaagaacctcatggacatgttccgcgacaggcaagcgttcagcgagcacacctggaagatgctgctctccgtctgccgctcctgggctgcatggtgcaagctgaacaacaggaagtggttccccgctgagcccgaggacgtgagggattaccttctgtacctgcaagcgcgaggtttgtttctgcttctacctttgatatatatataataattatcattaattagtagtaatataatatttcaaatatttttttcaaaataaaagaatgtagtatatagcaattgcttttctgtagtttataagtgtgtatattttaatttataacttttctaatatatgaccaaaacatggtgatgcctaggtctggcagtgaagaccatccagcaacaccttggacaactgaacatgcttcacaggcgctccggcctcccgcgccccagcgactcgaacgccgtgagcctcgtcatgcgccgcatcaggaaggaaaacgtcgatgccggcgaaagggcaaagcaggccctcgcgttcgagaggaccgatttcgaccaggtccgcagcctgatggagaacagcgacaggtgccaggacattaggaacctggcgttcctcggaattgcatacaacacgctcctcaggatcgcggaaattgcccgcattcgcgtgaaggacattagccgcaccgacggcggcaggatgcttatccacattggcaggaccaagacgctcgtttccaccgcaggcgtcgaaaaggccctcagcctcggagtgaccaagctcgtcgaacgctggatctccgtgtccggcgtcgcggacgacccaaacaactacctcttctgccgcgtccgcaagaacggggtggctgcccctagcgccaccagccaactcagcacgagggccttggaaggtattttcgaggccacccaccgcctgatctacggcgcgaaggatgacagcggtcaacgctacctcgcatggtccgggcactccgcccgcgttggagctgctagggacatggcccgcgccggtgtttccatccccgaaatcatgcaggcgggtggatggacgaacgtgaacattgtcatgaactacattcgcaaccttgacagcgagacgggcgcaatggttcgcctcctggaagatggtgactgagctagacccagctttcttgtacaaagtggccgttaacggatgcagacttgtccatcttctggattggccaacttaattaatgtatgaaataaaaggatgcacacatagtgacatgctaatcactataatgtgggcatcaaagttgtgtgttatgtgtaattactagttatctgaataaaagagaaagagatcatccatatttcttatcctaaatgaatgtcacgtgtctttataattctttgatgaaccagatgcatttcattaaccaaatccatatacatataaatattaatcatatataattaatatcaattgggttagcaaaacaaatctagtctaggtgtgttttgcgaattgcggcaaggttgcgcccgccccagcttggtcagccgctccgggcttagaaggccgatctcgcgggcacccagctttcttctacaaagtggccgtttacggatcggctagaatgtcccgcaccggcttaccgatttgcacctcgctaccctgggttcgaccgaagctgaccgatgcttgcgcccgctcgcgaggccggccaagcttgatatcgaattcctgcagcccatccctcagccgcctttcactatcttttttgcccgagtcattgtcatgtgaaccttggcatgtataatcggtgaattgcgtcgattttcctcttataggtgggccaatgaatccgtgtgatcgcgtctgattggctagagatatgtttcttccttgttggatgtattttcatacataatcatatgcatacaaatatttcattacactttatagaaatggtcagtaataaaccctatcactatgtctggtgtttcattttatttgcttttaaacgaaaattgacttcctgattcaatatttaaggatcgtcaacggtgtgcagttactaaattctggtttgtaggaactatagtaaactattcaagtcttcacttattgtgcactcacctctcgccacatcaccacagatgttattcacgtcttaaatttgaactacacatcatattgacacaatattttttttaaataagcgattaaaacctagcctctatgtcaacaatggtgtacataaccagcgaagtttagggagtaaaaaacatcgccttacacaaagttcgctttaaaaaataaagagtaaattttactttggaccacccttcaaccaatgtttcactttagaacgagtaattttattattgtcactttggaccaccctcaaatcttttttccatctacatccaatttatcatgtcaaagaaatggtctacatacagctaaggagatttatcgacgaatagtagctagcatactcgaggtcattcatatgcttgagaagagagtcgggatagtccaaaataaaacaaaggtaagattacctggtcaaaagtgaaaacatcagttaaaaggtggtataaagtaaaatatcggtaataaaaggtggcccaaagtgaaatttactcttttctactattataaaaattgaggatgtttttgtcggtactttgatacgtcatttttgtatgaattggtttttaagtttattcgcttttggaaatgcatatctgtatttgagtcgggttttaagttcgtttgcttttgtaaatacagagggatttgtataagaaatatctttaaaaaaacccatatgctaatttgacataatttttgagaaaaatatatattcaggcgaattctcacaatgaacaataataagattaaaatagctttcccccgttgcagcgcatgggtattttttctagtaaaaataaaagataaacttagactcaaaacatttacaaaaacaacccctaaagttcctaaagcccaaagtgctatccacgatccatagcaagcccagcccaacccaacccaacccaacccaccccagtccagccaactggacaatagtctccacacccccccactatcaccgtgagttgtccgcacgcaccgcacgtctcgcagccaaaaaaaaaaaaagaaagaaaaaaaagaaaaagaaaaaacagcaggtgggtccgggtcgtgggggccggaaacgcgaggaggatcgcgagccagcgacgaggccggccctccctccgcttccaaagaaacgccccccatcgccactatatacatacccccccctctcctcccatccccccaaccctaccaccaccaccaccaccacctccacctcctcccccctcgctgccggacgacgagctcctcccccctccccctccgccgccgccgcgccggtaaccaccccgcccctctcctctttctttctccgttttttttttccgtcacggtctcgatctttggccttggtagtttgggtgggcgagaggcggcttcgtgcgcgcccagatcggtgcgcgggaggggcgggatctcgcggctggggctctcgccggcgtggatcaggcccggatctcgcggggaatggggctctcggatgtagatctgcgatccgccgttgttgggggagatgatggggggtttaaaatttccgccatgctaaacaagatcaggaagaggggaaaagggcactatggtttatatttttatatatttctgctgcttcgtcaggcttagatgtgctagatctttctttcttctttttgtgggtagaatttgaatccctcagcattgttcatcggtagtttttcttttcatgatttgtgacaaatgcagcctcgtgcggagcttttttgtaggtagaaggatccgcccatggcggccaatgcgggcggcggtggagcgggaggaggcagcggcagcggcagcgtggctgcgccggcggtgtgccgccccagcggctcgcggtggacgccgacgccggagcagatcaggatgctgaaggagctctactacggctgcggcatccggtcgcccagctcggagcagatccagcgcatcaccgccatgctgcggcagcacggcaagatcgagggcaagaacgtcttctactggttccagaaccacaaggcccgcgagcgccagaagcgccgcctcaccagcctcgacgtcaacgtgcccgccgccggcgcggccgacgccaccaccagccaactcggcgtcctctcgctgtcgtcgccgccgccttcaggcgcggcgcctccctcgcccaccctcggcttctacgccgccggcaatggcggcggatcggctgtgctgctggacacgagttccgactggggcagcagcggcgctgctatggccaccgagacatgcttcctgcaggactacatgggcgtgacggacacgggcagctcgtcgcagtggccacgcttctcgtcgtcggacacgataatggcggcggccgcggcgcgggcggcgacgacgcgggcgcccgagacgctccctctcttcccgacctgcggcgacgacggcggcagcggtagcagcagctacttgccgttctggggtgccgcgtccacaactgccggcgccacttcttccgttgcgatccaacagcaacaccagctgcaggagcagtacagcttttacagcaacagcaacagcacccagctggccggcaccggcaaccaagacgtatcggcaacagcagcagcagccgccgccctggagctgagcctcagctcatggtgctccccttaccctgctgcagggagtatgtgagagcaacgcgagctgccactgctcttcactgatgtctctggaatggaaggaggaggaagtgagaacagatcattcgacaaagcagcattagtccgttgatcggtggaagaccactcgtcagtgttgagttgaatgtttgatcaataaaatacggcaatgctgtaagggttgttttttatgccattgataatacactgtactgttcagttgttgaactctatttcttagccatgccaagtgcttttcttattttgaataacattacagcaaaaagttgaaagacaaaaaaaaaaacccccgaacagagtgctttgggtcccaagcttctttagactgtgttcggcgttccccctaaatttctccccctatatctcactcacttgtcacatcagcgttctctttccccctatatctccacgctctacagcagttccacctatatcaaacctctataccccaccacaacaatattatatactttcatcttcaactaactcatgtaccttccaatttttttctactaataattatttacgtgcacagaaacttagcaaggagagagagagcgggaatttaaatgctcggcgttaggcttttagtccgctaggtggctagaccgaggttaggacgctagttcactaggggcctagtggtgttttaagacgtcacggtcaccacgcgtggaccgaagcttgcatgcctgcagtgcagcgtgacccggtcgtgcccctctctagagataatgagcattgcatgtctaagttataaaaaattaccacatattttttttgtcacacttgtttgaagtgcagtttatctatctttatacatatatttaaactttactctacgaataatataatctatagtactacaataatatcagtgttttagagaatcatataaatgaacagttagacatggtctaaaggacaattgagtattttgacaacaggactctacagttttatctttttagtgtgcatgtgttctcctttttttttgcaaatagcttcacctatataatacttcatccattttattagtacatccatttagggtttagggttaatggtttttatagactaatttttttagtacatctattttattctattttagcctctaaattaagaaaactaaaactctattttagtttttttatttaataatttagatataaaatagaataaaataaagtgactaaaaattaaacaaataccctttaagaaattaaaaaaactaaggaaacatttttcttgtttcgagtagataatgccagcctgttaaacgccgtcgacgagtctaacggacaccaaccagcgaaccagcagcgtcgcgtcgggccaagcgaagcagacggcacggcatctctgtcgctgcctctggacccctctcgagagttccgctccaccgttggacttgctccgctgtcggcatccagaaattgcgtggcggagcggcagacgtgagccggcacggcaggcggcctcctcctcctctcacggcaccggcagctacgggggattcctttcccaccgctccttcgctttcccttcctcgcccgccgtaataaatagacaccccctccacaccctctttccccaacctcgtgttgttcggagcgcacacacacacaaccagatctcccccaaatccacccgtcggcacctccgcttcaaggtacgccgctcgtcctcccccccccccctctctaccttctctagatcggcgttccggtccatgcatggttagggcccggtagttctacttctgttcatgtttgtgttagatccgtgtttgtgttagatccgtgctgctagcgttcgtacacggatgcgacctgtacgtcagacacgttctgattgctaacttgccagtgtttctctttggggaatcctgggatggctctagccgttccgcagacgggatcgatttcatgattttttttgtttcgttgcatagggtttggtttgcccttttcctttatttcaatatatgccgtgcacttgtttgtcgggtcatcttttcatgcttttttttgtcttggttgtgatgatgtggtctggttgggcggtcgttctagatcggagtagaattctgtttcaaactacctggtggatttattaattttggatctgtatgtgtgtgccatacatattcatagttacgaattgaagatgatggatggaaatatcgatctaggataggtatacatgttgatgcgggttttactgatgcatatacagagatgctttttgttcgcttggttgtgatgatgtggtgtggttgggcggtcgttcattcgttctagatcggagtagaatactgtttcaaactacctggtgtatttattaattttggaactgtatgtgtgtgtcatacatcttcatagttacgagtttaagatggatggaaatatcgatctaggataggtatacatgttgatgtgggttttactgatgcatatacatgatggcatatgcagcatctattcatatgctctaaccttgagtacctatctattataataaacaagtatgttttataattattttgatcttgatatacttggatgatggcatatgcagcagctatatgtggatttttttagcactgccttcatacgctatttatttgcttggtactgtttcttttgtcgatgctcaccctgttgtttggtgttacttctgcaggtcgactttaacttagcctaggatccatggccactgtgaacaactggctcgctttctccctctccccgcaggagctgccgccctcccagacgacggactccacactcatctcggccgccaccgccgaccatgtctccggcgatgtctgcttcaacatcccccaagattggagcatgaggggatcagagctttcggcgctcgtcgcggagccgaagctggaggacttcctcggcggcatctccttctccgagcagcatcacaaggccaactgcaacatgatacccagcactagcagcacagtttgctacgcgagctcaggtgctagcaccggctaccatcaccagctgtaccaccagcccaccagctcagcgctccacttcgcggactccgtaatggtggcttcctcggccggtgtccacgacggcggtgccatgctcagcgcggccgccgctaacggtgtcgctggcgctgccagtgccaacggcggcggcatcgggctgtccatgattaagaactggctgcggagccaaccggcgcccatgcagccgagggtggcggcggctgagggcgcgcaggggctctctttgtccatgaacatggcggggacgacccaaggcgctgctggcatgccacttctcgctggagagcgcgcacgggcgcccgagagtgtatcgacgtcagcacagggtggagccgtcgtcgtcacggcgccgaaggaggatagcggtggcagcggtgttgccggcgctctagtagccgtgagcacggacacgggtggcagcggcggcgcgtcggctgacaacacggcaaggaagacggtggacacgttcgggcagcgcacgtcgatttaccgtggcgtgacaaggcatagatggactgggagatatgaggcacatctttgggataacagttgcagaagggaagggcaaactcgtaagggtcgtcaagtctatttaggtggctatgataaagaggagaaagctgctagggcttatgatcttgctgctctgaagtactggggtgccacaacaacaacaaattttccagtgagtaactacgaaaaggagctcgaggacatgaagcacatgacaaggcaggagtttgtagcgtctctgagaaggaagagcagtggtttctccagaggtgcatccatttacaggggagtgactaggcatcaccaacatggaagatggcaagcacggattggacgagttgcagggaacaaggatctttacttgggcaccttcagcacccaggaggaggcagcggaggcgtacgacatcgcggcgatcaagttccgcggcctcaacgccgtcaccaacttcgacatgagccgctacgacgtgaagagcatcctggacagcagcgccctccccatcggcagcgccgccaagcgcctcaaggaggccgaggccgcagcgtccgcgcagcaccaccacgccggcgtggtgagctacgacgtcggccgcatcgcctcgcagctcggcgacggcggagccctggcggcggcgtacggcgcgcactaccacggcgccgcctggccgaccatcgcgttccagccgggcgccgccagcacaggcctgtaccacccgtacgcgcagcagccaatgcgcggcggcgggtggtgcaagcaggagcaggaccacgcggtgatcgcggccgcgcacagcctgcaggacctccaccacctgaacctgggcgcggccggcgcgcacgactttttctcggcagggcagcaggccgccgccgctgcgatgcacggcctgggtagcatcgacagtgcgtcgctcgagcacagcaccggctccaactccgtcgtctacaacggcggggtcggcgacagcaacggcgccagcgccgtcggcggcagtggcggtggctacatgatgccgatgagcgctgccggagcaaccactacatcggcaatggtgagccacgagcaggtgcatgcacgggcctacgacgaagccaagcaggctgctcagatggggtacgagagctacctggtgaacgcggagaacaatggtggcggaaggatgtctgcatgggggactgtcgtgtctgcagccgcggcggcagcagcaagcagcaacgacaacatggccgccgacgtcgggcatggcggcgcgcagctcttcagtgtctggaacgacacttaagcgtacctagtggtacctgacatcttatagtctgcaacctctcgtgtctgaattcctatctttatcaagtgttattgcttccacgactataggacagctttcgtcgaaagcttttgctcatgtgatctcgaaggattcatctagtctgatttttcgtgacttgtatcggttttattggattcatccaacatatatcaataaaaaatgagttgtgtttcctttcttcctagttcagttaaaattatttccctcctgcgcttgtgctgtaattgtctgtgtacctgttgtttgtgactgtgttagttcccttggatatgatttcgtatttgatatgtacatggagatagcttagcttcattattggagtatgaagttagtatgacatagtcactctcctggaaaattgacactgcaaaccatatttttattctgaaccacaaatcctagtcagtccgctggcatatgccgtccgtttgctgaatccagaacgtgggtttggagatgtacggctgagatgcctctatgcgaaggggatttcgtggtgaaacgagatgggagtagagcaacgcccgtggaagatgcttcaaacttccacacttttgagcaacgatcggcagtagtaaggtagacgatttcaagatcaaagcatatgaagataaacaacatcaacaacaaaatttgttggggttctatagagagaaacagagctacatacatacactgttttgtatctaccatctgagatgatgaaaagatgaaaaactaaagaatgccccggcgccaacgccaggacacgccgcgcgcgcgtcacccgagccatctcttgacccagccggcgctgtatatttacacacgttgcagcatcgatcaccacctgttcgatcgcgtcgccgtcaccggcgcgccgcgacttattgaactagtctagggcgcggctaacaacctagcttagattgccttgtctaaacccttaggctaacgcgccactctagacgtgcgcacgataacttcgtatagcatacattatacgaagttataacagcggaccgggttaccgaattcctgcccttaaggccaattgttcaagattcattcaacaattgaaacatctcccatgattaaatcagtataaggttgctatggtcttgcttgacaaagtttttttttgagggaatttcaactaaatttttgagtgaaactatcaaatactgattttaaaaaatttttataaaaggaagcgcagagataaaaggccatctatgctacaaaagtacccaaaaatgtaatcctaaagtatgaattgcattttttttttgtttggacgaaaggaaaggagtattaccacaagaatgatatcatcttcatatttagatcttttttgggtaaagcttgagattctctaaatatagagaaatcagaagaaaaaaaaaccgtgttttggtggttttgatttctagcctccacaataactttgacggcgtcgacaagtctaacggacaccaagcagcgaaccaccagcgccgagccaagcgaagcagacggccgagacgttgacaccttcggcgcggcatctctcgagagttccgctccggcgctccacctccaccgctggcggtttcttattccgttccgttccgcctcctgctctgctcctctccacaccacacggcacgaaaccgttacggcaccggcagcacccagcacgggagaggggattcctttcccaccgttccttccctttccgccccgccgctataaatagccagccccatccccagcttttttccccaatctcatctcctctctcctgttgttcggagcacacgcacaatccgatcgatccccaaatccccttcgtctctcctcgcgagcctcgtggatcccagcttcaaggtacggcgatcgatcatcccccctccttctctctaccttcttttctctagactacatcggatggcgatccatggttagggcctgctagtttcccttcctgttttgtcgatggctgcgaggcacaatagatctgatggcgttatgacggctaacttgtcatgttgttgcgatttatagtccctttaggagatcagtttaatttctcggatggttcgagatcggtggtccatggttagtaccctaagatccgcgctgttagggttcgtagatggaggcgacctgttctgattgttaacttgtcagtacctgggaaatcctgggatggttctagctcgtccgcagatgagatcgatttcatgatcctctgtatcttgtttcgttgcctaggttccgtctaatctatccgtggtatgatgtagatgttttgatcgtgctaactacgtcttgtaaagttaattgtcaggtcataatttttagcatgcctttttttttgtttggttttgtctaattgggctgtcgttctagatcagagtagaagactgttccaaactacctgctggatttattgaacttggatctgtatgtgtgtcacatatcttcataaattcatgattaagatggattgaaatatcttttatctttttggtatggatagttctatatgttggtgtggctttgttagatgtatacatgcttagatacatgaagcaacgtgctgctactgtttagtaattgctgttcatttgtctaataaacagataaggatatgtatttatgttgctgttggttttgctggtactttgttggatacaaatgcttcaatacagaaaacagcatgctgctacgatttaccatttatctaatcttatcatatgtctaatctaataaacaaacatgcttttaaattatcttcatatgcttggatgatggcatacacagcggctatgtgtggttttttaaatacccagcatcatgggcatgcatgacactgctttaatatgctttttatttgcttgagactgtttcttttgtttatactgaccctttagttcggtgactcttctgcaggtcgactttaacttagcctaggatccatggcccagtccaagcacggcctgaccaaggagatgaccatgaagtaccgcatggagggctgcgtggacggccacaagttcgtgatcaccggcgagggcatcggctaccccttcaagggcaagcaggccatcaacctgtgcgtggtggagggcggccccttgcccttcgccgaggacatcttgtccgccgccttcatgtacggcaaccgcgtgttcaccgagtacccccaggacatcgtcgactacttcaagaactcctgccccgccggctacacctgggaccgctccttcctgttcgaggacggcgccgtgtgcatctgcaacgccgacatcaccgtgagcgtggaggagaactgcatgtaccacgagtccaagttctacggcgtgaacttccccgccgacggccccgtgatgaagaagatgaccgacaactgggagccctcctgcgagaagatcatccccgtgcccaagcagggcatcttgaagggcgacgtgagcatgtacctgctgctgaaggacggtggccgcttgcgctgccagttcgacaccgtgtacaaggccaagtccgtgccccgcaagatgcccgactggcacttcatccagcacaagctgacccgcgaggaccgcagcgacgccaagaaccagaagtggcacctgaccgagcacgccatcgcctccggctccgccttgccctccggactcagatctcgatagggtaccaatggccagttaacagatccagctgctgctgttctagggttcacaagtctgcctatttgtcttccccaatggagctatggttgtctggtctggtccttggtcgtgtcccgtttcattgtgtactatttacctgtaatgtgtatccttaagtctggtttgatggtgtctgaaacgttttgctgtggtagagcagcatggaagaactataatgaataagtgatccctaatcattgtgtccaaattttgcttctgctatacccttttgtgctgtttcttatgttttgcttaaaaatttgatctgacaaacaaatttgtctaaattatgctcttgttctgactgtgtactgtacacatttgtattgctaccggtttggcacatagttttctctttgattgcagatcaaacccttctgattgcagattgcttggctatggctgatgtgctcactgttcttctttagcttgtatattgctgatggtggcttggctacggctgaaaaagttgctgctgcgccgacttggcaactgttgctccagtaatgctttgtcctctcttcctagccgccgacttggcacttggcagctgttgctcctgtaatgcgttgttatctcttatctcttgagatgtactatgattttgaggctgtttgacttgtgccagattgccagtgctgatgctatattatctcaggtttttatgctagtatatgttttactgtgtgctgcctgtgtcgagttacgtaatctattgaaccgctatgcgtgttgatgccctgttgttgcttgccagattgatgcccctgttgcttgcagcttgcaagctgtagtgaaatcctaaaattcgaaaccaaatctattctgaacttttgaagatctgtgatgtccggaagaaaagattcaaacagataaacgggactctccagaatctataaaataaatgatcgacaaacgctttgctttggtaggcttcctagttagttagcggaccgggatccgacggcgtcttcaccgccccgccgccgcccgagccggacttgtcgctgccgccgccgctgctcatcttgcgcgcttgtgtccctccctcagtccctgcgttcgcggatcgcgggcgggtgcgacccgtttggactccggccggtagccttcgtgccgacctcgctcggtccaccggtttgtcggggacccacatgtcagtgaaggtacgcgtccacgtccacagaccctactaccccagacgagtccaaatcgctgttccctcacactctcgtgtaccagcgcgcggcggaaagcacctttccaacaaccgccgacacgtcggtcccacgtcggcatgctccaccggtcagtgtttggcgtgtacggctcccggcgacgaacgagtgtggcctaagctttcctactcccatcccatctgagccacacatctctctcacgccacgcgcacaaaacagccaggctcccacgcgcatcaaccggctctccctttccgtgccactcgcccccaagccccaaaccctcgccgccgcctccgagacagccgccgccacctaggccatggccaccgccgccgccgcgtctaccgcgctcactggcgccactaccgctgcgcccaaggcgaggcgccgggcgcacctcctggccacccgccgcgccctcgccgcgcccatcaggtgctcagcggcgtcacccgccatgccgatggctcccccggccaccccgctccggccgtggggccccaccgagccccgcaagggtgctgacatcctcgtcgagtccctcgagcgctgcggcgtccgcgacgtcttcgcctaccccggcggcgcgtcgatggagatccaccaggcactcacccgctcccccgtcatcgccaaccacctcttccgccacgagcaaggggaggcctttgccgcctccggctacgcgcgctcctcgggccgcgtcggcgtctgcatcgccacctccggccccggcgccaccaacctagtctccgcgctcgccgacgcgctgctcgattccgtcccgatggtcgccatcacgggacaggtggcgcgacgcatgattggcaccgacgccttccaggagacgcccatcgtcgaggtcacgcgctccatcaccaagcacaactacctggtcctcgacgtcgacgacatcccccgcgtcgtgcaggaggctttcttcctcgcctcctctggtcgaccagggccggtgcttgtcgacatccccaaggacatccagcagcagatggcggtgcctgtctgggacaagcccatgagtctgcctgggtacattgcgcgccttcccaagccccctgcgactgagttgcttgagcaggtgctgcgtcttgttggtgaatcgcggcgccctgttctttatgtgggcggtggctgcgcagcatctggtgaggagttgcgacgctttgtggagctgactggaatcccggtcacaactactcttatgggcctcggcaacttccccagcgacgacccactgtctctgcgcatgctaggtatgcatgggacggtgtatgcaaattatgcagtggataaggccgatctgttgcttgcacttggtgtgcggtttgatgatcgcgtgacagggaagattgaggcttttgcaagcagggctaagattgtgcacgttgatattgatccggctgagattggcaagaacaagcagccacatgtgtccatctgtgcagatgttaagcttgctttgcagggcatgaatgctcttcttgaaggaagcacatcaaagaagagctttgactttggctcatggaacgatgagttggatcagcagaagagggaattcccccttgggtataaaacatctaatgaggagatccagccacaatatgctattcaggttcttgatgagctgacgaaaggcgaggccatcatcggcacaggtgttgggcagcaccagatgtgggcggcacagtactacacttacaagcggccaaggcagtggttgtcttcagctggtcttggggctatgggatttggtttgccggctgctgctggtgcttctgtggcaaacccaggtgtcactgttgttgacatcgatggagatggtagctttctcatgaacgttcaggagctagctatgatccgaattgagaacctcccagtgaaggtctttgtgctaaacaaccagcacctggggatggtggtgcagttggaggacaggttctataaggccaacagagcgcacacatacttgggaaacccagagaatgaaagtgagatatatccagatttcgtgacgatcgccaaagggttcaacattccagccgtccgtgtgacaaagaagaacgaagtccgcgcagcgataaagaagatgctcgagactccagggccgtacctcttggatataatcgtcccacaccaggagcatgtgttgcctatgatccctagtggtggggctttcaaggatatgatcctggatggtgatggcaggactgtgtactgacttcgaataggtacccggggatcctctagtgccgtgggtcgtttaagctgccgctgtacctgtgtcgtctggtgccttctggtgtacctgggaggttgtcgtctatcaagtatctgtggttggtgtcatgagtcagtgagtcccaatactgttcgtgtcctgtgtgcattatacccaaaactgttatgggcaaatcatgaataagcttgatgttcgaacttaaaagtctctgctcaatatggtattatggttgtttttgttcgtctcctaatatttgcctgggatcaaattttattggctggtgttcatttgacctccatgttcttgctaggctccattttttactctacagccataatatgtttgattgtttggtttgttctttgttgtacacctggttctgtcgagcttagttttcgacactggcttacagcttaacatgttgctattttattgggttctgattgctattttattgggttctgattgctagtttttgctgaatccaaaaaccatgttatttatttaagcgatccaggttattattatgatggtggctaagtttttttttttccaagggtaaattttctggattctccagtgtttctgtggccgaattcaatcactagagtcgacctgcaaagcttcggtccgggcctagaaggcccgcgccacttacgcttgattccgatgacttcgtaggttcctagctcaagccgctcgtgtccaagcgtcacttacgattagctaatgattacggcatctaggaccgactagctagctagctaagagctcggtaccgagctcgaattcattccgattaatcgtggcctcttgctcttcaggatgaagagctatgtttaaacgtgcaagcgctactagacaattcagtacattaaaaacgtccgcaatgtgttattaagttgtctaagcgtcaatttgtttacaccacaatatatcctgcca

SEQ ID NO: 23 - DNA, 19770 bp, Artificial sequence
  PHP93739
gtttacccgccaatatatcctgtcaaacactgcggccgcacttgaccgcggatggagccggagctgtggtgaggccatcgacgggaggtgggggagaacacagtctcagtgttctttgtgagtccgcaaggtttttagcttttctgtattaattaaggttgctgttggctgtagaatacggtcgtggaagagctgtatcggtagctactacgtaagctattatatactggaagtctggagctcgtcgatctccggtcgtcttcctccatttctcctcgtcttgctttgactgctgctaccatttgcttctgttttctgatgaagcatgccatgtcggccaccagtgtttgtgtggtttttgcagggaatggctttcaagtgctgtgattgaatggccctcgtcgtcctcggctgagctcacatggacgcgtcatgtgagtgagatatatgatcatatgatgagtggggttcgggtgagtgcgtacttgaagtaggatcccgctttcactcattcattcattggcctttaaaccgggaaattttcgcgaggagatggagggaagcaagcagggtgacgagtgcagagtgccgcgagcgctttgtcaaaaggcaccgccgtaggcaaaaaaatcaatggccctgactgactcgatggtagtactactgtagagactagagagggttgctccccatatcttcgtgtgacttttactccagcattgcatttccgtcattgagacgttaattaatagcagctttcgggacagatgactgtggccatgtttcgtcacggccgcttcgtgccagctgggggtactatagtactgtgattttgttagtaaaaactttcattaggccaccattgacgaccgggccttcgcttttgctgcgctaattaaccatttcccggcgaccgaagggaacatgaacatgccccgacacatgagggcatgaggactagtgttctccctgtcgttcgttgacttgactagtgatagtttaaacgctcttcaactggaagagcggttactaccggttcactagctagctgctaatcgagctagttaccctatgaggtgacatgaagcgctcacggttactatgacggttagcttcacgactgttggtggcagtagcgtacgacttagctatagttccggacttacctagctaataacttcgtatagcatacattatacgaagttatggttaccgaattcgagctcggtaccctggttcacaaactcaatacaacacacagtggagtagggtattacgctccggcggcccgaaccactctaaatccttgtgtcctcgtgtgctcttccaccattaatgactgtaattgcagggacacgaagagttgtagcgcttttgccaacaagatccgctatatgctagtagagtggaacctgcacagcaacaagcatccaataatctgagaataagaattatgtgtggtgatggttctcatctctgcaactcgccattttcgcgagagaaccaaatccaagttggtgaagatcatgatttgggctcatgggctggcatagtagctattacctttgcaattgtggttcgaatctatccgatattctccttttcagggagagctaatgcttatgcttattgggtattttggtttgacactgcttcacgcccaaaaaaaggcaactatgtctgagttggatatggcccaaaaaaaggcagctatgtctgagttggatatggaagtcttctttcgtttagggtgaagtaagaccaagctcatgagcttattatcttaggtcggaacaaattagttgataggcatggcacatttatcaaattataatgattttaacagaaaagcaacacctctttttcagcagcaccagctttgcaagctgcaattgacactccaagcatagtatttgctccaaactcagcctgcatttcgcacaatatcatatctatttccatttggataaaatatattttccagaaatatgggaacagaatcaagatacagaaaaaagttgtggtagtagtggtaagtggaaacacaagtacagtgaaaagatagcattatttctgaacagtcaaattaaccgaaataagtagtatcacatactgcccctaaattgactacacccaatgtaaagaattgcttgagcatattgagccatcagttgtttgtttgtgtaacggatttgacaatgcagagttcaggagcaaaaaaccgcaaaggagagaaagagggaaaggatctcctagtatcccaccttgtggcgcgccctgtcaagtgcatgatggcctggtcgatctgcgtctgctgctgcggttccatcccaacgagtgcctccgacaccttgtcgttgatcacccgcaccgcgtaggcgacccccctggcgaggaacttccgcctctcggaggccccggccgcgtcggcggcggcgccctcgagcgcgcccacgctagccgtagatgctcggtgcacggccttgttggtgtgcaactcgacctcaacggccggtgcgctacgcccgtcaaggatctggcgcgcccgcaccctcgtgatcacggtgggcgcctcccgcctcatgtggccgacgatgaaaagcgccgggttaggggccttggcgcgcaccgccgtattcagggcctcctcgctcttgcgcgagagcaggtgcttccccaggtactcctgcactgacaaggctgccacagcggtggaatttgtcctcacgacttcgccacgtcgtcctcacctccctggcttcccacgactccgccgtatcgaggtgctcggtgggtcgtcttaatccgaagtccgaactaggaagacgagacagagaggtctgaggaatgggcctcgtttgatgttgagctgaattatttttccagcataagcccaggtcttggtccatgaacaaaattactagaaacccagcccagtactacgatctaaaagagggactgccactggatagctctctctagcattctccacgctccaatacagcggcgtcgtgtctatccgggtctatccgcgaacacgtgagaactctccagaaactgctttctcctccacttcatctctctcgctttccctctataaaaagaccccttctaggaattgagggagacagcaagcaccaagcagcgatccgaagctcaatcaattcactcaaacctcttccccaaatcttcgattagatcttcgttgacaagaagactagaaccgaacctgacatgtccaacctgctcacggttcaccagaaccttccggctcttccagtggacgcgacgtccgatgaagtcaggaagaacctcatggacatgttccgcgacaggcaagcgttcagcgagcacacctggaagatgctgctctccgtctgccgctcctgggctgcatggtgcaagctgaacaacaggaagtggttccccgctgagcccgaggacgtgagggattaccttctgtacctgcaagcgcgaggtttgtttctgcttctacctttgatatatatataataattatcattaattagtagtaatataatatttcaaatatttttttcaaaataaaagaatgtagtatatagcaattgcttttctgtagtttataagtgtgtatattttaatttataacttttctaatatatgaccaaaacatggtgatgcctaggtctggcagtgaagaccatccagcaacaccttggacaactgaacatgcttcacaggcgctccggcctcccgcgccccagcgactcgaacgccgtgagcctcgtcatgcgccgcatcaggaaggaaaacgtcgatgccggcgaaagggcaaagcaggccctcgcgttcgagaggaccgatttcgaccaggtccgcagcctgatggagaacagcgacaggtgccaggacattaggaacctggcgttcctcggaattgcatacaacacgctcctcaggatcgcggaaattgcccgcattcgcgtgaaggacattagccgcaccgacggcggcaggatgcttatccacattggcaggaccaagacgctcgtttccaccgcaggcgtcgaaaaggccctcagcctcggagtgaccaagctcgtcgaacgctggatctccgtgtccggcgtcgcggacgacccaaacaactacctcttctgccgcgtccgcaagaacggggtggctgcccctagcgccaccagccaactcagcacgagggccttggaaggtattttcgaggccacccaccgcctgatctacggcgcgaaggatgacagcggtcaacgctacctcgcatggtccgggcactccgcccgcgttggagctgctagggacatggcccgcgccggtgtttccatccccgaaatcatgcaggcgggtggatggacgaacgtgaacattgtcatgaactacattcgcaaccttgacagcgagacgggcgcaatggttcgcctcctggaagatggtgactgaggtacccaacctagacttgtccatcttctggattggccaacttaattaatgtatgaaataaaaggatgcacacatagtgacatgctaatcactataatgtgggcatcaaagttgtgtgttatgtgtaattactagttatctgaataaaagagaaagagatcatccatatttcttatcctaaatgaatgtcacgtgtctttataattctttgatgaaccagatgcatttcattaaccaaatccatatacatataaatattaatcatatataattaatatcaattgggttagcaaaacaaatctagtctaggtgtgttttgcgatccgatcgaggccggccacactgatagtttaaactgaaggcgggaaacgacaatctgatcatgagcggagaattaagggagtcacgttatgacccccgccgatgacgcgggacaagccgttttacgtttggaactgacagaaccgcaacgattgaaggagccactcagccgcgggtttctggagtttaatgagctaagcacatacgtcagaaaccattattgcgcgttcaaaagtcgcctaaggtcactatcagctagcaaatatttcttgtcaaaaatgctccactgacgttccataaattcccctcggtatccaattagagtctcatattcactctcccggcggatctcgactctagaggatcgctcaggaaggccgctgagatagagccatggcggccaatgcgggcggcggtggagcgggaggaggcagcggcagcggcagcgtggctgcgccggcggtgtgccgccccagcggctcgcggtggacgccgacgccggagcagatcaggatgctgaaggagctctactacggctgcggcatccggtcgcccagctcggagcagatccagcgcatcaccgccatgctgcggcagcacggcaagatcgagggcaagaacgtcttctactggttccagaaccacaaggcccgcgagcgccagaagcgccgcctcaccagcctcgacgtcaacgtgcccgccgccggcgcggccgacgccaccaccagccaactcggcgtcctctcgctgtcgtcgccgccgccttcaggcgcggcgcctccctcgcccaccctcggcttctacgccgccggcaatggcggcggatcggctgtgctgctggacacgagttccgactggggcagcagcggcgctgctatggccaccgagacatgcttcctgcaggactacatgggcgtgacggacacgggcagctcgtcgcagtggccacgcttctcgtcgtcggacacgataatggcggcggccgcggcgcgggcggcgacgacgcgggcgcccgagacgctccctctcttcccgacctgcggcgacgacggcggcagcggtagcagcagctacttgccgttctggggtgccgcgtccacaactgccggcgccacttcttccgttgcgatccaacagcaacaccagctgcaggagcagtacagcttttacagcaacagcaacagcacccagctggccggcaccggcaaccaagacgtatcggcaacagcagcagcagccgccgccctggagctgagcctcagctcatggtgctccccttaccctgctgcagggagtatgtgagagcaacgcgagctgccactgctcttcactgatgtctctggaatggaaggaggaggaagtgagaacagatcattcgacaaagcagcattagtccgttgatcggtggaagaccactcgtcagtgttgagttgaatgtttgatcaataaaatacggcaatgctgtaagggttgttttttatgccattgataatacactgtactgttcagttgttgaactctatttcttagccatgccaagtgcttttcttattttgaataacattacagcaaaaagttgaaagacaaaaaaaaaaacccccgaacagagtgctttgggtcccaagcttctttagactgtgttcggcgttccccctaaatttctccccctatatctcactcacttgtcacatcagcgttctctttccccctatatctccacgctctacagcagttccacctatatcaaacctctataccccaccacaacaatattatatactttcatcttcaactaactcatgtaccttccaatttttttctactaataattatttacgtgcacagaaacttagcaaggagagagagagcgggaatttaaatgctcggcgttaggcttttagtccgctaggtggctagaccgaggttaggacgctagttcactaggggcctagtggtgttttaagacgtcacggtcacccggtccgggcctagaaggccagcttcaagtttgtacaaaaaagcaggctccggccagaatggcccggaccgaagcttgcatgcctgcagtgcagcgtgacccggtcgtgcccctctctagagataatgagcattgcatgtctaagttataaaaaattaccacatattttttttgtcacacttgtttgaagtgcagtttatctatctttatacatatatttaaactttactctacgaataatataatctatagtactacaataatatcagtgttttagagaatcatataaatgaacagttagacatggtctaaaggacaattgagtattttgacaacaggactctacagttttatctttttagtgtgcatgtgttctcctttttttttgcaaatagcttcacctatataatacttcatccattttattagtacatccatttagggtttagggttaatggtttttatagactaatttttttagtacatctattttattctattttagcctctaaattaagaaaactaaaactctattttagtttttttatttaataatttagatataaaatagaataaaataaagtgactaaaaattaaacaaataccctttaagaaattaaaaaaactaaggaaacatttttcttgtttcgagtagataatgccagcctgttaaacgccgtcgacgagtctaacggacaccaaccagcgaaccagcagcgtcgcgtcgggccaagcgaagcagacggcacggcatctctgtcgctgcctctggacccctctcgagagttccgctccaccgttggacttgctccgctgtcggcatccagaaattgcgtggcggagcggcagacgtgagccggcacggcaggcggcctcctcctcctctcacggcaccggcagctacgggggattcctttcccaccgctccttcgctttcccttcctcgcccgccgtaataaatagacaccccctccacaccctctttccccaacctcgtgttgttcggagcgcacacacacacaaccagatctcccccaaatccacccgtcggcacctccgcttcaaggtacgccgctcgtcctcccccccccccctctctaccttctctagatcggcgttccggtccatgcatggttagggcccggtagttctacttctgttcatgtttgtgttagatccgtgtttgtgttagatccgtgctgctagcgttcgtacacggatgcgacctgtacgtcagacacgttctgattgctaacttgccagtgtttctctttggggaatcctgggatggctctagccgttccgcagacgggatcgatttcatgattttttttgtttcgttgcatagggtttggtttgcccttttcctttatttcaatatatgccgtgcacttgtttgtcgggtcatcttttcatgcttttttttgtcttggttgtgatgatgtggtctggttgggcggtcgttctagatcggagtagaattctgtttcaaactacctggtggatttattaattttggatctgtatgtgtgtgccatacatattcatagttacgaattgaagatgatggatggaaatatcgatctaggataggtatacatgttgatgcgggttttactgatgcatatacagagatgctttttgttcgcttggttgtgatgatgtggtgtggttgggcggtcgttcattcgttctagatcggagtagaatactgtttcaaactacctggtgtatttattaattttggaactgtatgtgtgtgtcatacatcttcatagttacgagtttaagatggatggaaatatcgatctaggataggtatacatgttgatgtgggttttactgatgcatatacatgatggcatatgcagcatctattcatatgctctaaccttgagtacctatctattataataaacaagtatgttttataattattttgatcttgatatacttggatgatggcatatgcagcagctatatgtggatttttttagcactgccttcatacgctatttatttgcttggtactgtttcttttgtcgatgctcaccctgttgtttggtgttacttctgcaggtcgactttaacttagcctaggatccatggccactgtgaacaactggctcgctttctccctctccccgcaggagctgccgccctcccagacgacggactccacactcatctcggccgccaccgccgaccatgtctccggcgatgtctgcttcaacatcccccaagattggagcatgaggggatcagagctttcggcgctcgtcgcggagccgaagctggaggacttcctcggcggcatctccttctccgagcagcatcacaaggccaactgcaacatgatacccagcactagcagcacagtttgctacgcgagctcaggtgctagcaccggctaccatcaccagctgtaccaccagcccaccagctcagcgctccacttcgcggactccgtaatggtggcttcctcggccggtgtccacgacggcggtgccatgctcagcgcggccgccgctaacggtgtcgctggcgctgccagtgccaacggcggcggcatcgggctgtccatgattaagaactggctgcggagccaaccggcgcccatgcagccgagggtggcggcggctgagggcgcgcaggggctctctttgtccatgaacatggcggggacgacccaaggcgctgctggcatgccacttctcgctggagagcgcgcacgggcgcccgagagtgtatcgacgtcagcacagggtggagccgtcgtcgtcacggcgccgaaggaggatagcggtggcagcggtgttgccggcgctctagtagccgtgagcacggacacgggtggcagcggcggcgcgtcggctgacaacacggcaaggaagacggtggacacgttcgggcagcgcacgtcgatttaccgtggcgtgacaaggcatagatggactgggagatatgaggcacatctttgggataacagttgcagaagggaagggcaaactcgtaagggtcgtcaagtctatttaggtggctatgataaagaggagaaagctgctagggcttatgatcttgctgctctgaagtactggggtgccacaacaacaacaaattttccagtgagtaactacgaaaaggagctcgaggacatgaagcacatgacaaggcaggagtttgtagcgtctctgagaaggaagagcagtggtttctccagaggtgcatccatttacaggggagtgactaggcatcaccaacatggaagatggcaagcacggattggacgagttgcagggaacaaggatctttacttgggcaccttcagcacccaggaggaggcagcggaggcgtacgacatcgcggcgatcaagttccgcggcctcaacgccgtcaccaacttcgacatgagccgctacgacgtgaagagcatcctggacagcagcgccctccccatcggcagcgccgccaagcgcctcaaggaggccgaggccgcagcgtccgcgcagcaccaccacgccggcgtggtgagctacgacgtcggccgcatcgcctcgcagctcggcgacggcggagccctggcggcggcgtacggcgcgcactaccacggcgccgcctggccgaccatcgcgttccagccgggcgccgccagcacaggcctgtaccacccgtacgcgcagcagccaatgcgcggcggcgggtggtgcaagcaggagcaggaccacgcggtgatcgcggccgcgcacagcctgcaggacctccaccacctgaacctgggcgcggccggcgcgcacgactttttctcggcagggcagcaggccgccgccgctgcgatgcacggcctgggtagcatcgacagtgcgtcgctcgagcacagcaccggctccaactccgtcgtctacaacggcggggtcggcgacagcaacggcgccagcgccgtcggcggcagtggcggtggctacatgatgccgatgagcgctgccggagcaaccactacatcggcaatggtgagccacgagcaggtgcatgcacgggcctacgacgaagccaagcaggctgctcagatggggtacgagagctacctggtgaacgcggagaacaatggtggcggaaggatgtctgcatgggggactgtcgtgtctgcagccgcggcggcagcagcaagcagcaacgacaacatggccgccgacgtcgggcatggcggcgcgcagctcttcagtgtctggaacgacacttaatattggtaccgtcatgggtcgtttaagctgccgatgtgcctgcgtcgtctggtgccctctctccatatggaggttgtcaaagtatctgctgttcgtgtcatgagtcgtgtcagtgttggtttaataatggaccggttgtgttgtgtgtgcgtactacccagaactatgacaaatcatgaataagtttgatgtttgaaattaaagcctgtgctcattatgttctgtctttcagttgtctcctaatatttgcctgcaggtactggctatctaccgtttcttacttaggaggtgtttgaatgcactaaaactaatagttagtggctaaaattagttaaaacatccaaacaccatagctaatagttgaactattagctatttttggaaaattagttaatagtgaggtagttatttgttagctagctaattcaactaacaatttttagccaactaacaattagtttcagtgcattcaaacacccccttaatgttaaggtggttctatctaccgtctcctaatatatggttgattgttcggtttgttgctatgctattgggttctgattgctgctagttcttgctgaatccagaagttctcgtagtatagctcagattcatattatttatttgagtgataagtgatccaggttattactatgttagctaggttttttttacaaggataaattatctgtgatcataattcttatgaaagctttatgtttcctggaggcagtggcatgcaatgcatgacagcaacttgatcacaccagctgaggtagatacggtaacaaggttcttaaatctgttcaccaaatcattggagaacacacatacacattcttgccagtcttggttagagaaatttcatgacaaaatgccaaagctgtcttgactcttcacttttggccatgagtcgtgacgcgacttattgaactagtctagggcgcggctaacaacctagcttagattgccttgtctaaacccttaggctaacgcgccactctagaaggccgatctcccgggataacttcgtatagcatacattatacgaagttatgaattccggaccgggttaccgaattcctgcccttaaggccaattgttcaagattcattcaacaattgaaacatctcccatgattaaatcagtataaggttgctatggtcttgcttgacaaagtttttttttgagggaatttcaactaaatttttgagtgaaactatcaaatactgattttaaaaaatttttataaaaggaagcgcagagataaaaggccatctatgctacaaaagtacccaaaaatgtaatcctaaagtatgaattgcattttttttttgtttggacgaaaggaaaggagtattaccacaagaatgatatcatcttcatatttagatcttttttgggtaaagcttgagattctctaaatatagagaaatcagaagaaaaaaaaaccgtgttttggtggttttgatttctagcctccacaataactttgacggcgtcgacaagtctaacggacaccaagcagcgaaccaccagcgccgagccaagcgaagcagacggccgagacgttgacaccttcggcgcggcatctctcgagagttccgctccggcgctccacctccaccgctggcggtttcttattccgttccgttccgcctcctgctctgctcctctccacaccacacggcacgaaaccgttacggcaccggcagcacccagcacgggagaggggattcctttcccaccgttccttccctttccgccccgccgctataaatagccagccccatccccagcttttttccccaatctcatctcctctctcctgttgttcggagcacacgcacaatccgatcgatccccaaatccccttcgtctctcctcgcgagcctcgtggatcccagcttcaaggtacggcgatcgatcatcccccctccttctctctaccttcttttctctagactacatcggatggcgatccatggttagggcctgctagtttcccttcctgttttgtcgatggctgcgaggcacaatagatctgatggcgttatgacggctaacttgtcatgttgttgcgatttatagtccctttaggagatcagtttaatttctcggatggttcgagatcggtggtccatggttagtaccctaagatccgcgctgttagggttcgtagatggaggcgacctgttctgattgttaacttgtcagtacctgggaaatcctgggatggttctagctcgtccgcagatgagatcgatttcatgatcctctgtatcttgtttcgttgcctaggttccgtctaatctatccgtggtatgatgtagatgttttgatcgtgctaactacgtcttgtaaagttaattgtcaggtcataatttttagcatgcctttttttttgtttggttttgtctaattgggctgtcgttctagatcagagtagaagactgttccaaactacctgctggatttattgaacttggatctgtatgtgtgtcacatatcttcataaattcatgattaagatggattgaaatatcttttatctttttggtatggatagttctatatgttggtgtggctttgttagatgtatacatgcttagatacatgaagcaacgtgctgctactgtttagtaattgctgttcatttgtctaataaacagataaggatatgtatttatgttgctgttggttttgctggtactttgttggatacaaatgcttcaatacagaaaacagcatgctgctacgatttaccatttatctaatcttatcatatgtctaatctaataaacaaacatgcttttaaattatcttcatatgcttggatgatggcatacacagcggctatgtgtggttttttaaatacccagcatcatgggcatgcatgacactgctttaatatgctttttatttgcttgagactgtttcttttgtttatactgaccctttagttcggtgactcttctgcaggtcgactttaacttagcctaggatccatggcccagtccaagcacggcctgaccaaggagatgaccatgaagtaccgcatggagggctgcgtggacggccacaagttcgtgatcaccggcgagggcatcggctaccccttcaagggcaagcaggccatcaacctgtgcgtggtggagggcggccccttgcccttcgccgaggacatcttgtccgccgccttcatgtacggcaaccgcgtgttcaccgagtacccccaggacatcgtcgactacttcaagaactcctgccccgccggctacacctgggaccgctccttcctgttcgaggacggcgccgtgtgcatctgcaacgccgacatcaccgtgagcgtggaggagaactgcatgtaccacgagtccaagttctacggcgtgaacttccccgccgacggccccgtgatgaagaagatgaccgacaactgggagccctcctgcgagaagatcatccccgtgcccaagcagggcatcttgaagggcgacgtgagcatgtacctgctgctgaaggacggtggccgcttgcgctgccagttcgacaccgtgtacaaggccaagtccgtgccccgcaagatgcccgactggcacttcatccagcacaagctgacccgcgaggaccgcagcgacgccaagaaccagaagtggcacctgaccgagcacgccatcgcctccggctccgccttgccctccggactcagatctcgatagggtaccaatggccagttaacagatccagctgctgctgttctagggttcacaagtctgcctatttgtcttccccaatggagctatggttgtctggtctggtccttggtcgtgtcccgtttcattgtgtactatttacctgtaatgtgtatccttaagtctggtttgatggtgtctgaaacgttttgctgtggtagagcagcatggaagaactataatgaataagtgatccctaatcattgtgtccaaattttgcttctgctatacccttttgtgctgtttcttatgttttgcttaaaaatttgatctgacaaacaaatttgtctaaattatgctcttgttctgactgtgtactgtacacatttgtattgctaccggtttggcacatagttttctctttgattgcagatcaaacccttctgattgcagattgcttggctatggctgatgtgctcactgttcttctttagcttgtatattgctgatggtggcttggctacggctgaaaaagttgctgctgcgccgacttggcaactgttgctccagtaatgctttgtcctctcttcctagccgccgacttggcacttggcagctgttgctcctgtaatgcgttgttatctcttatctcttgagatgtactatgattttgaggctgtttgacttgtgccagattgccagtgctgatgctatattatctcaggtttttatgctagtatatgttttactgtgtgctgcctgtgtcgagttacgtaatctattgaaccgctatgcgtgttgatgccctgttgttgcttgccagattgatgcccctgttgcttgcagcttgcaagctgtagtgaaatcctaaaattcgaaaccaaatctattctgaacttttgaagatctgtgatgtccggaagaaaagattcaaacagataaacgggactctccagaatctataaaataaatgatcgacaaacgctttgctttggtaggcttcctagttagttagcggaccgggatccgacggcgtcttcaccgccccgccgccgcccgagccggacttgtcgctgccgccgccgctgctcatcttgcgcgcttgtgtccctccctcagtccctgcgttcgcggatcgcgggcgggtgcgacccgtttggactccggccggtagccttcgtgccgacctcgctcggtccaccggtttgtcggggacccacatgtcagtgaaggtacgcgtccacgtccacagaccctactaccccagacgagtccaaatcgctgttccctcacactctcgtgtaccagcgcgcggcggaaagcacctttccaacaaccgccgacacgtcggtcccacgtcggcatgctccaccggtcagtgtttggcgtgtacggctcccggcgacgaacgagtgtggcctaagctttcctactcccatcccatctgagccacacatctctctcacgccacgcgcacaaaacagccaggctcccacgcgcatcaaccggctctccctttccgtgccactcgcccccaagccccaaaccctcgccgccgcctccgagacagccgccgccacctaggccatggccaccgccgccgccgcgtctaccgcgctcactggcgccactaccgctgcgcccaaggcgaggcgccgggcgcacctcctggccacccgccgcgccctcgccgcgcccatcaggtgctcagcggcgtcacccgccatgccgatggctcccccggccaccccgctccggccgtggggccccaccgagccccgcaagggtgctgacatcctcgtcgagtccctcgagcgctgcggcgtccgcgacgtcttcgcctaccccggcggcgcgtcgatggagatccaccaggcactcacccgctcccccgtcatcgccaaccacctcttccgccacgagcaaggggaggcctttgccgcctccggctacgcgcgctcctcgggccgcgtcggcgtctgcatcgccacctccggccccggcgccaccaacctagtctccgcgctcgccgacgcgctgctcgattccgtcccgatggtcgccatcacgggacaggtggcgcgacgcatgattggcaccgacgccttccaggagacgcccatcgtcgaggtcacgcgctccatcaccaagcacaactacctggtcctcgacgtcgacgacatcccccgcgtcgtgcaggaggctttcttcctcgcctcctctggtcgaccagggccggtgcttgtcgacatccccaaggacatccagcagcagatggcggtgcctgtctgggacaagcccatgagtctgcctgggtacattgcgcgccttcccaagccccctgcgactgagttgcttgagcaggtgctgcgtcttgttggtgaatcgcggcgccctgttctttatgtgggcggtggctgcgcagcatctggtgaggagttgcgacgctttgtggagctgactggaatcccggtcacaactactcttatgggcctcggcaacttccccagcgacgacccactgtctctgcgcatgctaggtatgcatgggacggtgtatgcaaattatgcagtggataaggccgatctgttgcttgcacttggtgtgcggtttgatgatcgcgtgacagggaagattgaggcttttgcaagcagggctaagattgtgcacgttgatattgatccggctgagattggcaagaacaagcagccacatgtgtccatctgtgcagatgttaagcttgctttgcagggcatgaatgctcttcttgaaggaagcacatcaaagaagagctttgactttggctcatggaacgatgagttggatcagcagaagagggaattcccccttgggtataaaacatctaatgaggagatccagccacaatatgctattcaggttcttgatgagctgacgaaaggcgaggccatcatcggcacaggtgttgggcagcaccagatgtgggcggcacagtactacacttacaagcggccaaggcagtggttgtcttcagctggtcttggggctatgggatttggtttgccggctgctgctggtgcttctgtggcaaacccaggtgtcactgttgttgacatcgatggagatggtagctttctcatgaacgttcaggagctagctatgatccgaattgagaacctcccagtgaaggtctttgtgctaaacaaccagcacctggggatggtggtgcagttggaggacaggttctataaggccaacagagcgcacacatacttgggaaacccagagaatgaaagtgagatatatccagatttcgtgacgatcgccaaagggttcaacattccagccgtccgtgtgacaaagaagaacgaagtccgcgcagcgataaagaagatgctcgagactccagggccgtacctcttggatataatcgtcccacaccaggagcatgtgttgcctatgatccctagtggtggggctttcaaggatatgatcctggatggtgatggcaggactgtgtactgacttcgaataggtacccggggatcctctagtgccgtgggtcgtttaagctgccgctgtacctgtgtcgtctggtgccttctggtgtacctgggaggttgtcgtctatcaagtatctgtggttggtgtcatgagtcagtgagtcccaatactgttcgtgtcctgtgtgcattatacccaaaactgttatgggcaaatcatgaataagcttgatgttcgaacttaaaagtctctgctcaatatggtattatggttgtttttgttcgtctcctaatatttgcctgggatcaaattttattggctggtgttcatttgacctccatgttcttgctaggctccattttttactctacagccataatatgtttgattgtttggtttgttctttgttgtacacctggttctgtcgagcttagttttcgacactggcttacagcttaacatgttgctattttattgggttctgattgctattttattgggttctgattgctagtttttgctgaatccaaaaaccatgttatttatttaagcgatccaggttattattatgatggtggctaagtttttttttttccaagggtaaattttctggattctccagtgtttctgtggccgaattcaatcactagagtcgacctgcaaagcttcggtccgggcctagaaggcccgcgccacttacgcttgattccgatgacttcgtaggttcctagctcaagccgctcgtgtccaagcgtcacttacgattagctaatgattacggcatctaggaccgactagttcttatgtgcttctagtctccaaatgtggttgatagttattttgctctaagatcaacagtaatgaagtataaatcatcgttgtggtgtgctactcggttaattgagcattaacacacacaaacatgacgaggatggtataatctccaaaaatgtgtactttgttaggtgggaccctatagccttgattaatgtgctatgttaggcatgcctggaaacgtgtgacgcatatgttttgtgaacctgttgatattatatgtgcttttatattaccatattttattaaaatactaatatttattactagtaagatataacattctatctagcttaaaaactaaccataaatattccataataactagatttaccaaactaatatactaaatatacataataaatacaaaattaacaagacaataatcaatatttatgagcttaatatatttagacattatggttggtcgacgataatcatgctaacttttcgtaattgcttgattgaaatatgcttagaataatgcctctttgttctacatggcaaatagggaccattatggtgtaacaccctgggaaccacaaacaccccgaaatgctactaaactacacaactaaccttcatatataaaatttcgacagcatctcctttgaaaatttgcatagacgtggaagcaacagagtataaacagatctgcgtttaaacgtgcaagcgctactagacaattcagtacattaaaaacgtccgcaatgtgttattaagttgtctaagcgtcaatttgtttacaccacaatatatcctgcca

SEQ ID NO: 24 - DNA, 19118 bp, Artificial sequence
  PHP93743
gtttacccgccaatatatcctgtcaaacactgcggccgcacttgaccgcggatggagccggagctgtggtgaggccatcgacgggaggtgggggagaacacagtctcagtgttctttgtgagtccgcaaggtttttagcttttctgtattaattaaggttgctgttggctgtagaatacggtcgtggaagagctgtatcggtagctactacgtaagctattatatactggaagtctggagctcgtcgatctccggtcgtcttcctccatttctcctcgtcttgctttgactgctgctaccatttgcttctgttttctgatgaagcatgccatgtcggccaccagtgtttgtgtggtttttgcagggaatggctttcaagtgctgtgattgaatggccctcgtcgtcctcggctgagctcacatggacgcgtcatgtgagtgagatatatgatcatatgatgagtggggttcgggtgagtgcgtacttgaagtaggatcccgctttcactcattcattcattggcctttaaaccgggaaattttcgcgaggagatggagggaagcaagcagggtgacgagtgcagagtgccgcgagcgctttgtcaaaaggcaccgccgtaggcaaaaaaatcaatggccctgactgactcgatggtagtactactgtagagactagagagggttgctccccatatcttcgtgtgacttttactccagcattgcatttccgtcattgagacgttaattaatagcagctttcgggacagatgactgtggccatgtttcgtcacggccgcttcgtgccagctgggggtactatagtactgtgattttgttagtaaaaactttcattaggccaccattgacgaccgggccttcgcttttgctgcgctaattaaccatttcccggcgaccgaagggaacatgaacatgccccgacacatgagggcatgaggactagtgttctccctgtcgttcgttgacttgactagtgatagtttaaacgctcttcaactggaagagcggttactaccggttcactagctagctgctaatcgagctagttaccctatgaggtgacatgaagcgctcacggttactatgacggttagcttcacgactgttggtggcagtagcgtacgacttagctatagttccggacttacctagctaataacttcgtatagcatacattatacgaagttatggttaccgaattcgagctcggtaccctggttcacaaactcaatacaacacacagtggagtagggtattacgctccggcggcccgaaccactctaaatccttgtgtcctcgtgtgctcttccaccattaatgactgtaattgcagggacacgaagagttgtagcgcttttgccaacaagatccgctatatgctagtagagtggaacctgcacagcaacaagcatccaataatctgagaataagaattatgtgtggtgatggttctcatctctgcaactcgccattttcgcgagagaaccaaatccaagttggtgaagatcatgatttgggctcatgggctggcatagtagctattacctttgcaattgtggttcgaatctatccgatattctccttttcagggagagctaatgcttatgcttattgggtattttggtttgacactgcttcacgcccaaaaaaaggcaactatgtctgagttggatatggcccaaaaaaaggcagctatgtctgagttggatatggaagtcttctttcgtttagggtgaagtaagaccaagctcatgagcttattatcttaggtcggaacaaattagttgataggcatggcacatttatcaaattataatgattttaacagaaaagcaacacctctttttcagcagcaccagctttgcaagctgcaattgacactccaagcatagtatttgctccaaactcagcctgcatttcgcacaatatcatatctatttccatttggataaaatatattttccagaaatatgggaacagaatcaagatacagaaaaaagttgtggtagtagtggtaagtggaaacacaagtacagtgaaaagatagcattatttctgaacagtcaaattaaccgaaataagtagtatcacatactgcccctaaattgactacacccaatgtaaagaattgcttgagcatattgagccatcagttgtttgtttgtgtaacggatttgacaatgcagagttcaggagcaaaaaaccgcaaaggagagaaagagggaaaggatctcctagtatcccaccttgtggcgcgccctgtcaagtgcatgatggcctggtcgatctgcgtctgctgctgcggttccatcccaacgagtgcctccgacaccttgtcgttgatcacccgcaccgcgtaggcgacccccctggcgaggaacttccgcctctcggaggccccggccgcgtcggcggcggcgccctcgagcgcgcccacgctagccgtagatgctcggtgcacggccttgttggtgtgcaactcgacctcaacggccggtgcgctacgcccgtcaaggatctggcgcgcccgcaccctcgtgatcacggtgggcgcctcccgcctcatgtggccgacgatgaaaagcgccgggttaggggccttggcgcgcaccgccgtattcagggcctcctcgctcttgcgcgagagcaggtgcttccccaggtactcctgcactgacaaggctgccacagcggtggaatttgtcctcacgacttcgccacgtcgtcctcacctccctggcttcccacgactccgccgtatcgaggtgctcggtgggtcgtcttaatccgaagtccgaactaggaagacgagacagagaggtctgaggaatgggcctcgtttgatgttgagctgaattatttttccagcataagcccaggtcttggtccatgaacaaaattactagaaacccagcccagtactacgatctaaaagagggactgccactggatagctctctctagcattctccacgctccaatacagcggcgtcgtgtctatccgggtctatccgcgaacacgtgagaactctccagaaactgctttctcctccacttcatctctctcgctttccctctataaaaagaccccttctaggaattgagggagacagcaagcaccaagcagcgatccgaagctcaatcaattcactcaaacctcttccccaaatcttcgattagatcttcgttgacaagaagactagaaccgaacctgacatgtccaacctgctcacggttcaccagaaccttccggctcttccagtggacgcgacgtccgatgaagtcaggaagaacctcatggacatgttccgcgacaggcaagcgttcagcgagcacacctggaagatgctgctctccgtctgccgctcctgggctgcatggtgcaagctgaacaacaggaagtggttccccgctgagcccgaggacgtgagggattaccttctgtacctgcaagcgcgaggtttgtttctgcttctacctttgatatatatataataattatcattaattagtagtaatataatatttcaaatatttttttcaaaataaaagaatgtagtatatagcaattgcttttctgtagtttataagtgtgtatattttaatttataacttttctaatatatgaccaaaacatggtgatgcctaggtctggcagtgaagaccatccagcaacaccttggacaactgaacatgcttcacaggcgctccggcctcccgcgccccagcgactcgaacgccgtgagcctcgtcatgcgccgcatcaggaaggaaaacgtcgatgccggcgaaagggcaaagcaggccctcgcgttcgagaggaccgatttcgaccaggtccgcagcctgatggagaacagcgacaggtgccaggacattaggaacctggcgttcctcggaattgcatacaacacgctcctcaggatcgcggaaattgcccgcattcgcgtgaaggacattagccgcaccgacggcggcaggatgcttatccacattggcaggaccaagacgctcgtttccaccgcaggcgtcgaaaaggccctcagcctcggagtgaccaagctcgtcgaacgctggatctccgtgtccggcgtcgcggacgacccaaacaactacctcttctgccgcgtccgcaagaacggggtggctgcccctagcgccaccagccaactcagcacgagggccttggaaggtattttcgaggccacccaccgcctgatctacggcgcgaaggatgacagcggtcaacgctacctcgcatggtccgggcactccgcccgcgttggagctgctagggacatggcccgcgccggtgtttccatccccgaaatcatgcaggcgggtggatggacgaacgtgaacattgtcatgaactacattcgcaaccttgacagcgagacgggcgcaatggttcgcctcctggaagatggtgactgaggtacccaacctagacttgtccatcttctggattggccaacttaattaatgtatgaaataaaaggatgcacacatagtgacatgctaatcactataatgtgggcatcaaagttgtgtgttatgtgtaattactagttatctgaataaaagagaaagagatcatccatatttcttatcctaaatgaatgtcacgtgtctttataattctttgatgaaccagatgcatttcattaaccaaatccatatacatataaatattaatcatatataattaatatcaattgggttagcaaaacaaatctagtctaggtgtgttttgcgaatgcgaccttcttatgtgcttctagtctccaaatgtggttgatagttattttgctctaagatcaacagtaatgaagtataaatcatcgttgtggtgtgctactcggttaattgagcattaacacacacaaacatgacgaggatggtataatctccaaaaatgtgtactttgttaggtcgatcggaagttgaagacaaagaaggtcttaaatcctggctagcaacactgaactatgccagaaaccacatcaaagcatatcggcaagcttcttggcccattatatccaaagacctcagagaaaggtgagcgaaggctcaattcagaagattggaagctgatcaataggatcaagacaatggtgagaacgcttccaaatctcactattccaccagaagatgcatacattatcattgaaacagatgcatgtgcaactggatggggagcagtatgcaagtggaagaaaaacaaggcagacccaagaaatacagagcaaatctgtaggtatgccagtggaaaatttgataagccaaaaggaacctgtgatgcagaaatctatggggttatgaatggcttagaaaagatgagattgttctacttggacaaaagagagatcacagtcagaactgacagtagtgcaatcgaaaggttctacaacaagagtgctgaacacaagccttctgagatcagatggatcaggttcatggactacatcactggtgcaggaccagagatagtcattgaacacataaaagggaagaggaatggtttagctgacatcttgtccaggctcaaagccaaattagctcagaatgaaccaacggaagagatgatcctgcttacacaagccataagggaagtaattccttatccagatcatccatacactgagcaactcagagaatggggaaacaaaattctcgatccattccccacattcaagaaggacatgttcgaaagaacagagcaagcttttatgctaacagaggaaccagttctactctgtgcatgcaggaagcctgcaattcagttagtgtccagaacatctgccaacccaggaaggaaattcttcaagtgcgcaatgaacaaatgccattgctggtactgggcagatctcattgaagaacacattcaagacagaattgatgaatttctcaagaatcttgaagttctgaagaccggtggcgtgcaaacaatggaggaggaacttatgaaggaagtcaccaagctgaagatagaagaggaggagttcgaggaataccaggccacaccaagggctatgtcgccagtagccgcagaagatgtgctagatctccaagacgtaagcaatgacgattgaggaggcattgacgtcagggatgaccgcagcggagagtactgggcccattcagtggatgctccactgagttgtattattgtgtgcttttcggacaagtgtgctgtccactttcttttggcacctgtgccactttattccttgtctgccacgatgcctttgcttagcttgtaagcaaggatcgcagtgcgtgtgtgacaccaccccccttccgacgctctgcctatataaggcaccgtctgtaagctcttacgatcatcggtagttcaccaaggatcggtagttcaccacatgagtatttgagtcaagtttggcttgaataataagaattacacctttccgcaggatccatggcggccaatgcgggcggcggtggagcgggaggaggcagcggcagcggcagcgtggctgcgccggcggtgtgccgccccagcggctcgcggtggacgccgacgccggagcagatcaggatgctgaaggagctctactacggctgcggcatccggtcgcccagctcggagcagatccagcgcatcaccgccatgctgcggcagcacggcaagatcgagggcaagaacgtcttctactggttccagaaccacaaggcccgcgagcgccagaagcgccgcctcaccagcctcgacgtcaacgtgcccgccgccggcgcggccgacgccaccaccagccaactcggcgtcctctcgctgtcgtcgccgccgccttcaggcgcggcgcctccctcgcccaccctcggcttctacgccgccggcaatggcggcggatcggctgtgctgctggacacgagttccgactggggcagcagcggcgctgctatggccaccgagacatgcttcctgcaggactacatgggcgtgacggacacgggcagctcgtcgcagtggccacgcttctcgtcgtcggacacgataatggcggcggccgcggcgcgggcggcgacgacgcgggcgcccgagacgctccctctcttcccgacctgcggcgacgacggcggcagcggtagcagcagctacttgccgttctggggtgccgcgtccacaactgccggcgccacttcttccgttgcgatccaacagcaacaccagctgcaggagcagtacagcttttacagcaacagcaacagcacccagctggccggcaccggcaaccaagacgtatcggcaacagcagcagcagccgccgccctggagctgagcctcagctcatggtgctccccttaccctgctgcagggagtatgtgagagcaacgcgagctgccactgctcttcactgatgtctctggaatggaaggaggaggaagtgagaacagatcattcgacaaagcagcattagtccgttgatcggtggaagaccactcgtcagtgttgagttgaatgtttgatcaataaaatacggcaatgctgtaagggttgttttttatgccattgataatacactgtactgttcagttgttgaactctatttcttagccatgccaagtgcttttcttattttgaataacattacagcaaaaagttgaaagacaaaaaaaaaaacccccgaacagagtgctttgggtcccaagcttctttagactgtgttcggcgttccccctaaatttctccccctatatctcactcacttgtcacatcagcgttctctttccccctatatctccacgctctacagcagttccacctatatcaaacctctataccccaccacaacaatattatatactttcatcttcaactaactcatgtaccttccaatttttttctactaataattatttacgtgcacagaaacttagcaaggagagagagagcgggaatttaaatgctcggcgttaggcttttagtccgctaggtggctagaccgaggttaggacgctagttcactaggggcctagtggtgttttaagacgtcacggtcacccggtccgggcctagaaggccagcttcaagtttgtacaaaaaagcaggctccggccagaatggcccggaccgaagcttgcatgcctgcagtgcagcgtgacccggtcgtgcccctctctagagataatgagcattgcatgtctaagttataaaaaattaccacatattttttttgtcacacttgtttgaagtgcagtttatctatctttatacatatatttaaactttactctacgaataatataatctatagtactacaataatatcagtgttttagagaatcatataaatgaacagttagacatggtctaaaggacaattgagtattttgacaacaggactctacagttttatctttttagtgtgcatgtgttctcctttttttttgcaaatagcttcacctatataatacttcatccattttattagtacatccatttagggtttagggttaatggtttttatagactaatttttttagtacatctattttattctattttagcctctaaattaagaaaactaaaactctattttagtttttttatttaataatttagatataaaatagaataaaataaagtgactaaaaattaaacaaataccctttaagaaattaaaaaaactaaggaaacatttttcttgtttcgagtagataatgccagcctgttaaacgccgtcgacgagtctaacggacaccaaccagcgaaccagcagcgtcgcgtcgggccaagcgaagcagacggcacggcatctctgtcgctgcctctggacccctctcgagagttccgctccaccgttggacttgctccgctgtcggcatccagaaattgcgtggcggagcggcagacgtgagccggcacggcaggcggcctcctcctcctctcacggcaccggcagctacgggggattcctttcccaccgctccttcgctttcccttcctcgcccgccgtaataaatagacaccccctccacaccctctttccccaacctcgtgttgttcggagcgcacacacacacaaccagatctcccccaaatccacccttcggcacctccgcttcaaggtacgccgctcgtcctcccccccccccctctctaccttctctagatcggcgttccggtccatgcatggttagggcccggtagttctacttctgttcatgtttgtgttagatccgtgtttgtgttagatccgtgctgctagcgttcgtacacggatgcgacctgtacgtcagacacgttctgattgctaacttgccagtgtttctctttggggaatcctgggatggctctagccgttccgcagacgggatcgatttcatgattttttttgtttcgttgcatagggtttggtttgcccttttcctttatttcaatatatgccgtgcacttgtttgtcgggtcatcttttcatgcttttttttgtcttggttgtgatgatgtggtctggttgggcggtcgttctagatcggagtagaattctgtttcaaactacctggtggatttattaattttggatctgtatgtgtgtgccatacatattcatagttacgaattgaagatgatggatggaaatatcgatctaggataggtatacatgttgatgcgggttttactgatgcatatacagagatgctttttgttcgcttggttgtgatgatgtggtgtggttgggcggtcgttcattcgttctagatcggagtagaatactgtttcaaactacctggtgtatttattaattttggaactgtatgtgtgtgtcatacatcttcatagttacgagtttaagatggatggaaatatcgatctaggataggtatacatgttgatgtgggttttactgatgcatatacatgatggcatatgcagcatctattcatatgctctaaccttgagtacctatctattataataaacaagtatgttttataattattttgatcttgatatacttggatgatggcatatgcagcagctatatgtggatttttttagccctgccttcatacgctatttatttgcttggtactgtttcttttgtcgatgctcaccctgttgtttggtgttacttctgcaggtcgactttaacttagcctaggatccatggcctcttcatctgcacccaggttccgtgtctattccaagtacctctttctaacatatcctgaatgtacccttgagccacagtacgccttggattcacttcgcactctcttgaacaaatatgagcccctctacatcgctgctgttagagagctccacgaagatggatcaccacatctgcacgttctcgtgcagaacaagcttcgtgcttccatcaccaatcccaatgccttaaacctccgtatggatacatctccattctccatattccatccaaatatacaagctgccaaagactgcaaccaagttcgtgattacatcacgaaggaggttgactccgatgtaaacacagctgagtggggaacattcgtggctgtttcaactccaggtcgtaaagaccgtgatgcggatatgaaacagatcattgaatctagttcctctcgcgaggaattcctcagcatggtttgcaatcgttttccgtttgaatggtctatccgtctcaaagacttcgagtacacggcacgccatctatttcctgacccagttgccacttacacacctgagtttccaaccgaatcactcatttgccatgagaccattgaaagctggaaaaatgaacatctctactctctgtccctcgagagctacatcctgtgcaccagcacccctgccgaccaggcccagtccgacctcgaatggatggacgactacagccgtagtcaccggggaggcataagtccatctacatctgcgggccaaccagaacaggaaagacttcctgggcaaggtctctaggcgtacctagtggtacctgacatcttatagtctgcaacctctcgtgtctgaattcctatctttatcaagtgttattgcttccacgactataggacagctttcgtcgaaaggttttgctcatgtgatctcgaaggattcatctagtctgatttttcgtgacttgtatcggttttattggattcatccaacatatatcaataaaaaatgagttgtgtttcctttcttcctagttcagttaaaattatttccctcctgcgcttgtgctgtaattgtctgtgtacctgttgtttgtgactgtgttagttcccttggatatgatttcgtatttgatatgtacatggagatagcttagcttcattattggagtatgaagttagtatgacatagtcactctcctggaaaattgacactgcaaaccatatttttattctgaaccacaaatcctagtcagtccgctggcatatgccgtccgtttgctgaatccagaacgtgggtttggagatgtacggctgagatgcctctatgcgaaggggatttcgtggtgaaacgagatgggagtagagcaacgcccgtggaagatgcttcaaacttccacacttttgagcaacgatcggcagtagtaaggtagacgatttcaagatcaaagcatatgaagataaacaacatcaacaacaaaatttgttggggttctatagagagaaacagagctacatacatacactgttttgtatctaccatctgagatgatgaaaagatgaaaaactaaagaatgccccggcgccaacgccaggacacgccgcgcgcgcgtcacccgagccatctcttgacccagccggcgctgtatatttacacacgttgcagcatcgatcaccacctgttcgatcgcgtcgccgtcaccaagcttggcgcgccggtcacccggtccgggcctagaaggccacccgggattaagacccgtcgtcaagtaggaattccagaaatcaacgcacggtaactaaatcctcgcgctaagctgggtcaggaggccggccataacttcgtatagcatacattatacgaagttataggcctcggaccgggttaccgaattcctgcccttaaggccaattgttcaagattcattcaacaattgaaacatctcccatgattaaatcagtataaggttgctatggtcttgcttgacaaagtttttttttgagggaatttcaactaaatttttgagtgaaactatcaaatactgattttaaaaaatttttataaaaggaagcgcagagataaaaggccatctatgctacaaaagtacccaaaaatgtaatcctaaagtatgaattgcattttttttttgtttggacgaaaggaaaggagtattaccacaagaatgatatcatcttcatatttagatcttttttgggtaaagcttgagattctctaaatatagagaaatcagaagaaaaaaaaaccgtgttttggtggttttgatttctagcctccacaataactttgacggcgtcgacaagtctaacggacaccaagcagcgaaccaccagcgccgagccaagcgaagcagacggccgagacgttgacaccttcggcgcggcatctctcgagagttccgctccggcgctccacctccaccgctggcggtttcttattccgttccgttccgcctcctgctctgctcctctccacaccacacggcacgaaaccgttacggcaccggcagcacccagcacgggagaggggattcctttcccaccgttccttccctttccgccccgccgctataaatagccagccccatccccagcttttttccccaatctcatctcctctctcctgttgttcggagcacacgcacaatccgatcgatccccaaatccccttcgtctctcctcgcgagcctcgtggatcccagcttcaaggtacggcgatcgatcatcccccctccttctctctaccttcttttctctagactacatcggatggcgatccatggttagggcctgctagtttcccttcctgttttgtcgatggctgcgaggcacaatagatctgatggcgttatgacggctaacttgtcatgttgttgcgatttatagtccctttaggagatcagtttaatttctcggatggttcgagatcggtggtccatggttagtaccctaagatccgcgctgttagggttcgtagatggaggcgacctgttctgattgttaacttgtcagtacctgggaaatcctgggatggttctagctcgtccgcagatgagatcgatttcatgatcctctgtatcttgtttcgttgcctaggttccgtctaatctatccgtggtatgatgtagatgttttgatcgtgctaactacgtcttgtaaagttaattgtcaggtcataatttttagcatgcctttttttttgtttggttttgtctaattgggctgtcgttctagatcagagtagaagactgttccaaactacctgctggatttattgaacttggatctgtatgtgtgtcacatatcttcataaattcatgattaagatggattgaaatatcttttatctttttggtatggatagttctatatgttggtgtggctttgttagatgtatacatgcttagatacatgaagcaacgtgctgctactgtttagtaattgctgttcatttgtctaataaacagataaggatatgtatttatgttgctgttggttttgctggtactttgttggatacaaatgcttcaatacagaaaacagcatgctgctacgatttaccatttatctaatcttatcatatgtctaatctaataaacaaacatgcttttaaattatcttcatatgcttggatgatggcatacacagcggctatgtgtggttttttaaatacccagcatcatgggcatgcatgacactgctttaatatgctttttatttgcttgagactgtttcttttgtttatactgaccctttagttcggtgactcttctgcaggtcgactttaacttagcctaggatccatggcccagtccaagcacggcctgaccaaggagatgaccatgaagtaccgcatggagggctgcgtggacggccacaagttcgtgatcaccggcgagggcatcggctaccccttcaagggcaagcaggccatcaacctgtgcgtggtggagggcggccccttgcccttcgccgaggacatcttgtccgccgccttcatgtacggcaaccgcgtgttcaccgagtacccccaggacatcgtcgactacttcaagaactcctgccccgccggctacacctgggaccgctccttcctgttcgaggacggcgccgtgtgcatctgcaacgccgacatcaccgtgagcgtggaggagaactgcatgtaccacgagtccaagttctacggcgtgaacttccccgccgacggccccgtgatgaagaagatgaccgacaactgggagccctcctgcgagaagatcatccccgtgcccaagcagggcatcttgaagggcgacgtgagcatgtacctgctgctgaaggacggtggccgcttgcgctgccagttcgacaccgtgtacaaggccaagtccgtgccccgcaagatgcccgactggcacttcatccagcacaagctgacccgcgaggaccgcagcgacgccaagaaccagaagtggcacctgaccgagcacgccatcgcctccggctccgccttgccctccggactcagatctcgatagggtaccaatggccagttaacagatccagctgctgctgttctagggttcacaagtctgcctatttgtcttccccaatggagctatggttgtctggtctggtccttggtcgtgtcccgtttcattgtgtactatttacctgtaatgtgtatccttaagtctggtttgatggtgtctgaaacgttttgctgtggtagagcagcatggaagaactataatgaataagtgatccctaatcattgtgtccaaattttgcttctgctatacccttttgtgctgtttcttatgttttgcttaaaaatttgatctgacaaacaaatttgtctaaattatgctcttgttctgactgtgtactgtacacatttgtattgctaccggtttggcacatagttttctctttgattgcagatcaaacccttctgattgcagattgcttggctatggctgatgtgctcactgttcttctttagcttgtatattgctgatggtggcttggctacggctgaaaaagttgctgctgcgccgacttggcaactgttgctccagtaatgctttgtcctctcttcctagccgccgacttggcacttggcagctgttgctcctgtaatgcgttgttatctcttatctcttgagatgtactatgattttgaggctgtttgacttgtgccagattgccagtgctgatgctatattatctcaggtttttatgctagtatatgttttactgtgtgctgcctgtgtcgagttacgtaatctattgaaccgctatgcgtgttgatgccctgttgttgcttgccagattgatgcccctgttgcttgcagcttgcaagctgtagtgaaatcctaaaattcgaaaccaaatctattctgaacttttgaagatctgtgatgtccggaagaaaagattcaaacagataaacgggactctccagaatctataaaataaatgatcgacaaacgctttgctttggtaggcttcctagttagttagcggaccgggatccgacggcgtcttcaccgccccgccgccgcccgagccggacttgtcgctgccgccgccgctgctcatcttgcgcgcttgtgtccctccctcagtccctgcgttcgcggatcgcgggcgggtgcgacccgtttggactccggccggtagccttcgtgccgacctcgctcggtccaccggtttgtcggggacccacatgtcagtgaaggtacgcgtccacgtccacagaccctactaccccagacgagtccaaatcgctgttccctcacactctcgtgtaccagcgcgcggcggaaagcacctttccaacaaccgccgacacgtcggtcccacgtcggcatgctccaccggtcagtgtttggcgtgtacggctcccggcgacgaacgagtgtggcctaagctttcctactcccatcccatctgagccacacatctctctcacgccacgcgcacaaaacagccaggctcccacgcgcatcaaccggctctccctttccgtgccactcgcccccaagccccaaaccctcgccgccgcctccgagacagccgccgccacctaggccatggccaccgccgccgccgcgtctaccgcgctcactggcgccactaccgctgcgcccaaggcgaggcgccgggcgcacctcctggccacccgccgcgccctcgccgcgcccatcaggtgctcagcggcgtcacccgccatgccgatggctcccccggccaccccgctccggccgtggggccccaccgagccccgcaagggtgctgacatcctcgtcgagtccctcgagcgctgcggcgtccgcgacgtcttcgcctaccccggcggcgcgtcgatggagatccaccaggcactcacccgctcccccgtcatcgccaaccacctcttccgccacgagcaaggggaggcctttgccgcctccggctacgcgcgctcctcgggccgcgtcggcgtctgcatcgccacctccggccccggcgccaccaacctagtctccgcgctcgccgacgcgctgctcgattccgtcccgatggtcgccatcacgggacaggtggcgcgacgcatgattggcaccgacgccttccaggagacgcccatcgtcgaggtcacgcgctccatcaccaagcacaactacctggtcctcgacgtcgacgacatcccccgcgtcgtgcaggaggctttcttcctcgcctcctctggtcgaccagggccggtgcttgtcgacatccccaaggacatccagcagcagatggcggtgcctgtctgggacaagcccatgagtctgcctgggtacattgcgcgccttcccaagccccctgcgactgagttgcttgagcaggtgctgcgtcttgttggtgaatcgcggcgccctgttctttatgtgggcggtggctgcgcagcatctggtgaggagttgcgacgctttgtggagctgactggaatcccggtcacaactactcttatgggcctcggcaacttccccagcgacgacccactgtctctgcgcatgctaggtatgcatgggacggtgtatgcaaattatgcagtggataaggccgatctgttgcttgcacttggtgtgcggtttgatgatcgcgtgacagggaagattgaggcttttgcaagcagggctaagattgtgcacgttgatattgatccggctgagattggcaagaacaagcagccacatgtgtccatctgtgcagatgttaagcttgctttgcagggcatgaatgctcttcttgaaggaagcacatcaaagaagagctttgactttggctcatggaacgatgagttggatcagcagaagagggaattcccccttgggtataaaacatctaatgaggagatccagccacaatatgctattcaggttcttgatgagctgacgaaaggcgaggccatcatcggcacaggtgttgggcagcaccagatgtgggcggcacagtactacacttacaagcggccaaggcagtggttgtcttcagctggtcttggggctatgggatttggtttgccggctgctgctggtgcttctgtggcaaacccaggtgtcactgttgttgacatcgatggagatggtagctttctcatgaacgttcaggagctagctatgatccgaattgagaacctcccagtgaaggtctttgtgctaaacaaccagcacctggggatggtggtgcagttggaggacaggttctataaggccaacagagcgcacacatacttgggaaacccagagaatgaaagtgagatatatccagatttcgtgacgatcgccaaagggttcaacattccagccgtccgtgtgacaaagaagaacgaagtccgcgcagcgataaagaagatgctcgagactccagggccgtacctcttggatataatcgtcccacaccaggagcatgtgttgcctatgatccctagtggtggggctttcaaggatatgatcctggatggtgatggcaggactgtgtactgacttcgaataggtacccggggatcctctagtgccgtgggtcgtttaagctgccgctgtacctgtgtcgtctggtgccttctggtgtacctgggaggttgtcgtctatcaagtatctgtggttggtgtcatgagtcagtgagtcccaatactgttcgtgtcctgtgtgcattatacccaaaactgttatgggcaaatcatgaataagcttgatgttcgaacttaaaagtctctgctcaatatggtattatggttgtttttgttcgtctcctaatatttgcctgggatcaaattttattggctggtgttcatttgacctccatgttcttgctaggctccattttttactctacagccataatatgtttgattgtttggtttgttctttgttgtacacctggttctgtcgagcttagttttcgacactggcttacagcttaacatgttgctattttattgggttctgattgctattttattgggttctgattgctagtttttgctgaatccaaaaaccatgttatttatttaagcgatccaggttattattatgatggtggctaagtttttttttttccaagggtaaattttctggattctccagtgtttctgtggccgaattcaatcactagagtcgacctgcaaagcttcggtccgggcctagaaggcccgcgccacttacgcttgattccgatgacttcgtaggttcctagctcaagccgctcgtgtccaagcgtcacttacgattagctaatgattacggcatctaggaccgactagctagctagctaagagctcggtaccgagctcgaattcattccgattaatcgtggcctcttgctcttcaggatgaagagctatgtttaaacgtgcaagcgctactagacaattcagtacattaaaaacgtccgcaatgtgttattaagttgtctaagcgtcaatttgtttacaccacaatatatcctgcca

SEQ ID NO: 25 - DNA, 17841 bp, Artificial sequence
  PHP93766
gtttacccgccaatatatcctgtcaaacactgcggccgcacttgaccgcggatggagccggagctgtggtgaggccatcgacgggaggtgggggagaacacagtctcagtgttctttgtgagtccgcaaggtttttagcttttctgtattaattaaggttgctgttggctgtagaatacggtcgtggaagagctgtatcggtagctactacgtaagctattatatactggaagtctggagctcgtcgatctccggtcgtcttcctccatttctcctcgtcttgctttgactgctgctaccatttgcttctgttttctgatgaagcatgccatgtcggccaccagtgtttgtgtggtttttgcagggaatggctttcaagtgctgtgattgaatggccctcgtcgtcctcggctgagctcacatggacgcgtcatgtgagtgagatatatgatcatatgatgagtggggttcgggtgagtgcgtacttgaagtaggatcccgctttcactcattcattcattggcctttaaaccgggaaattttcgcgaggagatggagggaagcaagcagggtgacgagtgcagagtgccgcgagcgctttgtcaaaaggcaccgccgtaggcaaaaaaatcaatggccctgactgactcgatggtagtactactgtagagactagagagggttgctccccatatcttcgtgtgacttttactccagcattgcatttccgtcattgagacgttaattaatagcagctttcgggacagatgactgtggccatgtttcgtcacggccgcttcgtgccagctgggggtactatagtactgtgattttgttagtaaaaactttcattaggccaccattgacgaccgggccttcgcttttgctgcgctaattaaccatttcccggcgaccgaagggaacatgaacatgccccgacacatgagggcatgaggactagtgttctccctgtcgttcgttgacttgactagtgatagtttaaacgctcttcaactggaagagcggttactaccggttcactagctagctgctaatcgagctagttaccctatgaggtgacatgaagcgctcacggttactatgacggttagcttcacgactgttggtggcagtagcgtacgacttagctatagttccggacttacctagctaataacttcgtatagcatacattatacgaagttatggttaccgaattcgagctcggtaccctggttcacaaactcaatacaacacacagtggagtagggtattacgctccggcggcccgaaccactctaaatccttgtgtcctcgtgtgctcttccaccattaatgactgtaattgcagggacacgaagagttgtagcgcttttgccaacaagatccgctatatgctagtagagtggaacctgcacagcaacaagcatccaataatctgagaataagaattatgtgtggtgatggttctcatctctgcaactcgccattttcgcgagagaaccaaatccaagttggtgaagatcatgatttgggctcatgggctggcatagtagctattacctttgcaattgtggttcgaatctatccgatattctccttttcagggagagctaatgcttatgcttattgggtattttggtttgacactgcttcacgcccaaaaaaaggcaactatgtctgagttggatatggcccaaaaaaaggcagctatgtctgagttggatatggaagtcttctttcgtttagggtgaagtaagaccaagctcatgagcttattatcttaggtcggaacaaattagttgataggcatggcacatttatcaaattataatgattttaacagaaaagcaacacctctttttcagcagcaccagctttgcaagctgcaattgacactccaagcatagtatttgctccaaactcagcctgcatttcgcacaatatcatatctatttccatttggataaaatatattttccagaaatatgggaacagaatcaagatacagaaaaaagttgtggtagtagtggtaagtggaaacacaagtacagtgaaaagatagcattatttctgaacagtcaaattaaccgaaataagtagtatcacatactgcccctaaattgactacacccaatgtaaagaattgcttgagcatattgagccatcagttgtttgtttgtgtaacggatttgacaatgcagagttcaggagcaaaaaaccgcaaaggagagaaagagggaaaggatctcctagtatcccaccttgtggcgcgccctgtcaagtgcatgatggcctggtcgatctgcgtctgctgctgcggttccatcccaacgagtgcctccgacaccttgtcgttgatcacccgcaccgcgtaggcgacccccctggcgaggaacttccgcctctcggaggccccggccgcgtcggcggcggcgccctcgagcgcgcccacgctagccgtagatgctcggtgcacggccttgttggtgtgcaactcgacctcaacggccggtgcgctacgcccgtcaaggatctggcgcgcccgcaccctcgtgatcacggtgggcgcctcccgcctcatgtggccgacgatgaaaagcgccgggttaggggccttggcgcgcaccgccgtattcagggcctcctcgctcttgcgcgagagcaggtgcttccccaggtactcctgcactgacaaggctgccacagcggtggaatttgtcctcacgacttcgccacgtcgtcctcacctccctggcttcccacgactccgccgtatcgaggtgctcggtgggtcgtcttaatccgaagtccgaactaggaagacgagacagagaggtctgaggaatgggcctcgtttgatgttgagctgaattatttttccagcataagcccaggtcttggtccatgaacaaaattactagaaacccagcccagtactacgatctaaaagagggactgccactggatagctctctctagcattctccacgctccaatacagcggcgtcgtgtctatccgggtctatccgcgaacacgtgagaactctccagaaactgctttctcctccacttcatctctctcgctttccctctataaaaagaccccttctaggaattgagggagacagcaagcaccaagcagcgatccgaagctcaatcaattcactcaaacctcttccccaaatcttcgattagatcttcgttgacaagaagactagaaccgaacctgacatgtccaacctgctcacggttcaccagaaccttccggctcttccagtggacgcgacgtccgatgaagtcaggaagaacctcatggacatgttccgcgacaggcaagcgttcagcgagcacacctggaagatgctgctctccgtctgccgctcctgggctgcatggtgcaagctgaacaacaggaagtggttccccgctgagcccgaggacgtgagggattaccttctgtacctgcaagcgcgaggtttgtttctgcttctacctttgatatatatataataattatcattaattagtagtaatataatatttcaaatatttttttcaaaataaaagaatgtagtatatagcaattgcttttctgtagtttataagtgtgtatattttaatttataacttttctaatatatgaccaaaacatggtgatgcctaggtctggcagtgaagaccatccagcaacaccttggacaactgaacatgcttcacaggcgctccggcctcccgcgccccagcgactcgaacgccgtgagcctcgtcatgcgccgcatcaggaaggaaaacgtcgatgccggcgaaagggcaaagcaggccctcgcgttcgagaggaccgatttcgaccaggtccgcagcctgatggagaacagcgacaggtgccaggacattaggaacctggcgttcctcggaattgcatacaacacgctcctcaggatcgcggaaattgcccgcattcgcgtgaaggacattagccgcaccgacggcggcaggatgcttatccacattggcaggaccaagacgctcgtttccaccgcaggcgtcgaaaaggccctcagcctcggagtgaccaagctcgtcgaacgctggatctccgtgtccggcgtcgcggacgacccaaacaactacctcttctgccgcgtccgcaagaacggggtggctgcccctagcgccaccagccaactcagcacgagggccttggaaggtattttcgaggccacccaccgcctgatctacggcgcgaaggatgacagcggtcaacgctacctcgcatggtccgggcactccgcccgcgttggagctgctagggacatggcccgcgccggtgtttccatccccgaaatcatgcaggcgggtggatggacgaacgtgaacattgtcatgaactacattcgcaaccttgacagcgagacgggcgcaatggttcgcctcctggaagatggtgactgaggtacccaacctagacttgtccatcttctggattggccaacttaattaatgtatgaaataaaaggatgcacacatagtgacatgctaatcactataatgtgggcatcaaagttgtgtgttatgtgtaattactagttatctgaataaaagagaaagagatcatccatatttcttatcctaaatgaatgtcacgtgtctttataattctttgatgaaccagatgcatttcattaaccaaatccatatacatataaatattaatcatatataattaatatcaattgggttagcaaaacaaatctagtctaggtgtgttttgcgatccgatcgaggccggccacactgatagtttaaactgaaggcgggaaacgacaatctgatcatgagcggagaattaagggagtcacgttatgacccccgccgatgacgcgggacaagccgttttacgtttggaactgacagaaccgcaacgattgaaggagccactcagccgcgggtttctggagtttaatgagctaagcacatacgtcagaaaccattattgcgcgttcaaaagtcgcctaaggtcactatcagctagcaaatatttcttgtcaaaaatgctccactgacgttccataaattcccctcggtatccaattagagtctcatattcactctcccggcggatctcgactctagaggatcgctcaggaaggccgctgagatagagccatggcggccaatgcgggcggcggtggagcgggaggaggcagcggcagcggcagcgtggctgcgccggcggtgtgccgccccagcggctcgcggtggacgccgacgccggagcagatcaggatgctgaaggagctctactacggctgcggcatccggtcgcccagctcggagcagatccagcgcatcaccgccatgctgcggcagcacggcaagatcgagggcaagaacgtcttctactggttccagaaccacaaggcccgcgagcgccagaagcgccgcctcaccagcctcgacgtcaacgtgcccgccgccggcgcggccgacgccaccaccagccaactcggcgtcctctcgctgtcgtcgccgccgccttcaggcgcggcgcctccctcgcccaccctcggcttctacgccgccggcaatggcggcggatcggctgtgctgctggacacgagttccgactggggcagcagcggcgctgctatggccaccgagacatgcttcctgcaggactacatgggcgtgacggacacgggcagctcgtcgcagtggccacgcttctcgtcgtcggacacgataatggcggcggccgcggcgcgggcggcgacgacgcgggcgcccgagacgctccctctcttcccgacctgcggcgacgacggcggcagcggtagcagcagctacttgccgttctggggtgccgcgtccacaactgccggcgccacttcttccgttgcgatccaacagcaacaccagctgcaggagcagtacagcttttacagcaacagcaacagcacccagctggccggcaccggcaaccaagacgtatcggcaacagcagcagcagccgccgccctggagctgagcctcagctcatggtgctccccttaccctgctgcagggagtatgtgagagcaacgcgagctgccactgctcttcactgatgtctctggaatggaaggaggaggaagtgagaacagatcattcgacaaagcagcattagtccgttgatcggtggaagaccactcgtcagtgttgagttgaatgtttgatcaataaaatacggcaatgctgtaagggttgttttttatgccattgataatacactgtactgttcagttgttgaactctatttcttagccatgccaagtgcttttcttattttgaataacattacagcaaaaagttgaaagacaaaaaaaaaaacccccgaacagagtgctttgggtcccaagcttctttagactgtgttcggcgttccccctaaatttctccccctatatctcactcacttgtcacatcagcgttctctttccccctatatctccacgctctacagcagttccacctatatcaaacctctataccccaccacaacaatattatatactttcatcttcaactaactcatgtaccttccaatttttttctactaataattatttacgtgcacagaaacttagcaaggagagagagagcgggaatttaaatgctcggcgttaggcttttagtccgctaggtggctagaccgaggttaggacgctagttcactaggggcctagtggtgttttaagacgtcacggtcacccggtccgggcctagaaggccagcttcaagtttgtacaaaaaagcaggctccggccagaatggcccggaccgaagcttgcatgcctgcagtgcagcgtgacccggtcgtgcccctctctagagataatgagcattgcatgtctaagttataaaaaattaccacatattttttttgtcacacttgtttgaagtgcagtttatctatctttatacatatatttaaactttactctacgaataatataatctatagtactacaataatatcagtgttttagagaatcatataaatgaacagttagacatggtctaaaggacaattgagtattttgacaacaggactctacagttttatctttttagtgtgcatgtgttctcctttttttttgcaaatagcttcacctatataatacttcatccattttattagtacatccatttagggtttagggttaatggtttttatagactaatttttttagtacatctattttattctattttagcctctaaattaagaaaactaaaactctattttagtttttttatttaataatttagatataaaatagaataaaataaagtgactaaaaattaaacaaataccctttaagaaattaaaaaaactaaggaaacatttttcttgtttcgagtagataatgccagcctgttaaacgccgtcgacgagtctaacggacaccaaccagcgaaccagcagcgtcgcgtcgggccaagcgaagcagacggcacggcatctctgtcgctgcctctggacccctctcgagagttccgctccaccgttggacttgctccgctgtcggcatccagaaattgcgtggcggagcggcagacgtgagccggcacggcaggcggcctcctcctcctctcacggcaccggcagctacgggggattcctttcccaccgctccttcgctttcccttcctcgcccgccgtaataaatagacaccccctccacaccctctttccccaacctcgtgttgttcggagcgcacacacacacaaccagatctcccccaaatccacccgtcggcacctccgcttcaaggtacgccgctcgtcctcccccccccccctctctaccttctctagatcggcgttccggtccatgcatggttagggcccggtagttctacttctgttcatgtttgtgttagatccgtgtttgtgttagatccgtgctgctagcgttcgtacacggatgcgacctgtacgtcagacacgttctgattgctaacttgccagtgtttctctttggggaatcctgggatggctctagccgttccgcagacgggatcgatttcatgattttttttgtttcgttgcatagggtttggtttgcccttttcctttatttcaatatatgccgtgcacttgtttgtcgggtcatcttttcatgcttttttttgtcttggttgtgatgatgtggtctggttgggcggtcgttctagatcggagtagaattctgtttcaaactacctggtggatttattaattttggatctgtatgtgtgtgccatacatattcatagttacgaattgaagatgatggatggaaatatcgatctaggataggtatacatgttgatgcgggttttactgatgcatatacagagatgctttttgttcgcttggttgtgatgatgtggtgtggttgggcggtcgttcattcgttctagatcggagtagaatactgtttcaaactacctggtgtatttattaattttggaactgtatgtgtgtgtcatacatcttcatagttacgagtttaagatggatggaaatatcgatctaggataggtatacatgttgatgtgggttttactgatgcatatacatgatggcatatgcagcatctattcatatgctctaaccttgagtacctatctattataataaacaagtatgttttataattattttgatcttgatatacttggatgatggcatatgcagcagctatatgtggatttttttagccctgccttcatacgctatttatttgcttggtactgtttcttttgtcgatgctcaccctgttgtttggtgttacttctgcaggtcgactttaacttagcctaggatccgcccatggactccagcagcttcctccctgccgccggcgcggagaatggctcggcggcgggcggcgccaacaatggcggcgctgctcagcagcatgcggcgccggcgatccgcgagcaggaccggctgatgccgatcgcgaacgtgatccgcatcatgcggcgcgtgctgccggcgcacgccaagattagcgacgacgccaaggagacgatccaggagtgcgtgtcggagtacatcagcttcatcacgggggaggccaacgagcggtgccagcgggagcagcgcaagaccatcaccgccgaggacgtgctgtgggccatgagccgcctcggcttcgacgactacgtcgagccgctcggcgcctacctccaccgctaccgcgagttcgagggcgacgcgcgcggcgtcgggctcgtccctggggccgccccatcgcgcggcggcgaccaccacccgcactccatgtcgccagcggcgatgctcaagtcccgcgggccagtctccggagccgccatgctaccgcaccaccaccaccaccacgacatgcagatgcacgccgccatgtacgggggaacggccgtgcccccgccggccgggcctcctcaccacggcgggttcctcatgccacacccacagggtagtagccactacctgccttacgcgtacgagcccacgtacggcggtgagcacgcgatggctgcatactatggaggcgccgcgtacgcgcccggcaacggcgggagcggcgacggcagtggcagtggcggcggtggcgggagcgcgtcgcacacaccgcagggcagcggcggcttggagcacccgcacccgttcgcgtacaagtagttatgtacaggtacctgacatcttatagtctgcaacctctcgtgtctgaattcctatctttatcaagtgttattgcttccacgactataggacagctttcgtcgaaagcttttgctcatgtgatctcgaaggattcatctagtctgatttttcgtgacttgtatcggttttattggattcatccaacatatatcaataaaaaatgagttgtgtttcctttcttcctagttcagttaaaattatttccctcctgcgcttgtgctgtaattgtctgtgtacctgttgtttgtgactgtgttagttcccttggatatgatttcgtatttgatatgtacatggagatagcttagcttcattattggagtatgaagttagtatgacatagtcactctcctggaaaattgacactgcaaaccatatttttattctgaaccacaaatcctagtcagtccgctggcatatgccgtccgtttgctgaatccagaacgtgggtttggagatgtacggctgagatgcctctatgcgaaggggatttcgtggtgaaacgagatgggagtagagcaacgcccgtggaagatgcttcaaacttccacacttttgagcaacgatcggcagtagtaaggtagacgatttcaagatcaaagcatatgaagataaacaacatcaacaacaaaatttgttggggttctatagagagaaacagagctacatacatacactgttttgtatctaccatctgagatgatgaaaagatgaaaaactaaagaatgccccggcgccaacgccaggacacgccgcgcgcgcgtcacccgagccatctcttgacccagccggcgctgtatatttacacacgttgcagcatcgatcaccacctgttcgatcgcgtcgccgtcaccggtaccgagctcgaattccggattaagacccgtcgtcaagtaggaattccagaaatcaacgcacggtaactaaatcctcgcgctaagctgggtcagtgcgcacgataacttcgtatagcatacattatacgaagttataacagcggaccgggttaccgaattcctgcccttaaggccaattgttcaagattcattcaacaattgaaacatctcccatgattaaatcagtataaggttgctatggtcttgcttgacaaagtttttttttgagggaatttcaactaaatttttgagtgaaactatcaaatactgattttaaaaaatttttataaaaggaagcgcagagataaaaggccatctatgctacaaaagtacccaaaaatgtaatcctaaagtatgaattgcattttttttttgtttggacgaaaggaaaggagtattaccacaagaatgatatcatcttcatatttagatcttttttgggtaaagcttgagattctctaaatatagagaaatcagaagaaaaaaaaaccgtgttttggtggttttgatttctagcctccacaataactttgacggcgtcgacaagtctaacggacaccaagcagcgaaccaccagcgccgagccaagcgaagcagacggccgagacgttgacaccttcggcgcggcatctctcgagagttccgctccggcgctccacctccaccgctggcggtttcttattccgttccgttccgcctcctgctctgctcctctccacaccacacggcacgaaaccgttacggcaccggcagcacccagcacgggagaggggattcctttcccaccgttccttccctttccgccccgccgctataaatagccagccccatccccagcttttttccccaatctcatctcctctctcctgttgttcggagcacacgcacaatccgatcgatccccaaatccccttcgtctctcctcgcgagcctcgtggatcccagcttcaaggtacggcgatcgatcatcccccctccttctctctaccttcttttctctagactacatcggatggcgatccatggttagggcctgctagtttcccttcctgttttgtcgatggctgcgaggcacaatagatctgatggcgttatgacggctaacttgtcatgttgttgcgatttatagtccctttaggagatcagtttaatttctcggatggttcgagatcggtggtccatggttagtaccctaagatccgcgctgttagggttcgtagatggaggcgacctgttctgattgttaacttgtcagtacctgggaaatcctgggatggttctagctcgtccgcagatgagatcgatttcatgatcctctgtatcttgtttcgttgcctaggttccgtctaatctatccgtggtatgatgtagatgttttgatcgtgctaactacgtcttgtaaagttaattgtcaggtcataatttttagcatgcctttttttttgtttggttttgtctaattgggctgtcgttctagatcagagtagaagactgttccaaactacctgctggatttattgaacttggatctgtatgtgtgtcacatatcttcataaattcatgattaagatggattgaaatatcttttatctttttggtatggatagttctatatgttggtgtggctttgttagatgtatacatgcttagatacatgaagcaacgtgctgctactgtttagtaattgctgttcatttgtctaataaacagataaggatatgtatttatgttgctgttggttttgctggtactttgttggatacaaatgcttcaatacagaaaacagcatgctgctacgatttaccatttatctaatcttatcatatgtctaatctaataaacaaacatgcttttaaattatcttcatatgcttggatgatggcatacacagcggctatgtgtggttttttaaatacccagcatcatgggcatgcatgacactgctttaatatgctttttatttgcttgagactgtttcttttgtttatactgaccctttagttcggtgactcttctgcaggtcgactttaacttagcctaggatccatggcccagtccaagcacggcctgaccaaggagatgaccatgaagtaccgcatggagggctgcgtggacggccacaagttcgtgatcaccggcgagggcatcggctaccccttcaagggcaagcaggccatcaacctgtgcgtggtggagggcggccccttgcccttcgccgaggacatcttgtccgccgccttcatgtacggcaaccgcgtgttcaccgagtacccccaggacatcgtcgactacttcaagaactcctgccccgccggctacacctgggaccgctccttcctgttcgaggacggcgccgtgtgcatctgcaacgccgacatcaccgtgagcgtggaggagaactgcatgtaccacgagtccaagttctacggcgtgaacttccccgccgacggccccgtgatgaagaagatgaccgacaactgggagccctcctgcgagaagatcatccccgtgcccaagcagggcatcttgaagggcgacgtgagcatgtacctgctgctgaaggacggtggccgcttgcgctgccagttcgacaccgtgtacaaggccaagtccgtgccccgcaagatgcccgactggcacttcatccagcacaagctgacccgcgaggaccgcagcgacgccaagaaccagaagtggcacctgaccgagcacgccatcgcctccggctccgccttgccctccggactcagatctcgatagggtaccaatggccagttaacagatccagctgctgctgttctagggttcacaagtctgcctatttgtcttccccaatggagctatggttgtctggtctggtccttggtcgtgtcccgtttcattgtgtactatttacctgtaatgtgtatccttaagtctggtttgatggtgtctgaaacgttttgctgtggtagagcagcatggaagaactataatgaataagtgatccctaatcattgtgtccaaattttgcttctgctatacccttttgtgctgtttcttatgttttgcttaaaaatttgatctgacaaacaaatttgtctaaattatgctcttgttctgactgtgtactgtacacatttgtattgctaccggtttggcacatagttttctctttgattgcagatcaaacccttctgattgcagattgcttggctatggctgatgtgctcactgttcttctttagcttgtatattgctgatggtggcttggctacggctgaaaaagttgctgctgcgccgacttggcaactgttgctccagtaatgctttgtcctctcttcctagccgccgacttggcacttggcagctgttgctcctgtaatgcgttgttatctcttatctcttgagatgtactatgattttgaggctgtttgacttgtgccagattgccagtgctgatgctatattatctcaggtttttatgctagtatatgttttactgtgtgctgcctgtgtcgagttacgtaatctattgaaccgctatgcgtgttgatgccctgttgttgcttgccagattgatgcccctgttgcttgcagcttgcaagctgtagtgaaatcctaaaattcgaaaccaaatctattctgaacttttgaagatctgtgatgtccggaagaaaagattcaaacagataaacgggactctccagaatctataaaataaatgatcgacaaacgctttgctttggtaggcttcctagttagttagcggaccgggatccgacggcgtcttcaccgccccgccgccgcccgagccggacttgtcgctgccgccgccgctgctcatcttgcgcgcttgtgtccctccctcagtccctgcgttcgcggatcgcgggcgggtgcgacccgtttggactccggccggtagccttcgtgccgacctcgctcggtccaccggtttgtcggggacccacatgtcagtgaaggtacgcgtccacgtccacagaccctactaccccagacgagtccaaatcgctgttccctcacactctcgtgtaccagcgcgcggcggaaagcacctttccaacaaccgccgacacgtcggtcccacgtcggcatgctccaccggtcagtgtttggcgtgtacggctcccggcgacgaacgagtgtggcctaagctttcctactcccatcccatctgagccacacatctctctcacgccacgcgcacaaaacagccaggctcccacgcgcatcaaccggctctccctttccgtgccactcgcccccaagccccaaaccctcgccgccgcctccgagacagccgccgccacctaggccatggccaccgccgccgccgcgtctaccgcgctcactggcgccactaccgctgcgcccaaggcgaggcgccgggcgcacctcctggccacccgccgcgccctcgccgcgcccatcaggtgctcagcggcgtcacccgccatgccgatggctcccccggccaccccgctccggccgtggggccccaccgagccccgcaagggtgctgacatcctcgtcgagtccctcgagcgctgcggcgtccgcgacgtcttcgcctaccccggcggcgcgtcgatggagatccaccaggcactcacccgctcccccgtcatcgccaaccacctcttccgccacgagcaaggggaggcctttgccgcctccggctacgcgcgctcctcgggccgcgtcggcgtctgcatcgccacctccggccccggcgccaccaacctagtctccgcgctcgccgacgcgctgctcgattccgtcccgatggtcgccatcacgggacaggtggcgcgacgcatgattggcaccgacgccttccaggagacgcccatcgtcgaggtcacgcgctccatcaccaagcacaactacctggtcctcgacgtcgacgacatcccccgcgtcgtgcaggaggctttcttcctcgcctcctctggtcgaccagggccggtgcttgtcgacatccccaaggacatccagcagcagatggcggtgcctgtctgggacaagcccatgagtctgcctgggtacattgcgcgccttcccaagccccctgcgactgagttgcttgagcaggtgctgcgtcttgttggtgaatcgcggcgccctgttctttatgtgggcggtggctgcgcagcatctggtgaggagttgcgacgctttgtggagctgactggaatcccggtcacaactactcttatgggcctcggcaacttccccagcgacgacccactgtctctgcgcatgctaggtatgcatgggacggtgtatgcaaattatgcagtggataaggccgatctgttgcttgcacttggtgtgcggtttgatgatcgcgtgacagggaagattgaggcttttgcaagcagggctaagattgtgcacgttgatattgatccggctgagattggcaagaacaagcagccacatgtgtccatctgtgcagatgttaagcttgctttgcagggcatgaatgctcttcttgaaggaagcacatcaaagaagagctttgactttggctcatggaacgatgagttggatcagcagaagagggaattcccccttgggtataaaacatctaatgaggagatccagccacaatatgctattcaggttcttgatgagctgacgaaaggcgaggccatcatcggcacaggtgttgggcagcaccagatgtgggcggcacagtactacacttacaagcggccaaggcagtggttgtcttcagctggtcttggggctatgggatttggtttgccggctgctgctggtgcttctgtggcaaacccaggtgtcactgttgttgacatcgatggagatggtagctttctcatgaacgttcaggagctagctatgatccgaattgagaacctcccagtgaaggtctttgtgctaaacaaccagcacctggggatggtggtgcagttggaggacaggttctataaggccaacagagcgcacacatacttgggaaacccagagaatgaaagtgagatatatccagatttcgtgacgatcgccaaagggttcaacattccagccgtccgtgtgacaaagaagaacgaagtccgcgcagcgataaagaagatgctcgagactccagggccgtacctcttggatataatcgtcccacaccaggagcatgtgttgcctatgatccctagtggtggggctttcaaggatatgatcctggatggtgatggcaggactgtgtactgacttcgaataggtacccggggatcctctagtgccgtgggtcgtttaagctgccgctgtacctgtgtcgtctggtgccttctggtgtacctgggaggttgtcgtctatcaagtatctgtggttggtgtcatgagtcagtgagtcccaatactgttcgtgtcctgtgtgcattatacccaaaactgttatgggcaaatcatgaataagcttgatgttcgaacttaaaagtctctgctcaatatggtattatggttgtttttgttcgtctcctaatatttgcctgggatcaaattttattggctggtgttcatttgacctccatgttcttgctaggctccattttttactctacagccataatatgtttgattgtttggtttgttctttgttgtacacctggttctgtcgagcttagttttcgacactggcttacagcttaacatgttgctattttattgggttctgattgctattttattgggttctgattgctagtttttgctgaatccaaaaaccatgttatttatttaagcgatccaggttattattatgatggtggctaagtttttttttttccaagggtaaattttctggattctccagtgtttctgtggccgaattcaatcactagagtcgacctgcaaagcttcggtccgggcctagaaggcccgcgccacttacgcttgattccgatgacttcgtaggttcctagctcaagccgctcgtgtccaagcgtcacttacgattagctaatgattacggcatctaggaccgactagctagctagctaagagctcggtaccgagctcgaattcattccgattaatcgtggcctcttgctcttcaggatgaagagctatgtttaaacgtgcaagcgctactagacaattcagtacattaaaaacgtccgcaatgtgttattaagttgtctaagcgtcaatttgtttacaccacaatatatcctgcca

SEQ ID NO: 26 - DNA, 18510 bp, Artificial sequence
  PHP93925
gtttacccgccaatatatcctgtcaaacactgcggccgcacttgaccgcggatggagccggagctgtggtgaggccatcgacgggaggtgggggagaacacagtctcagtgttctttgtgagtccgcaaggtttttagcttttctgtattaattaaggttgctgttggctgtagaatacggtcgtggaagagctgtatcggtagctactacgtaagctattatatactggaagtctggagctcgtcgatctccggtcgtcttcctccatttctcctcgtcttgctttgactgctgctaccatttgcttctgttttctgatgaagcatgccatgtcggccaccagtgtttgtgtggtttttgcagggaatggctttcaagtgctgtgattgaatggccctcgtcgtcctcggctgagctcacatggacgcgtcatgtgagtgagatatatgatcatatgatgagtggggttcgggtgagtgcgtacttgaagtaggatcccgctttcactcattcattcattggcctttaaaccgggaaattttcgcgaggagatggagggaagcaagcagggtgacgagtgcagagtgccgcgagcgctttgtcaaaaggcaccgccgtaggcaaaaaaatcaatggccctgactgactcgatggtagtactactgtagagactagagagggttgctccccatatcttcgtgtgacttttactccagcattgcatttccgtcattgagacgttaattaatagcagctttcgggacagatgactgtggccatgtttcgtcacggccgcttcgtgccagctgggggtactatagtactgtgattttgttagtaaaaactttcattaggccaccattgacgaccgggccttcgcttttgctgcgctaattaaccatttcccggcgaccgaagggaacatgaacatgccccgacacatgagggcatgaggactagtgttctccctgtcgttcgttgacttgactagtgatagtttaaacgctcttcaactggaagagcggttactaccggttcactagctagctgctaatcgagctagttaccctatgaggtgacatgaagcgctcacggttactatgacggttagcttcacgactgttggtggcagtagcgtacgacttagctatagttccggacttacccttaagataacttcgtatagcatacattatacgaagttatgggcccacgcgtgaagagcggttaccagagctggtcacctttgtccaccaagatggaactgtcttcggccagaatggccatctggattcagcaggcctagaaggccatttatcgctatcaactttgtatagaaaagttgggccgaattcgagctcggtacggccagaatggcccggaccgggttacccggaccgaagcttgcatgcctgcagtgcagcgtgacccggtcgtgcccctctctagagataatgagcattgcatgtctaagttataaaaaattaccacatattttttttgtcacacttgtttgaagtgcagtttatctatctttatacatatatttaaactttactctacgaataatataatctatagtactacaataatatcagtgttttagagaatcatataaatgaacagttagacatggtctaaaggacaattgagtattttgacaacaggactctacagttttatctttttagtgtgcatgtgttctcctttttttttgcaaatagcttcacctatataatacttcatccattttattagtacatccatttagggtttagggttaatggtttttatagactaatttttttagtacatctattttattctattttagcctctaaattaagaaaactaaaactctattttagtttttttatttaataatttagatataaaatagaataaaataaagtgactaaaaattaaacaaataccctttaagaaattaaaaaaactaaggaaacatttttcttgtttcgagtagataatgccagcctgttaaacgccgtcgacgagtctaacggacaccaaccagcgaaccagcagcgtcgcgtcgggccaagcgaagcagacggcacggcatctctgtcgctgcctctggacccctctcgagagttccgctccaccgttggacttgctccgctgtcggcatccagaaattgcgtggcggagcggcagacgtgagccggcacggcaggcggcctcctcctcctctcacggcaccggcagctacgggggattcctttcccaccgctccttcgctttcccttcctcgcccgccgtaataaatagacaccccctccacaccctctttccccaacctcgtgttgttcggagcgcacacacacacaaccagatctcccccaaatccacccgtcggcacctccgcttcaaggtacgccgctcgtcctcccccccccccctctctaccttctctagatcggcgttccggtccatgcatggttagggcccggtagttctacttctgttcatgtttgtgttagatccgtgtttgtgttagatccgtgctgctagcgttcgtacacggatgcgacctgtacgtcagacacgttctgattgctaacttgccagtgtttctctttggggaatcctgggatggctctagccgttccgcagacgggatcgatttcatgattttttttgtttcgttgcatagggtttggtttgcccttttcctttatttcaatatatgccgtgcacttgtttgtcgggtcatcttttcatgcttttttttgtcttggttgtgatgatgtggtctggttgggcggtcgttctagatcggagtagaattctgtttcaaactacctggtggatttattaattttggatctgtatgtgtgtgccatacatattcatagttacgaattgaagatgatggatggaaatatcgatctaggataggtatacatgttgatgcgggttttactgatgcatatacagagatgctttttgttcgcttggttgtgatgatgtggtgtggttgggcggtcgttcattcgttctagatcggagtagaatactgtttcaaactacctggtgtatttattaattttggaactgtatgtgtgtgtcatacatcttcatagttacgagtttaagatggatggaaatatcgatctaggataggtatacatgttgatgtgggttttactgatgcatatacatgatggcatatgcagcatctattcatatgctctaaccttgagtacctatctattataataaacaagtatgttttataattattttgatcttgatatacttggatgatggcatatgcagcagctatatgtggatttttttagccctgccttcatacgctatttatttgcttggtactgtttcttttgtcgatgctcaccctgttgtttggtgttacttctgcaggtcgactttaacttagcctaggatccatggcggccaatgcgggcggcggtggagcgggaggaggcagcggcagcggcagcgtggctgcgccggcggtgtgccgccccagcggctcgcggtggacgccgacgccggagcagatcaggatgctgaaggagctctactacggctgcggcatccggtcgcccagctcggagcagatccagcgcatcaccgccatgctgcggcagcacggcaagatcgagggcaagaacgtcttctactggttccagaaccacaaggcccgcgagcgccagaagcgccgcctcaccagcctcgacgtcaacgtgcccgccgccggcgcggccgacgccaccaccagccaactcggcgtcctctcgctgtcgtcgccgccgccttcaggcgcggcgcctccctcgcccaccctcggcttctacgccgccggcaatggcggcggatcggctgtgctgctggacacgagttccgactggggcagcagcggcgctgctatggccaccgagacatgcttcctgcaggactacatgggcgtgacggacacgggcagctcgtcgcagtggccacgcttctcgtcgtcggacacgataatggcggcggccgcggcgcgggcggcgacgacgcgggcgcccgagacgctccctctcttcccgacctgcggcgacgacggcggcagcggtagcagcagctacttgccgttctggggtgccgcgtccacaactgccggcgccacttcttccgttgcgatccaacagcaacaccagctgcaggagcagtacagcttttacagcaacagcaacagcacccagctggccggcaccggcaaccaagacgtatcggcaacagcagcagcagccgccgccctggagctgagcctcagctcatggtgctccccttaccctgctgcagggagtatgtgagagcaacgcgagctgccactgctcttcactgatgtctctggaatggaaggaggaggaagtgagaacagatcattcgacaaagcagcattagtccgttgatcggtggaagaccactcgtcagtgttgagttgaatgtttgatcaataaaatacggcaatgctgtaagggttgttttttatgccattgataatacactgtactgttcagttgttgaactctatttcttagccatgccaagtgcttttcttattttgaataacattacagcaaaaagttgaaagacaaaaaaaaaaacccccgaacagagtgctttgggtcccaagcttctttagactgtgttcggcgttccccctaaatttctccccctatatctcactcacttgtcacatcagcgttctctttccccctatatctccacgctctacagcagttccacctatatcaaacctctataccccaccacaacaatattatatactttcatcttcaactaactcatgtaccttccaatttttttctactaataattatttacgtgcacagaaacttagcaaggagagagagagcgggaatttaaatgctcggcgttaggcttttagtccgctaggtggctagaccgaggttaggacgctagttcactaggggcctagtggtgttttaagggttaccatcgagcagctggcttgtggggaccagacaaaaaaggaatggtgcagaattgttaggcgcacctaccaaaagcatctttgcctttattgcaaagataaagcagattcctctagtacaagtggggaacaaaataacgtggaaaagagctgtcctgacagcccactcactaatgcgtatgacgaacgcagtgacgaccacaaaactcgagcaacgagatcatgagccaatcaaagaggagtgatgtagacctaaagcaataatggagccatgacgtaagggcttacgcccatacgaaataattaaaggctgatgtgacctgtcggtctctcagaacctttactttttatgtttggcgtgtatttttaaatttccacggcaatgacgatgtgaccgtcgacccactaaaacattgctttgtcaaaagctaaaaaagatgatgcccgacagccacttgtgtgaagcatgagaagccggtccctccactaagaaaattagtgaagcatcttccagtggtccctccactcacagctcaatcagtgagcaacaggacgaaggaaatgacgtaagccatgacgtctaatcccagcggccgctgcgtctggacgcacaagtcatagcattatcggctaaaatttcttaatttctaaattagtcatatcggctaagaaagtggggagcactatcatttcgtagaacaagaacaaggtatcatatatatatatatatataatatttaaactttgttaagtggaatcaaagtgctagtattaatggagtttcatgtgcattaaattttatgtcacatcagcaattttgttgacttggcaaggtcatttagggtgtgtttggaagacaggggctattaggagtattaaacatagtctaattacaaaactaattgcacaaccgctaagctgaatcgcgagatggatctattaagcttaattagtccatgatttgacaatgtggtgctacaataaccatttgctaatgatggattacttaggtttaatagattcgtctcgtgatttagcctatgggttctgctattaattttgtaattagctcatatttagttcttataattagtatccgaacatccaatgtgacatgctaaagtttaaccctggtatccaaatgaagtcttatgagagtttcatcactccggtggtatatgtacttaggctccgttttcttccaccgacttatttttagcacccgtcacattgaatgtttagatactaattagaagtattaaacgtagactatttacaaaatccattacataagacgaatctaaacggcgagacgaatctattaaacctaattagtccatgatttgacaatgtgttgctacagtaaacatttgctaatgatggattaattaggcttaatagattcgtctcgccgtttagcctccacttatgtaatgggttttctaaacaatctacgtttaatactcctaattagtatctaaatattcaatgtgacacgtgctaaaaataagtcagtggaaggaagagaacgtccccttagttttccatcttattaattgtacgatgaaactgtgcagccagatgattgacaatcgcaatacttcaactagtgggccatgcacatcagcgacgtgtaacgtcgtgagttgctgttcccgtagagaaatatcaactggtgggccacgcacatcagcgtcgtgtaacgtggacggaggagccccgtgacggcgtcgacatcgaacggccaccaaccacggaaccacccgtccccacctctcggaagctccgctccacggcgtcgacatctaacggctaccagcaggcgtacgggttggagtggactccttgcctctttgcgctggcggcttccggaaattgcgtggcggagacgaggcgggctcgtctcacacggcacggaagacgtcacgggttccttccccacctctcctcttccccaccgccataaatagccgaccccctcgcctttctccccaatctcatctcgtctcgtgttgttcggagcacaccacccgccccaaatcgttcttcccgcaagcctcggcgatccttcacccgcttcaaggtacggcgatcgtcttcctcctctagatcggcgtgatctgcaagtagttgatttggtagatggttaggatctgtgcactgaagaaatcatgttagatccgcgatgtttctgttcgtagatggctgggaggtggaatttttgtgtagatctgatatgttctcctgtttatcttgtcacgctcctgcgatttgtggggattttaggtcgttgatctgggaatcgtggggttgcttctaggctgttcgtagatgaggtcgttctcacggtttactggatcattgcctagtagatcagctcgggctttcgtctttgtatatggtgcccatacttgcatctatgatctggttccgtggtgttacctaggtttctgcgcctgattcgtccgatcgattttgttagcatgtggtaaacgtttggtcatggtctgatttagattagagtcgaataggatgatctcgatctagctcttgggattaatatgcatgtgtcaccaatctgttccgtggttaagatgatgaatctatgtttagttaatgggtgtagatatatatgctgctgttcctcaatgatgccgtagcttttacctgagcagcatggttcctcctgttacttaggtagatgcacatgcttatagatcaagatatgtactgctactgttggaattgtttagtatacctgatgatcatccatgctcttgttacttgttttggtatacttggatgatggcatgctgctgctttttgttgatttgagcccatccatatctgcatatgtcacatgattaagatgattacgctgtttctgtatgatgccatagcttttatgtgagcaacatgcatcctcctggttatatgcattaatagatggaagatatctattgctacaatttgatgattattttgtacatacgatgatcaagcatgctcttcatactttgttgatatacttggataatgaaatgctgctgcacgttcattctatagcactaatgatgtgatgaacacgcacgacctgtttgtggcatctgtttgaatgtgttgttgctgttcactagagactgttttattaacctactgctagatacttacccttctgtctgtttattcttttgcagggatccatggccactgtgaacaactggctcgctttctccctctccccgcaggagctgccgccctcccagacgacggactccacactcatctcggccgccaccgccgaccatgtctccggcgatgtctgcttcaacatcccccaagattggagcatgaggggatcagagctttcggcgctcgtcgcggagccgaagctggaggacttcctcggcggcatctccttctccgagcagcatcacaaggccaactgcaacatgatacccagcactagcagcacagtttgctacgcgagctcaggtgctagcaccggctaccatcaccagctgtaccaccagcccaccagctcagcgctccacttcgcggactccgtaatggtggcttcctcggccggtgtccacgacggcggtgccatgctcagcgcggccgccgctaacggtgtcgctggcgctgccagtgccaacggcggcggcatcgggctgtccatgattaagaactggctgcggagccaaccggcgcccatgcagccgagggtggcggcggctgagggcgcgcaggggctctctttgtccatgaacatggcggggacgacccaaggcgctgctggcatgccacttctcgctggagagcgcgcacgggcgcccgagagtgtatcgacgtcagcacagggtggagccgtcgtcgtcacggcgccgaaggaggatagcggtggcagcggtgttgccggcgctctagtagccgtgagcacggacacgggtggcagcggcggcgcgtcggctgacaacacggcaaggaagacggtggacacgttcgggcagcgcacgtcgatttaccgtggcgtgacaaggcatagatggactgggagatatgaggcacatctttgggataacagttgcagaagggaagggcaaactcgtaagggtcgtcaagtctatttaggtggctatgataaagaggagaaagctgctagggcttatgatcttgctgctctgaagtactggggtgccacaacaacaacaaattttccagtgagtaactacgaaaaggagctcgaggacatgaagcacatgacaaggcaggagtttgtagcgtctctgagaaggaagagcagtggtttctccagaggtgcatccatttacaggggagtgactaggcatcaccaacatggaagatggcaagcacggattggacgagttgcagggaacaaggatctttacttgggcaccttcagcacccaggaggaggcagcggaggcgtacgacatcgcggcgatcaagttccgcggcctcaacgccgtcaccaacttcgacatgagccgctacgacgtgaagagcatcctggacagcagcgccctccccatcggcagcgccgccaagcgcctcaaggaggccgaggccgcagcgtccgcgcagcaccaccacgccggcgtggtgagctacgacgtcggccgcatcgcctcgcagctcggcgacggcggagccctggcggcggcgtacggcgcgcactaccacggcgccgcctggccgaccatcgcgttccagccgggcgccgccagcacaggcctgtaccacccgtacgcgcagcagccaatgcgcggcggcgggtggtgcaagcaggagcaggaccacgcggtgatcgcggccgcgcacagcctgcaggacctccaccacctgaacctgggcgcggccggcgcgcacgactttttctcggcagggcagcaggccgccgccgctgcgatgcacggcctgggtagcatcgacagtgcgtcgctcgagcacagcaccggctccaactccgtcgtctacaacggcggggtcggcgacagcaacggcgccagcgccgtcggcggcagtggcggtggctacatgatgccgatgagcgctgccggagcaaccactacatcggcaatggtgagccacgagcaggtgcatgcacgggcctacgacgaagccaagcaggctgctcagatggggtacgagagctacctggtgaacgcggagaacaatggtggcggaaggatgtctgcatgggggactgtcgtgtctgcagccgcggcggcagcagcaagcagcaacgacaacatggccgccgacgtcgggcatggcggcgcgcagctcttcagtgtctggaacgacacttaatattggtaccgtcatgggtcgtttaagctgccgatgtgcctgcgtcgtctggtgccctctctccatatggaggttgtcaaagtatctgctgttcgtgtcatgagtcgtgtcagtgttggtttaataatggaccggttgtgttgtgtgtgcgtactacccagaactatgacaaatcatgaataagtttgatgtttgaaattaaagcctgtgctcattatgttctgtctttcagttgtctcctaatatttgcctgcaggtactggctatctaccgtttcttacttaggaggtgtttgaatgcactaaaactaatagttagtggctaaaattagttaaaacatccaaacaccatagctaatagttgaactattagctatttttggaaaattagttaatagtgaggtagttatttgttagctagctaattcaactaacaatttttagccaactaacaattagtttcagtgcattcaaacacccccttaatgttaaggtggttctatctaccgtctcctaatatatggttgattgttcggtttgttgctatgctattgggttctgattgctgctagttcttgctgaatccagaagttctcgtagtatagctcagattcatattatttatttgagtgataagtgatccaggttattactatgttagctaggttttttttacaaggataaattatctgtgatcataattcttatgaaagctttatgtttcctggaggcagtggcatgcaatgcatgacagcaacttgatcacaccagctgaggtagatacggtaacaaggttcttaaatctgttcaccaaatcattggagaacacacatacacattcttgccagtcttggttagagaaatttcatgacaaaatgccaaagctgtcttgactcttcacttttggccatgagtcgtgacgcgacttattgaactagtctagggcgcggctaacaacctagcttagattgccttgtctaaacccttaggctaacgcgccactctagaaggccgatctcccgggataacttcgtatagcatacattatacgaagttatgaattccggaccgggttaccgaattcctgcccttaaggccaattgttcaagattcattcaacaattgaaacatctcccatgattaaatcagtataaggttgctatggtcttgcttgacaaagtttttttttgagggaatttcaactaaatttttgagtgaaactatcaaatactgattttaaaaaatttttataaaaggaagcgcagagataaaaggccatctatgctacaaaagtacccaaaaatgtaatcctaaagtatgaattgcattttttttttgtttggacgaaaggaaaggagtattaccacaagaatgatatcatcttcatatttagatcttttttgggtaaagcttgagattctctaaatatagagaaatcagaagaaaaaaaaaccgtgttttggtggttttgatttctagcctccacaataactttgacggcgtcgacaagtctaacggacaccaagcagcgaaccaccagcgccgagccaagcgaagcagacggccgagacgttgacaccttcggcgcggcatctctcgagagttccgctccggcgctccacctccaccgctggcggtttcttattccgttccgttccgcctcctgctctgctcctctccacaccacacggcacgaaaccgttacggcaccggcagcacccagcacgggagaggggattcctttcccaccgttccttccctttccgccccgccgctataaatagccagccccatccccagcttttttccccaatctcatctcctctctcctgttgttcggagcacacgcacaatccgatcgatccccaaatccccttcgtctctcctcgcgagcctcgtggatcccagcttcaaggtacggcgatcgatcatcccccctccttctctctaccttcttttctctagactacatcggatggcgatccatggttagggcctgctagtttcccttcctgttttgtcgatggctgcgaggcacaatagatctgatggcgttatgacggctaacttgtcatgttgttgcgatttatagtccctttaggagatcagtttaatttctcggatggttcgagatcggtggtccatggttagtaccctaagatccgcgctgttagggttcgtagatggaggcgacctgttctgattgttaacttgtcagtacctgggaaatcctgggatggttctagctcgtccgcagatgagatcgatttcatgatcctctgtatcttgtttcgttgcctaggttccgtctaatctatccgtggtatgatgtagatgttttgatcgtgctaactacgtcttgtaaagttaattgtcaggtcataatttttagcatgcctttttttttgtttggttttgtctaattgggctgtcgttctagatcagagtagaagactgttccaaactacctgctggatttattgaacttggatctgtatgtgtgtcacatatcttcataaattcatgattaagatggattgaaatatcttttatctttttggtatggatagttctatatgttggtgtggctttgttagatgtatacatgcttagatacatgaagcaacgtgctgctactgtttagtaattgctgttcatttgtctaataaacagataaggatatgtatttatgttgctgttggttttgctggtactttgttggatacaaatgcttcaatacagaaaacagcatgctgctacgatttaccatttatctaatcttatcatatgtctaatctaataaacaaacatgcttttaaattatcttcatatgcttggatgatggcatacacagcggctatgtgtggttttttaaatacccagcatcatgggcatgcatgacactgctttaatatgctttttatttgcttgagactgtttcttttgtttatactgaccctttagttcggtgactcttctgcaggtcgactttaacttagcctaggatccatggcccagtccaagcacggcctgaccaaggagatgaccatgaagtaccgcatggagggctgcgtggacggccacaagttcgtgatcaccggcgagggcatcggctaccccttcaagggcaagcaggccatcaacctgtgcgtggtggagggcggccccttgcccttcgccgaggacatcttgtccgccgccttcatgtacggcaaccgcgtgttcaccgagtacccccaggacatcgtcgactacttcaagaactcctgccccgccggctacacctgggaccgctccttcctgttcgaggacggcgccgtgtgcatctgcaacgccgacatcaccgtgagcgtggaggagaactgcatgtaccacgagtccaagttctacggcgtgaacttccccgccgacggccccgtgatgaagaagatgaccgacaactgggagccctcctgcgagaagatcatccccgtgcccaagcagggcatcttgaagggcgacgtgagcatgtacctgctgctgaaggacggtggccgcttgcgctgccagttcgacaccgtgtacaaggccaagtccgtgccccgcaagatgcccgactggcacttcatccagcacaagctgacccgcgaggaccgcagcgacgccaagaaccagaagtggcacctgaccgagcacgccatcgcctccggctccgccttgccctccggactcagatctcgatagggtaccaatggccagttaacagatccagctgctgctgttctagggttcacaagtctgcctatttgtcttccccaatggagctatggttgtctggtctggtccttggtcgtgtcccgtttcattgtgtactatttacctgtaatgtgtatccttaagtctggtttgatggtgtctgaaacgttttgctgtggtagagcagcatggaagaactataatgaataagtgatccctaatcattgtgtccaaattttgcttctgctatacccttttgtgctgtttcttatgttttgcttaaaaatttgatctgacaaacaaatttgtctaaattatgctcttgttctgactgtgtactgtacacatttgtattgctaccggtttggcacatagttttctctttgattgcagatcaaacccttctgattgcagattgcttggctatggctgatgtgctcactgttcttctttagcttgtatattgctgatggtggcttggctacggctgaaaaagttgctgctgcgccgacttggcaactgttgctccagtaatgctttgtcctctcttcctagccgccgacttggcacttggcagctgttgctcctgtaatgcgttgttatctcttatctcttgagatgtactatgattttgaggctgtttgacttgtgccagattgccagtgctgatgctatattatctcaggtttttatgctagtatatgttttactgtgtgctgcctgtgtcgagttacgtaatctattgaaccgctatgcgtgttgatgccctgttgttgcttgccagattgatgcccctgttgcttgcagcttgcaagctgtagtgaaatcctaaaattcgaaaccaaatctattctgaacttttgaagatctgtgatgtccggaagaaaagattcaaacagataaacgggactctccagaatctataaaataaatgatcgacaaacgctttgctttggtaggcttcctagttagttagcggaccgggatccgacggcgtcttcaccgccccgccgccgcccgagccggacttgtcgctgccgccgccgctgctcatcttgcgcgcttgtgtccctccctcagtccctgcgttcgcggatcgcgggcgggtgcgacccgtttggactccggccggtagccttcgtgccgacctcgctcggtccaccggtttgtcggggacccacatgtcagtgaaggtacgcgtccacgtccacagaccctactaccccagacgagtccaaatcgctgttccctcacactctcgtgtaccagcgcgcggcggaaagcacctttccaacaaccgccgacacgtcggtcccacgtcggcatgctccaccggtcagtgtttggcgtgtacggctcccggcgacgaacgagtgtggcctaagctttcctactcccatcccatctgagccacacatctctctcacgccacgcgcacaaaacagccaggctcccacgcgcatcaaccggctctccctttccgtgccactcgcccccaagccccaaaccctcgccgccgcctccgagacagccgccgccacctaggccatggccaccgccgccgccgcgtctaccgcgctcactggcgccactaccgctgcgcccaaggcgaggcgccgggcgcacctcctggccacccgccgcgccctcgccgcgcccatcaggtgctcagcggcgtcacccgccatgccgatggctcccccggccaccccgctccggccgtggggccccaccgagccccgcaagggtgctgacatcctcgtcgagtccctcgagcgctgcggcgtccgcgacgtcttcgcctaccccggcggcgcgtcgatggagatccaccaggcactcacccgctcccccgtcatcgccaaccacctcttccgccacgagcaaggggaggcctttgccgcctccggctacgcgcgctcctcgggccgcgtcggcgtctgcatcgccacctccggccccggcgccaccaacctagtctccgcgctcgccgacgcgctgctcgattccgtcccgatggtcgccatcacgggacaggtggcgcgacgcatgattggcaccgacgccttccaggagacgcccatcgtcgaggtcacgcgctccatcaccaagcacaactacctggtcctcgacgtcgacgacatcccccgcgtcgtgcaggaggctttcttcctcgcctcctctggtcgaccagggccggtgcttgtcgacatccccaaggacatccagcagcagatggcggtgcctgtctgggacaagcccatgagtctgcctgggtacattgcgcgccttcccaagccccctgcgactgagttgcttgagcaggtgctgcgtcttgttggtgaatcgcggcgccctgttctttatgtgggcggtggctgcgcagcatctggtgaggagttgcgacgctttgtggagctgactggaatcccggtcacaactactcttatgggcctcggcaacttccccagcgacgacccactgtctctgcgcatgctaggtatgcatgggacggtgtatgcaaattatgcagtggataaggccgatctgttgcttgcacttggtgtgcggtttgatgatcgcgtgacagggaagattgaggcttttgcaagcagggctaagattgtgcacgttgatattgatccggctgagattggcaagaacaagcagccacatgtgtccatctgtgcagatgttaagcttgctttgcagggcatgaatgctcttcttgaaggaagcacatcaaagaagagctttgactttggctcatggaacgatgagttggatcagcagaagagggaattcccccttgggtataaaacatctaatgaggagatccagccacaatatgctattcaggttcttgatgagctgacgaaaggcgaggccatcatcggcacaggtgttgggcagcaccagatgtgggcggcacagtactacacttacaagcggccaaggcagtggttgtcttcagctggtcttggggctatgggatttggtttgccggctgctgctggtgcttctgtggcaaacccaggtgtcactgttgttgacatcgatggagatggtagctttctcatgaacgttcaggagctagctatgatccgaattgagaacctcccagtgaaggtctttgtgctaaacaaccagcacctggggatggtggtgcagttggaggacaggttctataaggccaacagagcgcacacatacttgggaaacccagagaatgaaagtgagatatatccagatttcgtgacgatcgccaaagggttcaacattccagccgtccgtgtgacaaagaagaacgaagtccgcgcagcgataaagaagatgctcgagactccagggccgtacctcttggatataatcgtcccacaccaggagcatgtgttgcctatgatccctagtggtggggctttcaaggatatgatcctggatggtgatggcaggactgtgtactgacttcgaataggtacccggggatcctctagtgccgtgggtcgtttaagctgccgctgtacctgtgtcgtctggtgccttctggtgtacctgggaggttgtcgtctatcaagtatctgtggttggtgtcatgagtcagtgagtcccaatactgttcgtgtcctgtgtgcattatacccaaaactgttatgggcaaatcatgaataagcttgatgttcgaacttaaaagtctctgctcaatatggtattatggttgtttttgttcgtctcctaatatttgcctgggatcaaattttattggctggtgttcatttgacctccatgttcttgctaggctccattttttactctacagccataatatgtttgattgtttggtttgttctttgttgtacacctggttctgtcgagcttagttttcgacactggcttacagcttaacatgttgctattttattgggttctgattgctattttattgggttctgattgctagtttttgctgaatccaaaaaccatgttatttatttaagcgatccaggttattattatgatggtggctaagtttttttttttccaagggtaaattttctggattctccagtgtttctgtggccgaattcaatcactagagtcgacctgcaaagcttcggtccgggcctagaaggcccgcgccacttacgcttgattccgatgacttcgtaggttcctagctcaagccgctcgtgtccaagcgtcacttacgattagctaatgattacggcatctaggaccgactagctagctagctaagagctcggtaccgagctcgaattcattccgattaatcgtggcctcttgctcttcaggatgaagagctatgtttaaacgtgcaagcgctactagacaattcagtacattaaaaacgtccgcaatgtgttattaagttgtctaagcgtcaatttgtttacaccacaatatatcctgcca

SEQ ID NO: 27 - DNA, 19136 bp, Artificial sequence
  PHP93926
gtttacccgccaatatatcctgtcaaacactgcggccgcacttgaccgcggatggagccggagctgtggtgaggccatcgacgggaggtgggggagaacacagtctcagtgttctttgtgagtccgcaaggtttttagcttttctgtattaattaaggttgctgttggctgtagaatacggtcgtggaagagctgtatcggtagctactacgtaagctattatatactggaagtctggagctcgtcgatctccggtcgtcttcctccatttctcctcgtcttgctttgactgctgctaccatttgcttctgttttctgatgaagcatgccatgtcggccaccagtgtttgtgtggtttttgcagggaatggctttcaagtgctgtgattgaatggccctcgtcgtcctcggctgagctcacatggacgcgtcatgtgagtgagatatatgatcatatgatgagtggggttcgggtgagtgcgtacttgaagtaggatcccgctttcactcattcattcattggcctttaaaccgggaaattttcgcgaggagatggagggaagcaagcagggtgacgagtgcagagtgccgcgagcgctttgtcaaaaggcaccgccgtaggcaaaaaaatcaatggccctgactgactcgatggtagtactactgtagagactagagagggttgctccccatatcttcgtgtgacttttactccagcattgcatttccgtcattgagacgttaattaatagcagctttcgggacagatgactgtggccatgtttcgtcacggccgcttcgtgccagctgggggtactatagtactgtgattttgttagtaaaaactttcattaggccaccattgacgaccgggccttcgcttttgctgcgctaattaaccatttcccggcgaccgaagggaacatgaacatgccccgacacatgagggcatgaggactagtgttctccctgtcgttcgttgacttgactagtgatagtttaaacgctcttcaactggaagagcggttactaccggttcactagctagctgctaatcgagctagttaccctatgaggtgacatgaagcgctcacggttactatgacggttagcttcacgactgttggtggcagtagcgtacgacttagctatagttccggacttacctagctaataacttcgtatagcatacattatacgaagttatggttaccgaattcgagctcggtaccctggttcacaaactcaatacaacacacagtggagtagggtattacgctccggcggcccgaaccactctaaatccttgtgtcctcgtgtgctcttccaccattaatgactgtaattgcagggacacgaagagttgtagcgcttttgccaacaagatccgctatatgctagtagagtggaacctgcacagcaacaagcatccaataatctgagaataagaattatgtgtggtgatggttctcatctctgcaactcgccattttcgcgagagaaccaaatccaagttggtgaagatcatgatttgggctcatgggctggcatagtagctattacctttgcaattgtggttcgaatctatccgatattctccttttcagggagagctaatgcttatgcttattgggtattttggtttgacactgcttcacgcccaaaaaaaggcaactatgtctgagttggatatggcccaaaaaaaggcagctatgtctgagttggatatggaagtcttctttcgtttagggtgaagtaagaccaagctcatgagcttattatcttaggtcggaacaaattagttgataggcatggcacatttatcaaattataatgattttaacagaaaagcaacacctctttttcagcagcaccagctttgcaagctgcaattgacactccaagcatagtatttgctccaaactcagcctgcatttcgcacaatatcatatctatttccatttggataaaatatattttccagaaatatgggaacagaatcaagatacagaaaaaagttgtggtagtagtggtaagtggaaacacaagtacagtgaaaagatagcattatttctgaacagtcaaattaaccgaaataagtagtatcacatactgcccctaaattgactacacccaatgtaaagaattgcttgagcatattgagccatcagttgtttgtttgtgtaacggatttgacaatgcagagttcaggagcaaaaaaccgcaaaggagagaaagagggaaaggatctcctagtatcccaccttgtggcgcgccctgtcaagtgcatgatggcctggtcgatctgcgtctgctgctgcggttccatcccaacgagtgcctccgacaccttgtcgttgatcacccgcaccgcgtaggcgacccccctggcgaggaacttccgcctctcggaggccccggccgcgtcggcggcggcgccctcgagcgcgcccacgctagccgtagatgctcggtgcacggccttgttggtgtgcaactcgacctcaacggccggtgcgctacgcccgtcaaggatctggcgcgcccgcaccctcgtgatcacggtgggcgcctcccgcctcatgtggccgacgatgaaaagcgccgggttaggggccttggcgcgcaccgccgtattcagggcctcctcgctcttgcgcgagagcaggtgcttccccaggtactcctgcactgacaaggctgccacagcggtggaatttgtcctcacgacttcgccacgtcgtcctcacctccctggcttcccacgactccgccgtatcgaggtgctcggtgggtcgtcttaatccgaagtccgaactaggaagacgagacagagaggtctgaggaatgggcctcgtttgatgttgagctgaattatttttccagcataagcccaggtcttggtccatgaacaaaattactagaaacccagcccagtactacgatctaaaagagggactgccactggatagctctctctagcattctccacgctccaatacagcggcgtcgtgtctatccgggtctatccgcgaacacgtgagaactctccagaaactgctttctcctccacttcatctctctcgctttccctctataaaaagaccccttctaggaattgagggagacagcaagcaccaagcagcgatccgaagctcaatcaattcactcaaacctcttccccaaatcttcgattagatcttcgttgacaagaagactagaaccgaacctgacatgtccaacctgctcacggttcaccagaaccttccggctcttccagtggacgcgacgtccgatgaagtcaggaagaacctcatggacatgttccgcgacaggcaagcgttcagcgagcacacctggaagatgctgctctccgtctgccgctcctgggctgcatggtgcaagctgaacaacaggaagtggttccccgctgagcccgaggacgtgagggattaccttctgtacctgcaagcgcgaggtttgtttctgcttctacctttgatatatatataataattatcattaattagtagtaatataatatttcaaatatttttttcaaaataaaagaatgtagtatatagcaattgcttttctgtagtttataagtgtgtatattttaatttataacttttctaatatatgaccaaaacatggtgatgcctaggtctggcagtgaagaccatccagcaacaccttggacaactgaacatgcttcacaggcgctccggcctcccgcgccccagcgactcgaacgccgtgagcctcgtcatgcgccgcatcaggaaggaaaacgtcgatgccggcgaaagggcaaagcaggccctcgcgttcgagaggaccgatttcgaccaggtccgcagcctgatggagaacagcgacaggtgccaggacattaggaacctggcgttcctcggaattgcatacaacacgctcctcaggatcgcggaaattgcccgcattcgcgtgaaggacattagccgcaccgacggcggcaggatgcttatccacattggcaggaccaagacgctcgtttccaccgcaggcgtcgaaaaggccctcagcctcggagtgaccaagctcgtcgaacgctggatctccgtgtccggcgtcgcggacgacccaaacaactacctcttctgccgcgtccgcaagaacggggtggctgcccctagcgccaccagccaactcagcacgagggccttggaaggtattttcgaggccacccaccgcctgatctacggcgcgaaggatgacagcggtcaacgctacctcgcatggtccgggcactccgcccgcgttggagctgctagggacatggcccgcgccggtgtttccatccccgaaatcatgcaggcgggtggatggacgaacgtgaacattgtcatgaactacattcgcaaccttgacagcgagacgggcgcaatggttcgcctcctggaagatggtgactgaggtacccaacctagacttgtccatcttctggattggccaacttaattaatgtatgaaataaaaggatgcacacatagtgacatgctaatcactataatgtgggcatcaaagttgtgtgttatgtgtaattactagttatctgaataaaagagaaagagatcatccatatttcttatcctaaatgaatgtcacgtgtctttataattctttgatgaaccagatgcatttcattaaccaaatccatatacatataaatattaatcatatataattaatatcaattgggttagcaaaacaaatctagtctaggtgtgttttgcgatccgatcgaggccggccacactgatagtttaaactgaaggcgggaaacgacaatctgatcatgagcggagaattaagggagtcacgttatgacccccgccgatgacgcgggacaagccgttttacgtttggaactgacagaaccgcaacgattgaaggagccactcagccgcgggtttctggagtttaatgagctaagcacatacgtcagaaaccattattgcgcgttcaaaagtcgcctaaggtcactatcagctagcaaatatttcttgtcaaaaatgctccactgacgttccataaattcccctcggtatccaattagagtctcatattcactctcccggcggatctcgactctagaggatcgctcaggaaggccgctgagatagagccatggcggccaatgcgggcggcggtggagcgggaggaggcagcggcagcggcagcgtggctgcgccggcggtgtgccgccccagcggctcgcggtggacgccgacgccggagcagatcaggatgctgaaggagctctactacggctgcggcatccggtcgcccagctcggagcagatccagcgcatcaccgccatgctgcggcagcacggcaagatcgagggcaagaacgtcttctactggttccagaaccacaaggcccgcgagcgccagaagcgccgcctcaccagcctcgacgtcaacgtgcccgccgccggcgcggccgacgccaccaccagccaactcggcgtcctctcgctgtcgtcgccgccgccttcaggcgcggcgcctccctcgcccaccctcggcttctacgccgccggcaatggcggcggatcggctgtgctgctggacacgagttccgactggggcagcagcggcgctgctatggccaccgagacatgcttcctgcaggactacatgggcgtgacggacacgggcagctcgtcgcagtggccacgcttctcgtcgtcggacacgataatggcggcggccgcggcgcgggcggcgacgacgcgggcgcccgagacgctccctctcttcccgacctgcggcgacgacggcggcagcggtagcagcagctacttgccgttctggggtgccgcgtccacaactgccggcgccacttcttccgttgcgatccaacagcaacaccagctgcaggagcagtacagcttttacagcaacagcaacagcacccagctggccggcaccggcaaccaagacgtatcggcaacagcagcagcagccgccgccctggagctgagcctcagctcatggtgctccccttaccctgctgcagggagtatgtgagagcaacgcgagctgccactgctcttcactgatgtctctggaatggaaggaggaggaagtgagaacagatcattcgacaaagcagcattagtccgttgatcggtggaagaccactcgtcagtgttgagttgaatgtttgatcaataaaatacggcaatgctgtaagggttgttttttatgccattgataatacactgtactgttcagttgttgaactctatttcttagccatgccaagtgcttttcttattttgaataacattacagcaaaaagttgaaagacaaaaaaaaaaacccccgaacagagtgctttgggtcccaagcttctttagactgtgttcggcgttccccctaaatttctccccctatatctcactcacttgtcacatcagcgttctctttccccctatatctccacgctctacagcagttccacctatatcaaacctctataccccaccacaacaatattatatactttcatcttcaactaactcatgtaccttccaatttttttctactaataattatttacgtgcacagaaacttagcaaggagagagagagcgggaatttaaatgctcggcgttaggcttttagtccgctaggtggctagaccgaggttaggacgctagttcactaggggcctagtggtgttttaagacgtcacggtcacccggtccgggcctagaaggccagcttcaagtttgtacaaaaaagcaggctccggccagaatggcccggaccgaagcttgcatgcctgcagtgcagcgtgacccggtcgtgcccctctctagagataatgagcattgcatgtctaagttataaaaaattaccacatattttttttgtcacacttgtttgaagtgcagtttatctatctttatacatatatttaaactttactctacgaataatataatctatagtactacaataatatcagtgttttagagaatcatataaatgaacagttagacatggtctaaaggacaattgagtattttgacaacaggactctacagttttatctttttagtgtgcatgtgttctcctttttttttgcaaatagcttcacctatataatacttcatccattttattagtacatccatttagggtttagggttaatggtttttatagactaatttttttagtacatctattttattctattttagcctctaaattaagaaaactaaaactctattttagtttttttatttaataatttagatataaaatagaataaaataaagtgactaaaaattaaacaaataccctttaagaaattaaaaaaactaaggaaacatttttcttgtttcgagtagataatgccagcctgttaaacgccgtcgacgagtctaacggacaccaaccagcgaaccagcagcgtcgcgtcgggccaagcgaagcagacggcacggcatctctgtcgctgcctctggacccctctcgagagttccgctccaccgttggacttgctccgctgtcggcatccagaaattgcgtggcggagcggcagacgtgagccggcacggcaggcggcctcctcctcctctcacggcaccggcagctacgggggattcctttcccaccgctccttcgctttcccttcctcgcccgccgtaataaatagacaccccctccacaccctctttccccaacctcgtgttgttcggagcgcacacacacacaaccagatctcccccaaatccacccgtcggcacctccgcttcaaggtacgccgctcgtcctcccccccccccctctctaccttctctagatcggcgttccggtccatgcatggttagggcccggtagttctacttctgttcatgtttgtgttagatccgtgtttgtgttagatccgtgctgctagcgttcgtacacggatgcgacctgtacgtcagacacgttctgattgctaacttgccagtgtttctctttggggaatcctgggatggctctagccgttccgcagacgggatcgatttcatgattttttttgtttcgttgcatagggtttggtttgcccttttcctttatttcaatatatgccgtgcacttgtttgtcgggtcatcttttcatgcttttttttgtcttggttgtgatgatgtggtctggttgggcggtcgttctagatcggagtagaattctgtttcaaactacctggtggatttattaattttggatctgtatgtgtgtgccatacatattcatagttacgaattgaagatgatggatggaaatatcgatctaggataggtatacatgttgatgcgggttttactgatgcatatacagagatgctttttgttcgcttggttgtgatgatgtggtgtggttgggcggtcgttcattcgttctagatcggagtagaatactgtttcaaactacctggtgtatttattaattttggaactgtatgtgtgtgtcatacatcttcatagttacgagtttaagatggatggaaatatcgatctaggataggtatacatgttgatgtgggttttactgatgcatatacatgatggcatatgcagcatctattcatatgctctaaccttgagtacctatctattataataaacaagtatgttttataattattttgatcttgatatacttggatgatggcatatgcagcagctatatgtggatttttttagccctgccttcatacgctatttatttgcttggtactgtttcttttgtcgatgctcaccctgttgtttggtgttacttctgcaggtcgactttaacttagcctaggatccatggccactgtgaacaactggctcgctttctccctctccccgcaggagctgccgccctcccagacgacggactccacactcatctcggccgccaccgccgaccatgtctccggcgatgtctgcttcaacatcccccaagattggagcatgaggggatcagagctttcggcgctcgtcgcggagccgaagctggaggacttcctcggcggcatctccttctccgagcagcatcacaaggccaactgcaacatgatacccagcactagcagcacagtttgctacgcgagctcaggtgctagcaccggctaccatcaccagctgtaccaccagcccaccagctcagcgctccacttcgcggactccgtaatggtggcttcctcggccggtgtccacgacggcggtgccatgctcagcgcggccgccgctaacggtgtcgctggcgctgccagtgccaacggcggcggcatcgggctgtccatgattaagaactggctgcggagccaaccggcgcccatgcagccgagggtggcggcggctgagggcgcgcaggggctctctttgtccatgaacatggcggggacgacccaaggcgctgctggcatgccacttctcgctggagagcgcgcacgggcgcccgagagtgtatcgacgtcagcacagggtggagccgtcgtcgtcacggcgccgaaggaggatagcggtggcagcggtgttgccggcgctctagtagccgtgagcacggacacgggtggcagcggcggcgcgtcggctgacaacacggcaaggaagacggtggacacgttcgggcagcgcacgtcgatttaccgtggcgtgacaaggcatagatggactgggagatatgaggcacatctttgggataacagttgcagaagggaagggcaaactcgtaagggtcgtcaagtctatttaggtggctatgataaagaggagaaagctgctagggcttatgatcttgctgctctgaagtactggggtgccacaacaacaacaaattttccagtgagtaactacgaaaaggagctcgaggacatgaagcacatgacaaggcaggagtttgtagcgtctctgagaaggaagagcagtggtttctccagaggtgcatccatttacaggggagtgactaggcatcaccaacatggaagatggcaagcacggattggacgagttgcagggaacaaggatctttacttgggcaccttcagcacccaggaggaggcagcggaggcgtacgacatcgcggcgatcaagttccgcggcctcaacgccgtcaccaacttcgacatgagccgctacgacgtgaagagcatcctggacagcagcgccctccccatcggcagcgccgccaagcgcctcaaggaggccgaggccgcagcgtccgcgcagcaccaccacgccggcgtggtgagctacgacgtcggccgcatcgcctcgcagctcggcgacggcggagccctggcggcggcgtacggcgcgcactaccacggcgccgcctggccgaccatcgcgttccagccgggcgccgccagcacaggcctgtaccacccgtacgcgcagcagccaatgcgcggcggcgggtggtgcaagcaggagcaggaccacgcggtgatcgcggccgcgcacagcctgcaggacctccaccacctgaacctgggcgcggccggcgcgcacgactttttctcggcagggcagcaggccgccgccgctgcgatgcacggcctgggtagcatcgacagtgcgtcgctcgagcacagcaccggctccaactccgtcgtctacaacggcggggtcggcgacagcaacggcgccagcgccgtcggcggcagtggcggtggctacatgatgccgatgagcgctgccggagcaaccactacatcggcaatggtgagccacgagcaggtgcatgcacgggcctacgacgaagccaagcaggctgctcagatggggtacgagagctacctggtgaacgcggagaacaatggtggcggaaggatgtctgcatgggggactgtcgtgtctgcagccgcggcggcagcagcaagcagcaacgacaacatggccgccgacgtcgggcatggcggcgcgcagctcttcagtgtctggaacgacacttaagcgtacctagtggtacctgacatcttatagtctgcaacctctcgtgtctgaattcctatctttatcaagtgttattgcttccacgactataggacagctttcgtcgaaagcttttgctcatgtgatctcgaaggattcatctagtctgatttttcgtgacttgtatcggttttattggattcatccaacatatatcaataaaaaatgagttgtgtttcctttcttcctagttcagttaaaattatttccctcctgcgcttgtgctgtaattgtctgtgtacctgttgtttgtgactgtgttagttcccttggatatgatttcgtatttgatatgtacatggagatagcttagcttcattattggagtatgaagttagtatgacatagtcactctcctggaaaattgacactgcaaaccatatttttattctgaaccacaaatcctagtcagtccgctggcatatgccgtccgtttgctgaatccagaacgtgggtttggagatgtacggctgagatgcctctatgcgaaggggatttcgtggtgaaacgagatgggagtagagcaacgcccgtggaagatgcttcaaacttccacacttttgagcaacgatcggcagtagtaaggtagacgatttcaagatcaaagcatatgaagataaacaacatcaacaacaaaatttgttggggttctatagagagaaacagagctacatacatacactgttttgtatctaccatctgagatgatgaaaagatgaaaaactaaagaatgccccggcgccaacgccaggacacgccgcgcgcgcgtcacccgagccatctcttgacccagccggcgctgtatatttacacacgttgcagcatcgatcaccacctgttcgatcgcgtcgccgtcaccggcgcgccgcgacttattgaactagtctagggcgcggctaacaacctagcttagattgccttgtctaaacccttaggctaacgcgccactctagacgtgcgcacgataacttcgtatagcatacattatacgaagttataacagcggaccgggttaccgaattcctgcccttaaggccaattgttcaagattcattcaacaattgaaacatctcccatgattaaatcagtataaggttgctatggtcttgcttgacaaagtttttttttgagggaatttcaactaaatttttgagtgaaactatcaaatactgattttaaaaaatttttataaaaggaagcgcagagataaaaggccatctatgctacaaaagtacccaaaaatgtaatcctaaagtatgaattgcattttttttttgtttggacgaaaggaaaggagtattaccacaagaatgatatcatcttcatatttagatcttttttgggtaaagcttgagattctctaaatatagagaaatcagaagaaaaaaaaaccgtgttttggtggttttgatttctagcctccacaataactttgacggcgtcgacaagtctaacggacaccaagcagcgaaccaccagcgccgagccaagcgaagcagacggccgagacgttgacaccttcggcgcggcatctctcgagagttccgctccggcgctccacctccaccgctggcggtttcttattccgttccgttccgcctcctgctctgctcctctccacaccacacggcacgaaaccgttacggcaccggcagcacccagcacgggagaggggattcctttcccaccgttccttccctttccgccccgccgctataaatagccagccccatccccagcttttttccccaatctcatctcctctctcctgttgttcggagcacacgcacaatccgatcgatccccaaatccccttcgtctctcctcgcgagcctcgtggatcccagcttcaaggtacggcgatcgatcatcccccctccttctctctaccttcttttctctagactacatcggatggcgatccatggttagggcctgctagtttcccttcctgttttgtcgatggctgcgaggcacaatagatctgatggcgttatgacggctaacttgtcatgttgttgcgatttatagtccctttaggagatcagtttaatttctcggatggttcgagatcggtggtccatggttagtaccctaagatccgcgctgttagggttcgtagatggaggcgacctgttctgattgttaacttgtcagtacctgggaaatcctgggatggttctagctcgtccgcagatgagatcgatttcatgatcctctgtatcttgtttcgttgcctaggttccgtctaatctatccgtggtatgatgtagatgttttgatcgtgctaactacgtcttgtaaagttaattgtcaggtcataatttttagcatgcctttttttttgtttggttttgtctaattgggctgtcgttctagatcagagtagaagactgttccaaactacctgctggatttattgaacttggatctgtatgtgtgtcacatatcttcataaattcatgattaagatggattgaaatatcttttatctttttggtatggatagttctatatgttggtgtggctttgttagatgtatacatgcttagatacatgaagcaacgtgctgctactgtttagtaattgctgttcatttgtctaataaacagataaggatatgtatttatgttgctgttggttttgctggtactttgttggatacaaatgcttcaatacagaaaacagcatgctgctacgatttaccatttatctaatcttatcatatgtctaatctaataaacaaacatgcttttaaattatcttcatatgcttggatgatggcatacacagcggctatgtgtggttttttaaatacccagcatcatgggcatgcatgacactgctttaatatgctttttatttgcttgagactgtttcttttgtttatactgaccctttagttcggtgactcttctgcaggtcgactttaacttagcctaggatccatggcccagtccaagcacggcctgaccaaggagatgaccatgaagtaccgcatggagggctgcgtggacggccacaagttcgtgatcaccggcgagggcatcggctaccccttcaagggcaagcaggccatcaacctgtgcgtggtggagggcggccccttgcccttcgccgaggacatcttgtccgccgccttcatgtacggcaaccgcgtgttcaccgagtacccccaggacatcgtcgactacttcaagaactcctgccccgccggctacacctgggaccgctccttcctgttcgaggacggcgccgtgtgcatctgcaacgccgacatcaccgtgagcgtggaggagaactgcatgtaccacgagtccaagttctacggcgtgaacttccccgccgacggccccgtgatgaagaagatgaccgacaactgggagccctcctgcgagaagatcatccccgtgcccaagcagggcatcttgaagggcgacgtgagcatgtacctgctgctgaaggacggtggccgcttgcgctgccagttcgacaccgtgtacaaggccaagtccgtgccccgcaagatgcccgactggcacttcatccagcacaagctgacccgcgaggaccgcagcgacgccaagaaccagaagtggcacctgaccgagcacgccatcgcctccggctccgccttgccctccggactcagatctcgatagggtaccaatggccagttaacagatccagctgctgctgttctagggttcacaagtctgcctatttgtcttccccaatggagctatggttgtctggtctggtccttggtcgtgtcccgtttcattgtgtactatttacctgtaatgtgtatccttaagtctggtttgatggtgtctgaaacgttttgctgtggtagagcagcatggaagaactataatgaataagtgatccctaatcattgtgtccaaattttgcttctgctatacccttttgtgctgtttcttatgttttgcttaaaaatttgatctgacaaacaaatttgtctaaattatgctcttgttctgactgtgtactgtacacatttgtattgctaccggtttggcacatagttttctctttgattgcagatcaaacccttctgattgcagattgcttggctatggctgatgtgctcactgttcttctttagcttgtatattgctgatggtggcttggctacggctgaaaaagttgctgctgcgccgacttggcaactgttgctccagtaatgctttgtcctctcttcctagccgccgacttggcacttggcagctgttgctcctgtaatgcgttgttatctcttatctcttgagatgtactatgattttgaggctgtttgacttgtgccagattgccagtgctgatgctatattatctcaggtttttatgctagtatatgttttactgtgtgctgcctgtgtcgagttacgtaatctattgaaccgctatgcgtgttgatgccctgttgttgcttgccagattgatgcccctgttgcttgcagcttgcaagctgtagtgaaatcctaaaattcgaaaccaaatctattctgaacttttgaagatctgtgatgtccggaagaaaagattcaaacagataaacgggactctccagaatctataaaataaatgatcgacaaacgctttgctttggtaggcttcctagttagttagcggaccgggatccgacggcgtcttcaccgccccgccgccgcccgagccggacttgtcgctgccgccgccgctgctcatcttgcgcgcttgtgtccctccctcagtccctgcgttcgcggatcgcgggcgggtgcgacccgtttggactccggccggtagccttcgtgccgacctcgctcggtccaccggtttgtcggggacccacatgtcagtgaaggtacgcgtccacgtccacagaccctactaccccagacgagtccaaatcgctgttccctcacactctcgtgtaccagcgcgcggcggaaagcacctttccaacaaccgccgacacgtcggtcccacgtcggcatgctccaccggtcagtgtttggcgtgtacggctcccggcgacgaacgagtgtggcctaagctttcctactcccatcccatctgagccacacatctctctcacgccacgcgcacaaaacagccaggctcccacgcgcatcaaccggctctccctttccgtgccactcgcccccaagccccaaaccctcgccgccgcctccgagacagccgccgccacctaggccatggccaccgccgccgccgcgtctaccgcgctcactggcgccactaccgctgcgcccaaggcgaggcgccgggcgcacctcctggccacccgccgcgccctcgccgcgcccatcaggtgctcagcggcgtcacccgccatgccgatggctcccccggccaccccgctccggccgtggggccccaccgagccccgcaagggtgctgacatcctcgtcgagtccctcgagcgctgcggcgtccgcgacgtcttcgcctaccccggcggcgcgtcgatggagatccaccaggcactcacccgctcccccgtcatcgccaaccacctcttccgccacgagcaaggggaggcctttgccgcctccggctacgcgcgctcctcgggccgcgtcggcgtctgcatcgccacctccggccccggcgccaccaacctagtctccgcgctcgccgacgcgctgctcgattccgtcccgatggtcgccatcacgggacaggtggcgcgacgcatgattggcaccgacgccttccaggagacgcccatcgtcgaggtcacgcgctccatcaccaagcacaactacctggtcctcgacgtcgacgacatcccccgcgtcgtgcaggaggctttcttcctcgcctcctctggtcgaccagggccggtgcttgtcgacatccccaaggacatccagcagcagatggcggtgcctgtctgggacaagcccatgagtctgcctgggtacattgcgcgccttcccaagccccctgcgactgagttgcttgagcaggtgctgcgtcttgttggtgaatcgcggcgccctgttctttatgtgggcggtggctgcgcagcatctggtgaggagttgcgacgctttgtggagctgactggaatcccggtcacaactactcttatgggcctcggcaacttccccagcgacgacccactgtctctgcgcatgctaggtatgcatgggacggtgtatgcaaattatgcagtggataaggccgatctgttgcttgcacttggtgtgcggtttgatgatcgcgtgacagggaagattgaggcttttgcaagcagggctaagattgtgcacgttgatattgatccggctgagattggcaagaacaagcagccacatgtgtccatctgtgcagatgttaagcttgctttgcagggcatgaatgctcttcttgaaggaagcacatcaaagaagagctttgactttggctcatggaacgatgagttggatcagcagaagagggaattcccccttgggtataaaacatctaatgaggagatccagccacaatatgctattcaggttcttgatgagctgacgaaaggcgaggccatcatcggcacaggtgttgggcagcaccagatgtgggcggcacagtactacacttacaagcggccaaggcagtggttgtcttcagctggtcttggggctatgggatttggtttgccggctgctgctggtgcttctgtggcaaacccaggtgtcactgttgttgacatcgatggagatggtagctttctcatgaacgttcaggagctagctatgatccgaattgagaacctcccagtgaaggtctttgtgctaaacaaccagcacctggggatggtggtgcagttggaggacaggttctataaggccaacagagcgcacacatacttgggaaacccagagaatgaaagtgagatatatccagatttcgtgacgatcgccaaagggttcaacattccagccgtccgtgtgacaaagaagaacgaagtccgcgcagcgataaagaagatgctcgagactccagggccgtacctcttggatataatcgtcccacaccaggagcatgtgttgcctatgatccctagtggtggggctttcaaggatatgatcctggatggtgatggcaggactgtgtactgacttcgaataggtacccggggatcctctagtgccgtgggtcgtttaagctgccgctgtacctgtgtcgtctggtgccttctggtgtacctgggaggttgtcgtctatcaagtatctgtggttggtgtcatgagtcagtgagtcccaatactgttcgtgtcctgtgtgcattatacccaaaactgttatgggcaaatcatgaataagcttgatgttcgaacttaaaagtctctgctcaatatggtattatggttgtttttgttcgtctcctaatatttgcctgggatcaaattttattggctggtgttcatttgacctccatgttcttgctaggctccattttttactctacagccataatatgtttgattgtttggtttgttctttgttgtacacctggttctgtcgagcttagttttcgacactggcttacagcttaacatgttgctattttattgggttctgattgctattttattgggttctgattgctagtttttgctgaatccaaaaaccatgttatttatttaagcgatccaggttattattatgatggtggctaagtttttttttttccaagggtaaattttctggattctccagtgtttctgtggccgaattcaatcactagagtcgacctgcaaagcttcggtccgggcctagaaggcccgcgccacttacgcttgattccgatgacttcgtaggttcctagctcaagccgctcgtgtccaagcgtcacttacgattagctaatgattacggcatctaggaccgactagctagctagctaagagctcggtaccgagctcgaattcattccgattaatcgtggcctcttgctcttcaggatgaagagctatgtttaaacgtgcaagcgctactagacaattcagtacattaaaaacgtccgcaatgtgttattaagttgtctaagcgtcaatttgtttacaccacaatatatcctgcca

SEQ ID NO: 28 - DNA, 13440 bp, Artificial sequence
  PHP93932
gtttacccgccaatatatcctgtcaaacactgcggccgcacttgaccgcggatggagccggagctgtggtgaggccatcgacgggaggtgggggagaacacagtctcagtgttctttgtgagtccgcaaggtttttagcttttctgtattaattaaggttgctgttggctgtagaatacggtcgtggaagagctgtatcggtagctactacgtaagctattatatactggaagtctggagctcgtcgatctccggtcgtcttcctccatttctcctcgtcttgctttgactgctgctaccatttgcttctgttttctgatgaagcatgccatgtcggccaccagtgtttgtgtggtttttgcagggaatggctttcaagtgctgtgattgaatggccctcgtcgtcctcggctgagctcacatggacgcgtcatgtgagtgagatatatgatcatatgatgagtggggttcgggtgagtgcgtacttgaagtaggatcccgctttcactcattcattcattggcctttaaaccgggaaattttcgcgaggagatggagggaagcaagcagggtgacgagtgcagagtgccgcgagcgctttgtcaaaaggcaccgccgtaggcaaaaaaatcaatggccctgactgactcgatggtagtactactgtagagactagagagggttgctccccatatcttcgtgtgacttttactccagcattgcatttccgtcattgagacgttaattaatagcagctttcgggacagatgactgtggccatgtttcgtcacggccgcttcgtgccagctgggggtactatagtactgtgattttgttagtaaaaactttcattaggccaccattgacgaccgggccttcgcttttgctgcgctaattaaccatttcccggcgaccgaagggaacatgaacatgccccgacacatgagggcatgaggactagtgttctccctgtcgttcgttgacttgactagtgatagtttaaacgctcttcaactggaagagcggttactaccggttcactagctagctgctaatcgagctagttaccctatgaggtgacatgaagcgctcacggttactatgacggttagcttcacgactgttggtggcagtagcgtacgacttagctatagttccggacttacccttaagataacttcgtatagcatacattatacgaagttatgggcccacgcgtgaagagcggttaccagagctggtcacctttgtccaccaagatggaactgtcttcggccagaatggccatctggattcagcaggcctagaaggccatttatcgctatcaactttgtatagaaaagttgggccgagctcggtacggccagaatggcccggaccgggttaccaagcggccgcatcgagcagctggcttgtggggaccagacaaaaaaggaatggtgcagaattgttaggcgcacctaccaaaagcatctttgcctttattgcaaagataaagcagattcctctagtacaagtggggaacaaaataacgtggaaaagagctgtcctgacagcccactcactaatgcgtatgacgaacgcagtgacgaccacaaaactcgagcaacgagatcatgagccaatcaaagaggagtgatgtagacctaaagcaataatggagccatgacgtaagggcttacgcccatacgaaataattaaaggctgatgtgacctgtcggtctctcagaacctttactttttatgtttggcgtgtatttttaaatttccacggcaatgacgatgtgaccgtcgacccactaaaacattgctttgtcaaaagctaaaaaagatgatgcccgacagccacttgtgtgaagcatgagaagccggtccctccactaagaaaattagtgaagcatcttccagtggtccctccactcacagctcaatcagtgagcaacaggacgaaggaaatgacgtaagccatgacgtctaatcccagggcccggtgaccaatcgcggaccgaagcttgcatgcctgcaggccggctttaattcgtaacgagcagtttataccgttttgcgctgcattcaccttcgtgagtccggaccccggaagacaggaactgtagcctttttccctttgctagcatgaatatgaatagaataacacgaatttaacatcaattcagctcatattggaacaatctacgcctaaaatttagtggaacacgttttgctcattttccttgaaaagcaacagtgaagcaacatcggtaaaggttcttttggttgcctctaacggtctaacctgaggattcagttataatctggaacatgacagaaacagagcctcgcacccgttttgggaccaaaaccacatgatcgatctccaagaagattattttggacaatatttttccagccacaggcaatccgaagaccacaaatcagaggcactccaaatgcagcccatccattggaccatacagataagacccggataaggcagagcccatcgtgaccgtcaaatagatcacgtccggtctacggccgtccgatctgccacccagagatagcaccgggatttcctataagcacttttcctatttgtagcccgtgacgagcccagcgccacacaccaacctcagcacaccaaggagagtacgtggaggagcagccggatccatggcggccaatgcgggcggcggtggagcgggaggaggcagcggcagcggcagcgtggctgcgccggcggtgtgccgccccagcggctcgcggtggacgccgacgccggagcagatcaggatgctgaaggagctctactacggctgcggcatccggtcgcccagctcggagcagatccagcgcatcaccgccatgctgcggcagcacggcaagatcgagggcaagaacgtcttctactggttccagaaccacaaggcccgcgagcgccagaagcgccgcctcaccagcctcgacgtcaacgtgcccgccgccggcgcggccgacgccaccaccagccaactcggcgtcctctcgctgtcgtcgccgccgccttcaggcgcggcgcctccctcgcccaccctcggcttctacgccgccggcaatggcggcggatcggctgtgctgctggacacgagttccgactggggcagcagcggcgctgctatggccaccgagacatgcttcctgcaggactacatgggcgtgacggacacgggcagctcgtcgcagtggccacgcttctcgtcgtcggacacgataatggcggcggccgcggcgcgggcggcgacgacgcgggcgcccgagacgctccctctcttcccgacctgcggcgacgacggcggcagcggtagcagcagctacttgccgttctggggtgccgcgtccacaactgccggcgccacttcttccgttgcgatccaacagcaacaccagctgcaggagcagtacagcttttacagcaacagcaacagcacccagctggccggcaccggcaaccaagacgtatcggcaacagcagcagcagccgccgccctggagctgagcctcagctcatggtgctccccttaccctgctgcagggagtatgtgagagcaacgcgagctgccactgctcttcactgatgtctctggaatggaaggaggaggaagtgagaacagatcaattcgacaaagcagcattagtccgttgatcggtggaagaccactcgtcagtgttgagttgaatgtttgatcaataaaatacggcaatgctgtaagggttgttttttatgccattgataatacactgtactgttcagttgttgaactctatttcttagccatgccaagtgcttttcttattttgaataacattacagcaaaaagttgaaagacaaaaaaaaaaacccccgaacagagtgctttgggtcccaagcttctttagactgtgttcggcgttccccctaaatttctccccctatatctcactcacttgtcacatcagcgttctctttccccctatatctccacgctctacagcagttccacctatatcaaacctctataccccaccacaacaatattatatactttcatcttcaactaactcatgtaccttccaatttttttctactaataattatttacgtgcacagaaacttagcaaggagagagagagcgggaatttaaatgctcggcgttaggcttttagtccgctaggtggctagaccgaggttaggacgctagttcactaggggcctagtggtgttttaagggttaccgcacaaaatacataaaactagattagaaaaggaagagaatacgccaaattgcagcttaatcaattagacgatttagtcctgtttttacgaaacaattgtttaagataacatggccttatacttggagtttggcatgtcttatgctatgttgcaaacaggcccggtcttgacatttcgggggccctaagagaaaatttatatagaggtcctatacgaaaatttgagtctgttattttttcaacttttaaataatatatgaaaaataaaaaattgatgatttacataattttattcaaaatgatatgactggaaatattgttacagtattttatgagtcgtaaaattatataaattatgtaatatacatttgttttgacttttgagagagtatttttacttttaatttgtcaaactagcctaaaccttaaaatacacagtaaaccaaatctaaatacattagatcaaattttctgaaaataaagttcagcaaactaaactaggattaatcaatgtaggttattagggtcgacccttcggtaggctagaattaagcaacgcgataggcacaggtgtacaacacctttcgtccttcccacgtcaataaagtatttgtcatcaagcagacggttgcgcgacctcaaagagatgattgctagaaaataaagagacgcaacaaaagaatgaaaatatagatttatctataacttatatgcatttgatataagatagataaatgggagccctacgaaccttgaggctctgagcagtcgcatatcctgcacacccttggcgccggccctggttgcaaatatgcaattgtgtccttatccgcgactggtcacgaggctaggattgatcgaaagctgccgatgagaaatggcaagggcggcatgctgtggccttttttttacggtctgtcaggacaactgaaaagttacaaatttatagtggttgtaaacagcaacacgttaaaaagtcgattatcagtttcacagaaagaggtcgttaaaaccgccagcaagcttgtttcactatcagtctgtcgctaagacaatctctttcaccaaaaatacaatttgctttcttgccgttgcttcaagtgaaaatctgagctaaaaaagagagaggctgtctgaagaaaaatccataaccaacgcaaaatcccgggcgcccaatcagccttctccgcggagattcctagcctcagccagagctacctcatctgcgtgaggctccggtggcgccaagtgttccggcatcccggacgcaccaatggcatccgagcaacagatcttttctgcaacaacgcttcgcgtcgcggcggtgtttccctccatctgctctgctctttaaatacctccgtcgtctcctcgtctccacagcatctcaagtcttcacactcctcgccatcacataaaaccagtgcaagcagaagcagcgcatccacaaccaagcactcccatcatcatgcatgcagcaggctgtgctgtggacctgatcgagtttcaattgatccaagcaagcaagagggatgggagtccttggttgtggagggggtggaggcgccaccgcccaccggccaccgctgcggatatctaggtgttcggatgcacgtgagcgcgcactggttccagtttgtaccatgatgtaaattacttaccgtaccagggttcaatcggcaaggaagaattgttgtgttcactgtcttgggcagtctcttggtccaatatgaatcaacttacacagcatctccaaaaacttctaaaattactagctgaatgcccgtgcgttgcaacgggaatatataataccagtatactacgataacttatatacaaaatgtatgttatatcgttatgagaaaatgtttcataaccaatttatgattctggtcatacataaattttgttatttatagtctatctgtttcaccactacattgcaaccatcagattaagacccgtcgtcaagtaggaattccagaaatcaacgcacggtaactaaatcctcgcgctaagctgggtcagtctagaaggccgatctcccgggataacttcgtatagcatacattatacgaagttatgaattccggaccgggttaccgaattcctgcccttaaggccaattgttcaagattcattcaacaattgaaacatctcccatgattaaatcagtataaggttgctatggtcttgcttgacaaagtttttttttgagggaatttcaactaaatttttgagtgaaactatcaaatactgattttaaaaaatttttataaaaggaagcgcagagataaaaggccatctatgctacaaaagtacccaaaaatgtaatcctaaagtatgaattgcattttttttttgtttggacgaaaggaaaggagtattaccacaagaatgatatcatcttcatatttagatcttttttgggtaaagcttgagattctctaaatatagagaaatcagaagaaaaaaaaaccgtgttttggtggttttgatttctagcctccacaataactttgacggcgtcgacaagtctaacggacaccaagcagcgaaccaccagcgccgagccaagcgaagcagacggccgagacgttgacaccttcggcgcggcatctctcgagagttccgctccggcgctccacctccaccgctggcggtttcttattccgttccgttccgcctcctgctctgctcctctccacaccacacggcacgaaaccgttacggcaccggcagcacccagcacgggagaggggattcctttcccaccgttccttccctttccgccccgccgctataaatagccagccccatccccagcttttttccccaatctcatctcctctctcctgttgttcggagcacacgcacaatccgatcgatccccaaatccccttcgtctctcctcgcgagcctcgtggatcccagcttcaaggtacggcgatcgatcatcccccctccttctctctaccttcttttctctagactacatcggatggcgatccatggttagggcctgctagtttcccttcctgttttgtcgatggctgcgaggcacaatagatctgatggcgttatgacggctaacttgtcatgttgttgcgatttatagtccctttaggagatcagtttaatttctcggatggttcgagatcggtggtccatggttagtaccctaagatccgcgctgttagggttcgtagatggaggcgacctgttctgattgttaacttgtcagtacctgggaaatcctgggatggttctagctcgtccgcagatgagatcgatttcatgatcctctgtatcttgtttcgttgcctaggttccgtctaatctatccgtggtatgatgtagatgttttgatcgtgctaactacgtcttgtaaagttaattgtcaggtcataatttttagcatgcctttttttttgtttggttttgtctaattgggctgtcgttctagatcagagtagaagactgttccaaactacctgctggatttattgaacttggatctgtatgtgtgtcacatatcttcataaattcatgattaagatggattgaaatatcttttatctttttggtatggatagttctatatgttggtgtggctttgttagatgtatacatgcttagatacatgaagcaacgtgctgctactgtttagtaattgctgttcatttgtctaataaacagataaggatatgtatttatgttgctgttggttttgctggtactttgttggatacaaatgcttcaatacagaaaacagcatgctgctacgatttaccatttatctaatcttatcatatgtctaatctaataaacaaacatgcttttaaattatcttcatatgcttggatgatggcatacacagcggctatgtgtggttttttaaatacccagcatcatgggcatgcatgacactgctttaatatgctttttatttgcttgagactgtttcttttgtttatactgaccctttagttcggtgactcttctgcaggtcgactttaacttagcctaggatccatggcccagtccaagcacggcctgaccaaggagatgaccatgaagtaccgcatggagggctgcgtggacggccacaagttcgtgatcaccggcgagggcatcggctaccccttcaagggcaagcaggccatcaacctgtgcgtggtggagggcggccccttgcccttcgccgaggacatcttgtccgccgccttcatgtacggcaaccgcgtgttcaccgagtacccccaggacatcgtcgactacttcaagaactcctgccccgccggctacacctgggaccgctccttcctgttcgaggacggcgccgtgtgcatctgcaacgccgacatcaccgtgagcgtggaggagaactgcatgtaccacgagtccaagttctacggcgtgaacttccccgccgacggccccgtgatgaagaagatgaccgacaactgggagccctcctgcgagaagatcatccccgtgcccaagcagggcatcttgaagggcgacgtgagcatgtacctgctgctgaaggacggtggccgcttgcgctgccagttcgacaccgtgtacaaggccaagtccgtgccccgcaagatgcccgactggcacttcatccagcacaagctgacccgcgaggaccgcagcgacgccaagaaccagaagtggcacctgaccgagcacgccatcgcctccggctccgccttgccctccggactcagatctcgatagggtaccaatggccagttaacagatccagctgctgctgttctagggttcacaagtctgcctatttgtcttccccaatggagctatggttgtctggtctggtccttggtcgtgtcccgtttcattgtgtactatttacctgtaatgtgtatccttaagtctggtttgatggtgtctgaaacgttttgctgtggtagagcagcatggaagaactataatgaataagtgatccctaatcattgtgtccaaattttgcttctgctatacccttttgtgctgtttcttatgttttgcttaaaaatttgatctgacaaacaaatttgtctaaattatgctcttgttctgactgtgtactgtacacatttgtattgctaccggtttggcacatagttttctctttgattgcagatcaaacccttctgattgcagattgcttggctatggctgatgtgctcactgttcttctttagcttgtatattgctgatggtggcttggctacggctgaaaaagttgctgctgcgccgacttggcaactgttgctccagtaatgctttgtcctctcttcctagccgccgacttggcacttggcagctgttgctcctgtaatgcgttgttatctcttatctcttgagatgtactatgattttgaggctgtttgacttgtgccagattgccagtgctgatgctatattatctcaggtttttatgctagtatatgttttactgtgtgctgcctgtgtcgagttacgtaatctattgaaccgctatgcgtgttgatgccctgttgttgcttgccagattgatgcccctgttgcttgcagcttgcaagctgtagtgaaatcctaaaattcgaaaccaaatctattctgaacttttgaagatctgtgatgtccggaagaaaagattcaaacagataaacgggactctccagaatctataaaataaatgatcgacaaacgctttgctttggtaggcttcctagttagttagcggaccgggatccgacggcgtcttcaccgccccgccgccgcccgagccggacttgtcgctgccgccgccgctgctcatcttgcgcgcttgtgtccctccctcagtccctgcgttcgcggatcgcgggcgggtgcgacccgtttggactccggccggtagccttcgtgccgacctcgctcggtccaccggtttgtcggggacccacatgtcagtgaaggtacgcgtccacgtccacagaccctactaccccagacgagtccaaatcgctgttccctcacactctcgtgtaccagcgcgcggcggaaagcacctttccaacaaccgccgacacgtcggtcccacgtcggcatgctccaccggtcagtgtttggcgtgtacggctcccggcgacgaacgagtgtggcctaagctttcctactcccatcccatctgagccacacatctctctcacgccacgcgcacaaaacagccaggctcccacgcgcatcaaccggctctccctttccgtgccactcgcccccaagccccaaaccctcgccgccgcctccgagacagccgccgccacctaggccatggccaccgccgccgccgcgtctaccgcgctcactggcgccactaccgctgcgcccaaggcgaggcgccgggcgcacctcctggccacccgccgcgccctcgccgcgcccatcaggtgctcagcggcgtcacccgccatgccgatggctcccccggccaccccgctccggccgtggggccccaccgagccccgcaagggtgctgacatcctcgtcgagtccctcgagcgctgcggcgtccgcgacgtcttcgcctaccccggcggcgcgtcgatggagatccaccaggcactcacccgctcccccgtcatcgccaaccacctcttccgccacgagcaaggggaggcctttgccgcctccggctacgcgcgctcctcgggccgcgtcggcgtctgcatcgccacctccggccccggcgccaccaacctagtctccgcgctcgccgacgcgctgctcgattccgtcccgatggtcgccatcacgggacaggtggcgcgacgcatgattggcaccgacgccttccaggagacgcccatcgtcgaggtcacgcgctccatcaccaagcacaactacctggtcctcgacgtcgacgacatcccccgcgtcgtgcaggaggctttcttcctcgcctcctctggtcgaccagggccggtgcttgtcgacatccccaaggacatccagcagcagatggcggtgcctgtctgggacaagcccatgagtctgcctgggtacattgcgcgccttcccaagccccctgcgactgagttgcttgagcaggtgctgcgtcttgttggtgaatcgcggcgccctgttctttatgtgggcggtggctgcgcagcatctggtgaggagttgcgacgctttgtggagctgactggaatcccggtcacaactactcttatgggcctcggcaacttccccagcgacgacccactgtctctgcgcatgctaggtatgcatgggacggtgtatgcaaattatgcagtggataaggccgatctgttgcttgcacttggtgtgcggtttgatgatcgcgtgacagggaagattgaggcttttgcaagcagggctaagattgtgcacgttgatattgatccggctgagattggcaagaacaagcagccacatgtgtccatctgtgcagatgttaagcttgctttgcagggcatgaatgctcttcttgaaggaagcacatcaaagaagagctttgactttggctcatggaacgatgagttggatcagcagaagagggaattcccccttgggtataaaacatctaatgaggagatccagccacaatatgctattcaggttcttgatgagctgacgaaaggcgaggccatcatcggcacaggtgttgggcagcaccagatgtgggcggcacagtactacacttacaagcggccaaggcagtggttgtcttcagctggtcttggggctatgggatttggtttgccggctgctgctggtgcttctgtggcaaacccaggtgtcactgttgttgacatcgatggagatggtagctttctcatgaacgttcaggagctagctatgatccgaattgagaacctcccagtgaaggtctttgtgctaaacaaccagcacctggggatggtggtgcagttggaggacaggttctataaggccaacagagcgcacacatacttgggaaacccagagaatgaaagtgagatatatccagatttcgtgacgatcgccaaagggttcaacattccagccgtccgtgtgacaaagaagaacgaagtccgcgcagcgataaagaagatgctcgagactccagggccgtacctcttggatataatcgtcccacaccaggagcatgtgttgcctatgatccctagtggtggggctttcaaggatatgatcctggatggtgatggcaggactgtgtactgacttcgaataggtacccggggatcctctagtgccgtgggtcgtttaagctgccgctgtacctgtgtcgtctggtgccttctggtgtacctgggaggttgtcgtctatcaagtatctgtggttggtgtcatgagtcagtgagtcccaatactgttcgtgtcctgtgtgcattatacccaaaactgttatgggcaaatcatgaataagcttgatgttcgaacttaaaagtctctgctcaatatggtattatggttgtttttgttcgtctcctaatatttgcctgggatcaaattttattggctggtgttcatttgacctccatgttcttgctaggctccattttttactctacagccataatatgtttgattgtttggtttgttctttgttgtacacctggttctgtcgagcttagttttcgacactggcttacagcttaacatgttgctattttattgggttctgattgctattttattgggttctgattgctagtttttgctgaatccaaaaaccatgttatttatttaagcgatccaggttattattatgatggtggctaagtttttttttttccaagggtaaattttctggattctccagtgtttctgtggccgaattcaatcactagagtcgacctgcaaagcttcggtccgggcctagaaggcccgcgccacttacgcttgattccgatgacttcgtaggttcctagctcaagccgctcgtgtccaagcgtcacttacgattagctaatgattacggcatctaggaccgactagctagctagctaagagctcggtaccgagctcgaattcattccgattaatcgtggcctcttgctcttcaggatgaagagctatgtttaaacgtgcaagcgctactagacaattcagtacattaaaaacgtccgcaatgtgttattaagttgtctaagcgtcaatttgtttacaccacaatatatcctgcca

SEQ ID NO: 29 - DNA, 15992 bp, Artificial sequence
  PHP93933
gtttacccgccaatatatcctgtcaaacactgatagttttaaactgaaggcgggaaacgacaatctgatcatgagcggagaattaagggagtcacgttatgacccccgccgatgacgcgggacaagccgttttacgtttggaactgacagaaccgcaacgttgaaggagccactcagcaagctggtacgattgtaatacgactcactatagggcgaattgagcgctgtttaaacgctcttcaactggaagagcggttacgctgtttaaacgctcttcaactggaagagcggttactaccggttcactagctagctgctaatcgagctagttaccctatgaggtgacatgaagcgctcacggttactatgacggttagcttcacgactgttggtggcagtagcgtacgacttagctatagttccggacttacccttaagcgatttaaatcctgaggcctgcaacactgatagtttaaactgaaggcgggaaacgacaatctgatcatgagcggagaattaagggagtcacgttatgacccccgccgatgacgcgggacaagccgttttacgtttggaactgacagaaccgcaacgattgaaggagccactcagccgcgggtttctggagtttaatgagctaagcacatacgtcagaaaccattattgcgcgttcaaaagtcgcctaaggtcactatcagctagcaaatatttcttgtcaaaaatgctccactgacgttccataaattcccctcggtatccaattagagtctcatattcactcccatggcggccaatgcgggcggcggtggagcgggaggaggcagcggcagcggcagcgtggctgcgccggcggtgtgccgccccagcggctcgcggtggacgccgacgccggagcagatcaggatgctgaaggagctctactacggctgcggcatccggtcgcccagctcggagcagatccagcgcatcaccgccatgctgcggcagcacggcaagatcgagggcaagaacgtcttctactggttccagaaccacaaggcccgcgagcgccagaagcgccgcctcaccagcctcgacgtcaacgtgcccgccgccggcgcggccgacgccaccaccagccaactcggcgtcctctcgctgtcgtcgccgccgccttcaggcgcggcgcctccctcgcccaccctcggcttctacgccgccggcaatggcggcggatcggctgtgctgctggacacgagttccgactggggcagcagcggcgctgctatggccaccgagacatgcttcctgcaggactacatgggcgtgacggacacgggcagctcgtcgcagtggccacgcttctcgtcgtcggacacgataatggcggcggccgcggcgcgggcggcgacgacgcgggcgcccgagacgctccctctcttcccgacctgcggcgacgacggcggcagcggtagcagcagctacttgccgttctggggtgccgcgtccacaactgccggcgccacttcttccgttgcgatccaacagcaacaccagctgcaggagcagtacagcttttacagcaacagcaacagcacccagctggccggcaccggcaaccaagacgtatcggcaacagcagcagcagccgccgccctggagctgagcctcagctcatggtgctccccttaccctgctgcagggagtatgtgagagcaacgcgagctgccactgctcttcactgatgtctctggaatggaaggaggaggaagtgagaacagatcattcgacaaagcagcattagtccgttgatcggtggaagaccactcgtcagtgttgagttgaatgtttgatcaataaaatacggcaatgctgtaagggttgttttttatgccattgataatacactgtactgttcagttgttgaactctatttcttagccatgccaagtgcttttcttattttgaataacattacagcaaaaagttgaaagacaaaaaaaaaaacccccgaacagagtgctttgggtcccaagcttctttagactgtgttcggcgttccccctaaatttctccccctatatctcactcacttgtcacatcagcgttctctttccccctatatctccacgctctacagcagttccacctatatcaaacctctataccccaccacaacaatattatatactttcatcttcaactaactcatgtaccttccaatttttttctactaataattatttacgtgcacagaaacttagcaaggagagagagagcgggaatttaaatgctcggcgttaggcttttagtccgctaggtggctagaccgaggttaggacgctagttcactaggggcctagtggtgttttaagacgtcacggtcaccgcggccgcatcgagcagctggcttgtggggaccagacaaaaaaggaatggtgcagaattgttaggcgcacctaccaaaagcatctttgcctttattgcaaagataaagcagattcctctagtacaagtggggaacaaaataacgtggaaaagagctgtcctgacagcccactcactaatgcgtatgacgaacgcagtgacgaccacaaaactcgagcaacgagatcatgagccaatcaaagaggagtgatgtagacctaaagcaataatggagccatgacgtaagggcttacgcccatacgaaataattaaaggctgatgtgacctgtcggtctctcagaacctttactttttatgtttggcgtgtatttttaaatttccacggcaatgacgatgtgaccgtcgacccactaaaacattgctttgtcaaaagctaaaaaagatgatgcccgacagccacttgtgtgaagcatgagaagccggtccctccactaagaaaattagtgaagcatcttccagtggtccctccactcacagctcaatcagtgagcaacaggacgaaggaaatgacgtaagccatgacgtctaatcccattcgaaacgcgtggaccgaagcttgcatgcctgcagtgcagcgtgacccggtcgtgcccctctctagagataatgagcattgcatgtctaagttataaaaaattaccacatattttttttgtcacacttgtttgaagtgcagtttatctatctttatacatatatttaaactttactctacgaataatataatctatagtactacaataatatcagtgttttagagaatcatataaatgaacagttagacatggtctaaaggacaattgagtattttgacaacaggactctacagttttatctttttagtgtgcatgtgttctcctttttttttgcaaatagcttcacctatataatacttcatccattttattagtacatccatttagggtttagggttaatggtttttatagactaatttttttagtacatctattttattctattttagcctctaaattaagaaaactaaaactctattttagtttttttatttaataatttagatataaaatagaataaaataaagtgactaaaaattaaacaaataccctttaagaaattaaaaaaactaaggaaacatttttcttgtttcgagtagataatgccagcctgttaaacgccgtcgacgagtctaacggacaccaaccagcgaaccagcagcgtcgcgtcgggccaagcgaagcagacggcacggcatctctgtcgctgcctctggacccctctcgagagttccgctccaccgttggacttgctccgctgtcggcatccagaaattgcgtggcggagcggcagacgtgagccggcacggcaggcggcctcctcctcctctcacggcaccggcagctacgggggattcctttcccaccgctccttcgctttcccttcctcgcccgccgtaataaatagacaccccctccacaccctctttccccaacctcgtgttgttcggagcgcacacacacacaaccagatctcccccaaatccacccgtcggcacctccgcttcaaggtacgccgctcgtcctcccccccccccctctctaccttctctagatcggcgttccggtccatgcatggttagggcccggtagttctacttctgttcatgtttgtgttagatccgtgtttgtgttagatccgtgctgctagcgttcgtacacggatgcgacctgtacgtcagacacgttctgattgctaacttgccagtgtttctctttggggaatcctgggatggctctagccgttccgcagacgggatcgatttcatgattttttttgtttcgttgcatagggtttggtttgcccttttcctttatttcaatatatgccgtgcacttgtttgtcgggtcatcttttcatgcttttttttgtcttggttgtgatgatgtggtctggttgggcggtcgttctagatcggagtagaattctgtttcaaactacctggtggatttattaattttggatctgtatgtgtgtgccatacatattcatagttacgaattgaagatgatggatggaaatatcgatctaggataggtatacatgttgatgcgggttttactgatgcatatacagagatgctttttgttcgcttggttgtgatgatgtggtgtggttgggcggtcgttcattcgttctagatcggagtagaatactgtttcaaactacctggtgtatttattaattttggaactgtatgtgtgtgtcatacatcttcatagttacgagtttaagatggatggaaatatcgatctaggataggtatacatgttgatgtgggttttactgatgcatatacatgatggcatatgcagcatctattcatatgctctaaccttgagtacctatctattataataaacaagtatgttttataattattttgatcttgatatacttggatgatggcatatgcagcagctatatgtggatttttttagccctgccttcatacgctatttatttgcttggtactgtttcttttgtcgatgctcaccctgttgtttggtgttacttctgcaggtcgactttaacttagcctaggatccatggccactgtgaacaactggctcgctttctccctctccccgcaggagctgccgccctcccagacgacggactccacactcatctcggccgccaccgccgaccatgtctccggcgatgtctgcttcaacatcccccaagattggagcatgaggggatcagagctttcggcgctcgtcgcggagccgaagctggaggacttcctcggcggcatctccttctccgagcagcatcacaaggccaactgcaacatgatacccagcactagcagcacagtttgctacgcgagctcaggtgctagcaccggctaccatcaccagctgtaccaccagcccaccagctcagcgctccacttcgcggactccgtaatggtggcttcctcggccggtgtccacgacggcggtgccatgctcagcgcggccgccgctaacggtgtcgctggcgctgccagtgccaacggcggcggcatcgggctgtccatgattaagaactggctgcggagccaaccggcgcccatgcagccgagggtggcggcggctgagggcgcgcaggggctctctttgtccatgaacatggcggggacgacccaaggcgctgctggcatgccacttctcgctggagagcgcgcacgggcgcccgagagtgtatcgacgtcagcacagggtggagccgtcgtcgtcacggcgccgaaggaggatagcggtggcagcggtgttgccggcgctctagtagccgtgagcacggacacgggtggcagcggcggcgcgtcggctgacaacacggcaaggaagacggtggacacgttcgggcagcgcacgtcgatttaccgtggcgtgacaaggcatagatggactgggagatatgaggcacatctttgggataacagttgcagaagggaagggcaaactcgtaagggtcgtcaagtctatttaggtggctatgataaagaggagaaagctgctagggcttatgatcttgctgctctgaagtactggggtgccacaacaacaacaaattttccagtgagtaactacgaaaaggagctcgaggacatgaagcacatgacaaggcaggagtttgtagcgtctctgagaaggaagagcagtggtttctccagaggtgcatccatttacaggggagtgactaggcatcaccaacatggaagatggcaagcacggattggacgagttgcagggaacaaggatctttacttgggcaccttcagcacccaggaggaggcagcggaggcgtacgacatcgcggcgatcaagttccgcggcctcaacgccgtcaccaacttcgacatgagccgctacgacgtgaagagcatcctggacagcagcgccctccccatcggcagcgccgccaagcgcctcaaggaggccgaggccgcagcgtccgcgcagcaccaccacgccggcgtggtgagctacgacgtcggccgcatcgcctcgcagctcggcgacggcggagccctggcggcggcgtacggcgcgcactaccacggcgccgcctggccgaccatcgcgttccagccgggcgccgccagcacaggcctgtaccacccgtacgcgcagcagccaatgcgcggcggcgggtggtgcaagcaggagcaggaccacgcggtgatcgcggccgcgcacagcctgcaggacctccaccacctgaacctgggcgcggccggcgcgcacgactttttctcggcagggcagcaggccgccgccgctgcgatgcacggcctgggtagcatcgacagtgcgtcgctcgagcacagcaccggctccaactccgtcgtctacaacggcggggtcggcgacagcaacggcgccagcgccgtcggcggcagtggcggtggctacatgatgccgatgagcgctgccggagcaaccactacatcggcaatggtgagccacgagcaggtgcatgcacgggcctacgacgaagccaagcaggctgctcagatggggtacgagagctacctggtgaacgcggagaacaatggtggcggaaggatgtctgcatgggggactgtcgtgtctgcagccgcggcggcagcagcaagcagcaacgacaacatggccgccgacgtcgggcatggcggcgcgcagctcttcagtgtctggaacgacacttaagcgtacctagtggtacctgacatcttatagtctgcaacctctcgtgtctgaattcctatctttatcaagtgttattgcttccacgactataggacagctttcgtcgaaagcttttgctcatgtgatctcgaaggattcatctagtctgatttttcgtgacttgtatcggttttattggattcatccaacatatatcaataaaaaatgagttgtgtttcctttcttcctagttcagttaaaattatttccctcctgcgcttgtgctgtaattgtctgtgtacctgttgtttgtgactgtgttagttcccttggatatgatttcgtatttgatatgtacatggagatagcttagcttcattattggagtatgaagttagtatgacatagtcactctcctggaaaattgacactgcaaaccatatttttattctgaaccacaaatcctagtcagtccgctggcatatgccgtccgtttgctgaatccagaacgtgggtttggagatgtacggctgagatgcctctatgcgaaggggatttcgtggtgaaacgagatgggagtagagcaacgcccgtggaagatgcttcaaacttccacacttttgagcaacgatcggcagtagtaaggtagacgatttcaagatcaaagcatatgaagataaacaacatcaacaacaaaatttgttggggttctatagagagaaacagagctacatacatacactgttttgtatctaccatctgagatgatgaaaagatgaaaaactaaagaatgccccggcgccaacgccaggacacgccgcgcgcgcgtcacccgagccatctcttgacccagccggcgctgtatatttacacacgttgcagcatcgatcaccacctgttcgatcgcgtcgccgtcaccggcgcgccgcgacttattgaactagtctagggcgcggctaacaacctagcttagattgccttgtctaaacccttaggctaacgcgccactctagaaggccgatctccccgggtgatcagctgcccttaaggccaattgttcaagattcattcaacaattgaaacatctcccatgattaaatcagtataaggttgctatggtcttgcttgacaaagtttttttttgagggaatttcaactaaatttttgagtgaaactatcaaatactgattttaaaaaatttttataaaaggaagcgcagagataaaaggccatctatgctacaaaagtacccaaaaatgtaatcctaaagtatgaattgcattttttttttgtttggacgaaaggaaaggagtattaccacaagaatgatatcatcttcatatttagatcttttttgggtaaagcttgagattctctaaatatagagaaatcagaagaaaaaaaaaccgtgttttggtggttttgatttctagcctccacaataactttgacggcgtcgacaagtctaacggacaccaagcagcgaaccaccagcgccgagccaagcgaagcagacggccgagacgttgacaccttcggcgcggcatctctcgagagttccgctccggcgctccacctccaccgctggcggtttcttattccgttccgttccgcctcctgctctgctcctctccacaccacacggcacgaaaccgttacggcaccggcagcacccagcacgggagaggggattcctttcccaccgttccttccctttccgccccgccgctataaatagccagccccatccccagcttttttccccaatctcatctcctctctcctgttgttcggagcacacgcacaatccgatcgatccccaaatccccttcgtctctcctcgcgagcctcgtggatcccagcttcaaggtacggcgatcgatcatcccccctccttctctctaccttcttttctctagactacatcggatggcgatccatggttagggcctgctagtttcccttcctgttttgtcgatggctgcgaggcacaatagatctgatggcgttatgacggctaacttgtcatgttgttgcgatttatagtccctttaggagatcagtttaatttctcggatggttcgagatcggtggtccatggttagtaccctaagatccgcgctgttagggttcgtagatggaggcgacctgttctgattgttaacttgtcagtacctgggaaatcctgggatggttctagctcgtccgcagatgagatcgatttcatgatcctctgtatcttgtttcgttgcctaggttccgtctaatctatccgtggtatgatgtagatgttttgatcgtgctaactacgtcttgtaaagttaattgtcaggtcataatttttagcatgcctttttttttgtttggttttgtctaattgggctgtcgttctagatcagagtagaagactgttccaaactacctgctggatttattgaacttggatctgtatgtgtgtcacatatcttcataaattcatgattaagatggattgaaatatcttttatctttttggtatggatagttctatatgttggtgtggctttgttagatgtatacatgcttagatacatgaagcaacgtgctgctactgtttagtaattgctgttcatttgtctaataaacagataaggatatgtatttatgttgctgttggttttgctggtactttgttggatacaaatgcttcaatacagaaaacagcatgctgctacgatttaccatttatctaatcttatcatatgtctaatctaataaacaaacatgcttttaaattatcttcatatgcttggatgatggcatacacagcggctatgtgtggttttttaaatacccagcatcatgggcatgcatgacactgctttaatatgctttttatttgcttgagactgtttcttttgtttatactgaccctttagttcggtgactcttctgcaggtcgactttaacttagcctaggatccatggcccagtccaagcacggcctgaccaaggagatgaccatgaagtaccgcatggagggctgcgtggacggccacaagttcgtgatcaccggcgagggcatcggctaccccttcaagggcaagcaggccatcaacctgtgcgtggtggagggcggccccttgcccttcgccgaggacatcttgtccgccgccttcatgtacggcaaccgcgtgttcaccgagtacccccaggacatcgtcgactacttcaagaactcctgccccgccggctacacctgggaccgctccttcctgttcgaggacggcgccgtgtgcatctgcaacgccgacatcaccgtgagcgtggaggagaactgcatgtaccacgagtccaagttctacggcgtgaacttccccgccgacggccccgtgatgaagaagatgaccgacaactgggagccctcctgcgagaagatcatccccgtgcccaagcagggcatcttgaagggcgacgtgagcatgtacctgctgctgaaggacggtggccgcttgcgctgccagttcgacaccgtgtacaaggccaagtccgtgccccgcaagatgcccgactggcacttcatccagcacaagctgacccgcgaggaccgcagcgacgccaagaaccagaagtggcacctgaccgagcacgccatcgcctccggctccgccttgccctccggactcagatctcgatagggtaccaatggccagttaacagatccagctgctgctgttctagggttcacaagtctgcctatttgtcttccccaatggagctatggttgtctggtctggtccttggtcgtgtcccgtttcattgtgtactatttacctgtaatgtgtatccttaagtctggtttgatggtgtctgaaacgttttgctgtggtagagcagcatggaagaactataatgaataagtgatccctaatcattgtgtccaaattttgcttctgctatacccttttgtgctgtttcttatgttttgcttaaaaatttgatctgacaaacaaatttgtctaaattatgctcttgttctgactgtgtactgtacacatttgtattgctaccggtttggcacatagttttctctttgattgcagatcaaacccttctgattgcagattgcttggctatggctgatgtgctcactgttcttctttagcttgtatattgctgatggtggcttggctacggctgaaaaagttgctgctgcgccgacttggcaactgttgctccagtaatgctttgtcctctcttcctagccgccgacttggcacttggcagctgttgctcctgtaatgcgttgttatctcttatctcttgagatgtactatgattttgaggctgtttgacttgtgccagattgccagtgctgatgctatattatctcaggtttttatgctagtatatgttttactgtgtgctgcctgtgtcgagttacgtaatctattgaaccgctatgcgtgttgatgccctgttgttgcttgccagattgatgcccctgttgcttgcagcttgcaagctgtagtgaaatcctaaaattcgaaaccaaatctattctgaacttttgaagatctgtgatgtccggaagaaaagattcaaacagataaacgggactctccagaatctataaaataaatgatcgacaaacgctttgctttggtaggcttcctagttagttagcggaccgaagcttcggtccgggcctagaaggccagcttcggccgcccctcggtaccctgggatctgcccttactttaacgcctctaaccaacacccctttatctttataaggaacaataaacagaatttgccccactgttctaaatcacctaataatatccccagctaaaaacaataaaggtttcctagaattaagacaagcatgactgttcctccaggagggtttggaacattgttgcagtcttgcagatacgggcgaagggtgagaaacagagcggagggctggaggtgacctcggtagtcgacgccggagttgagcttgacaacgacggggcggcccctgatggacttgaggaagtccgatggcgtcttcaccgtcccgccggcgcccgaggcgggcctgtcgctgccgccgccgccgctgctcatcttgcgcgctgtgcccccggcggtgtccctgtgttgcggatcgcgggtgggccaggtggatgcgagggcgacccgtttggactccggccggagccgccggatccctggtcggtgtcagtgccgtttactctgggccccacgtgtcagtaccgtctgtagatgacaacaacccgtcgtccacagtcatgtccaaaatatcctttcttcttttttttcgattcggatatctatcttccttttttttttccaaaaatcttcttgacgcaccagcgcgcacgtttgtggtaaacgccgacacgtcggtcccacgtcgatagaccccacccaccagtgagtagcgtgtacgtattcgggggtgacggacgtgtcgccgtcgtcttgctagtcccattcccatctgagccacacatctctgaacaaaaaaaaggagggaggcctccacgcacatccccctccgtgccacccgccccaaaccctcgcgccgcctccgagacagccgccgcaaccatggccaccgccgccgccgcgtctaccgcgctcactggcgccactaccgctgcgcccaaggcgaggcgccgggcgcacctcctggccacccgccgcgccctcgccgcgcccatcaggtgctcagcggcgtcacccgccatgccgatggctcccccggccaccccgctccggccgtggggccccaccgagccccgcaagggtgctgacatcctcgtcgagtccctcgagcgctgcggcgtccgcgacgtcttcgcctaccccggcggcgcgtccatggagatccaccaggcactcacccgctcccccgtcatcgccaaccacctcttccgccacgagcaaggggaggcctttgccgcctccggctacgcgcgctcctcgggccgcgtcggcgtctgcatcgccacctccggccccggcgccaccaacctagtctccgcgctcgccgacgcgctgctcgattccgtccccatggtcgccatcacgggacaggtggcgcgacgcatgattggcaccgacgccttccaggagacgcccatcgtcgaggtcacccgctccatcaccaagcacaactacctggtcctcgacgtcgacgacatcccccgcgtcgtgcaggaggctttcttcctcgcctcctctggtcgaccagggccggtgcttgtcgacatccccaaggacatccagcagcagatggcggtgcctgtctgggacaagcccatgagtctgcctgggtacattgcgcgccttcccaagccccctgcgactgagttgcttgagcaggtgctgcgtcttgttggtgaatcgcggcgccctgttctttatgtgggcggtggctgcgcagcatctggtgaggagttgcgacgctttgtggagctgactggaatcccggtcacaactactcttatgggcctcggcaacttccccagcgacgacccactgtctctgcgcatgctaggtatgcatgggacggtgtatgcaaattatgcagtggataaggccgatctgttgcttgcacttggtgtgcggtttgatgatcgcgtgacagggaagattgaggcttttgcaagcagggctaagattgtgcacgttgatattgatccggctgagattggcaagaacaagcagccacatgtgtccatctgtgcagatgttaagcttgctttgcagggcatgaatgctcttcttgaaggaagcacatcaaagaagagctttgactttggctcatggaacgatgagttggatcagcagaagagggaattcccccttgggtataaaacatctaatgaggagatccagccacaatatgctattcaggttcttgatgagctgacgaaaggcgaggccatcatcggcacaggtgttgggcagcaccagatgtgggcggcacagtactacacttacaagcggccaaggcagtggttgtcttcagctggtcttggggctatgggatttggtttgccggctgctgctggtgcttctgtggcaaacccaggtgtcactgttgttgacatcgatggagatggtagctttctcatgaacgttcaggagctagctatgatccgaattgagaacctcccagtgaaggtctttgtgctaaacaaccagcacctggggatggtggtgcagttggaggacaggttctataaggccaacagagcgcacacatacttgggaaacccagagaatgaaagtgagatatatccagatttcgtgacgatcgccaaagggttcaacattccagcggtccgtgtgacaaagaagaacgaagtccgcgcagcgataaagaagatgctcgagactccagggccgtacctcttggatataatcgtcccacaccaggagcatgtgttgcctatgatccctagtggtggggctttcaaggatatgatcctggatggtgatggcaggactgtgtactgactagctagtcagttaacagatctgccagatcctcggtgtacaaataacccgtcttatcctatgagacgggccggcgtcagtgtgttctggaggaatttttatgtcagagcctttttctttgtgtgcttgatgtagatgccaagggaagcttattggctgttgaagcttgatgcaaaataaattatggaactctgttttttgtttatctaataataactagcaaatatgcttccattgcattgaaactaacagccttttgtgtttccaagttttattttgtgacaatgtcatctatttcaattagttgtggaatcggaaacttgcaggactaacttggaaactccaatccctcagcatcctggactttttcctggtgtaatccatgtagatattattttaatcatcattttagttctggaggtttttccatctccggttttgctcccctttcttcaaaaaaaaaaaaaaaatgccgtaggcgccgcaacgcccacctgttgttcaaactcatgggcacgagtggctcgaagattttatacaacaattgctgtagtttcaccgttgctggtgaagaagcatttttttaaaaaaatatagtggtattcattttaattagtttagttgtgcagcgagcaaaatttggacatgctctgctcggaatctgatcgacctagacacagattagcagcagtagctttgtcatctgttccaagagttgcgatctgatagaagaaaaaaaaaccttcccttcaatgtaaaaccgaaactaacaagaaagaagcacagtgccgtttaggcaagtatggagtacgtattaagcatgtagaaggccatgcatgaaccactaacaagaaagaagcgcagtgccattcaggcaagcataagcatgtagattggcatgcatgaacaactaacagtagatcgtctctggtctgattagaagttttttgggaagccaagaaatcatgtacaactggttccatctcaaattccgtggcaaaaagaggcctaagcaacataaagcttgctcgagccagggtgcttcctgagctgattccgatgacttcgtaggttcctagctcaagccgctcgtgtccaagcgtcacttacgattagctaatgattacggcatctaggaccgactagctaactaactagtacgccgactagctagctaaggtaccgagctcgaattcattccgattaatcgtggcctcttgctcttcaggatgaagagctatgtttaaacgtgcaagcgctactagacaattcagtacattaaaaacgtccgcaatgtgttattaagttgtctaagcgtcaatttgtttacaccacaatatatcctgcca

SEQ ID NO: 30 - DNA, 20933 bp, Artificial sequence
  PHP94331
gtttacccgccaatatatcctgtcaaacactgcggccgcacttgaccgcggatggagccggagctgtggtgaggccatcgacgggaggtgggggagaacacagtctcagtgttctttgtgagtccgcaaggtttttagcttttctgtattaattaaggttgctgttggctgtagaatacggtcgtggaagagctgtatcggtagctactacgtaagctattatatactggaagtctggagctcgtcgatctccggtcgtcttcctccatttctcctcgtcttgctttgactgctgctaccatttgcttctgttttctgatgaagcatgccatgtcggccaccagtgtttgtgtggtttttgcagggaatggctttcaagtgctgtgattgaatggccctcgtcgtcctcggctgagctcacatggacgcgtcatgtgagtgagatatatgatcatatgatgagtggggttcgggtgagtgcgtacttgaagtaggatcccgctttcactcattcattcattggcctttaaaccgggaaattttcgcgaggagatggagggaagcaagcagggtgacgagtgcagagtgccgcgagcgctttgtcaaaaggcaccgccgtaggcaaaaaaatcaatggccctgactgactcgatggtagtactactgtagagactagagagggttgctccccatatcttcgtgtgacttttactccagcattgcatttccgtcattgagacgttaattaatagcagctttcgggacagatgactgtggccatgtttcgtcacggccgcttcgtgccagctgggggtactatagtactgtgattttgttagtaaaaactttcattaggccaccattgacgaccgggccttcgcttttgctgcgctaattaaccatttcccggcgaccgaagggaacatgaacatgccccgacacatgagggcatgaggactagtgttctccctgtcgttcgttgacttgactagtgatagtttaaacgctcttcaactggaagagcggttactaccggttcactagctagctgctaatcgagctagttaccctatgaggtgacatgaagcgctcacggttactatgacggttagcttcacgactgttggtggcagtagcgtacgacttagctatagttccggacttacctagctaataacttcgtatagcatacattatacgaagttatggttaccgaattcgagctcggtaccctggttcacaaactcaatacaacacacagtggagtagggtattacgctccggcggcccgaaccactctaaatccttgtgtcctcgtgtgctcttccaccattaatgactgtaattgcagggacacgaagagttgtagcgcttttgccaacaagatccgctatatgctagtagagtggaacctgcacagcaacaagcatccaataatctgagaataagaattatgtgtggtgatggttctcatctctgcaactcgccattttcgcgagagaaccaaatccaagttggtgaagatcatgatttgggctcatgggctggcatagtagctattacctttgcaattgtggttcgaatctatccgatattctccttttcagggagagctaatgcttatgcttattgggtattttggtttgacactgcttcacgcccaaaaaaaggcaactatgtctgagttggatatggcccaaaaaaaggcagctatgtctgagttggatatggaagtcttctttcgtttagggtgaagtaagaccaagctcatgagcttattatcttaggtcggaacaaattagttgataggcatggcacatttatcaaattataatgattttaacagaaaagcaacacctctttttcagcagcaccagctttgcaagctgcaattgacactccaagcatagtatttgctccaaactcagcctgcatttcgcacaatatcatatctatttccatttggataaaatatattttccagaaatatgggaacagaatcaagatacagaaaaaagttgtggtagtagtggtaagtggaaacacaagtacagtgaaaagatagcattatttctgaacagtcaaattaaccgaaataagtagtatcacatactgcccctaaattgactacacccaatgtaaagaattgcttgagcatattgagccatcagttgtttgtttgtgtaacggatttgacaatgcagagttcaggagcaaaaaaccgcaaaggagagaaagagggaaaggatctcctagtatcccaccttgtggcgcgccctgtcaagtgcatgatggcctggtcgatctgcgtctgctgctgcggttccatcccaacgagtgcctccgacaccttgtcgttgatcacccgcaccgcgtaggcgacccccctggcgaggaacttccgcctctcggaggccccggccgcgtcggcggcggcgccctcgagcgcgcccacgctagccgtagatgctcggtgcacggccttgttggtgtgcaactcgacctcaacggccggtgcgctacgcccgtcaaggatctggcgcgcccgcaccctcgtgatcacggtgggcgcctcccgcctcatgtggccgacgatgaaaagcgccgggttaggggccttggcgcgcaccgccgtattcagggcctcctcgctcttgcgcgagagcaggtgcttccccaggtactcctgcactgacaaggctgccacagcggtggaatttgtcctcacgacttcgccacgtcgtcctcacctccctggcttcccacgactccgccgtatcgaggtgctcggtgggtcgtcttaatccgaagtccgaactaggaagacgagacagagaggtctgaggaatgggcctcgtttgatgttgagctgaattatttttccagcataagcccaggtcttggtccatgaacaaaattactagaaacccagcccagtactacgatctaaaagagggactgccactggatagctctctctagcattctccacgctccaatacagcggcgtcgtgtctatccgggtctatccgcgaacacgtgagaactctccagaaactgctttctcctccacttcatctctctcgctttccctctataaaaagaccccttctaggaattgagggagacagcaagcaccaagcagcgatccgaagctcaatcaattcactcaaacctcttccccaaatcttcgattagatcttcgttgacaagaagactagaaccgaacctgacatgtccaacctgctcacggttcaccagaaccttccggctcttccagtggacgcgacgtccgatgaagtcaggaagaacctcatggacatgttccgcgacaggcaagcgttcagcgagcacacctggaagatgctgctctccgtctgccgctcctgggctgcatggtgcaagctgaacaacaggaagtggttccccgctgagcccgaggacgtgagggattaccttctgtacctgcaagcgcgaggtttgtttctgcttctacctttgatatatatataataattatcattaattagtagtaatataatatttcaaatatttttttcaaaataaaagaatgtagtatatagcaattgcttttctgtagtttataagtgtgtatattttaatttataacttttctaatatatgaccaaaacatggtgatgcctaggtctggcagtgaagaccatccagcaacaccttggacaactgaacatgcttcacaggcgctccggcctcccgcgccccagcgactcgaacgccgtgagcctcgtcatgcgccgcatcaggaaggaaaacgtcgatgccggcgaaagggcaaagcaggccctcgcgttcgagaggaccgatttcgaccaggtccgcagcctgatggagaacagcgacaggtgccaggacattaggaacctggcgttcctcggaattgcatacaacacgctcctcaggatcgcggaaattgcccgcattcgcgtgaaggacattagccgcaccgacggcggcaggatgcttatccacattggcaggaccaagacgctcgtttccaccgcaggcgtcgaaaaggccctcagcctcggagtgaccaagctcgtcgaacgctggatctccgtgtccggcgtcgcggacgacccaaacaactacctcttctgccgcgtccgcaagaacggggtggctgcccctagcgccaccagccaactcagcacgagggccttggaaggtattttcgaggccacccaccgcctgatctacggcgcgaaggatgacagcggtcaacgctacctcgcatggtccgggcactccgcccgcgttggagctgctagggacatggcccgcgccggtgtttccatccccgaaatcatgcaggcgggtggatggacgaacgtgaacattgtcatgaactacattcgcaaccttgacagcgagacgggcgcaatggttcgcctcctggaagatggtgactgaggtacccaacctagacttgtccatcttctggattggccaacttaattaatgtatgaaataaaaggatgcacacatagtgacatgctaatcactataatgtgggcatcaaagttgtgtgttatgtgtaattactagttatctgaataaaagagaaagagatcatccatatttcttatcctaaatgaatgtcacgtgtctttataattctttgatgaaccagatgcatttcattaaccaaatccatatacatataaatattaatcatatataattaatatcaattgggttagcaaaacaaatctagtctaggtgtgttttgcgatccgatcgaggccggccacactgatagtttaaactgaaggcgggaaacgacaatctgatcatgagcggagaattaagggagtcacgttatgacccccgccgatgacgcgggacaagccgttttacgtttggaactgacagaaccgcaacgattgaaggagccactcagccgcgggtttctggagtttaatgagctaagcacatacgtcagaaaccattattgcgcgttcaaaagtcgcctaaggtcactatcagctagcaaatatttcttgtcaaaaatgctccactgacgttccataaattcccctcggtatccaattagagtctcatattcactctcccggcggatctcgactctagaggatcgctcaggaaggccgctgagatagagccatggcggccaatgcgggcggcggtggagcgggaggaggcagcggcagcggcagcgtggctgcgccggcggtgtgccgccccagcggctcgcggtggacgccgacgccggagcagatcaggatgctgaaggagctctactacggctgcggcatccggtcgcccagctcggagcagatccagcgcatcaccgccatgctgcggcagcacggcaagatcgagggcaagaacgtcttctactggttccagaaccacaaggcccgcgagcgccagaagcgccgcctcaccagcctcgacgtcaacgtgcccgccgccggcgcggccgacgccaccaccagccaactcggcgtcctctcgctgtcgtcgccgccgccttcaggcgcggcgcctccctcgcccaccctcggcttctacgccgccggcaatggcggcggatcggctgtgctgctggacacgagttccgactggggcagcagcggcgctgctatggccaccgagacatgcttcctgcaggactacatgggcgtgacggacacgggcagctcgtcgcagtggccacgcttctcgtcgtcggacacgataatggcggcggccgcggcgcgggcggcgacgacgcgggcgcccgagacgctccctctcttcccgacctgcggcgacgacggcggcagcggtagcagcagctacttgccgttctggggtgccgcgtccacaactgccggcgccacttcttccgttgcgatccaacagcaacaccagctgcaggagcagtacagcttttacagcaacagcaacagcacccagctggccggcaccggcaaccaagacgtatcggcaacagcagcagcagccgccgccctggagctgagcctcagctcatggtgctccccttaccctgctgcagggagtatgtgagagcaacgcgagctgccactgctcttcactgatgtctctggaatggaaggaggaggaagtgagaacagatcattcgacaaagcagcattagtccgttgatcggtggaagaccactcgtcagtgttgagttgaatgtttgatcaataaaatacggcaatgctgtaagggttgttttttatgccattgataatacactgtactgttcagttgttgaactctatttcttagccatgccaagtgcttttcttattttgaataacattacagcaaaaagttgaaagacaaaaaaaaaaacccccgaacagagtgctttgggtcccaagcttctttagactgtgttcggcgttccccctaaatttctccccctatatctcactcacttgtcacatcagcgttctctttccccctatatctccacgctctacagcagttccacctatatcaaacctctataccccaccacaacaatattatatactttcatcttcaactaactcatgtaccttccaatttttttctactaataattatttacgtgcacagaaacttagcaaggagagagagagcgggaatttaaatgctcggcgttaggcttttagtccgctaggtggctagaccgaggttaggacgctagttcactaggggcctagtggtgttttaagacgtcacggtcacccggtccgggcctagaaggccagcttcaagtttgtacaaaaaagcaggctccggccagaatggcccggaccgaagcttgcatgcctgcagtgcagcgtgacccggtcgtgcccctctctagagataatgagcattgcatgtctaagttataaaaaattaccacatattttttttgtcacacttgtttgaagtgcagtttatctatctttatacatatatttaaactttactctacgaataatataatctatagtactacaataatatcagtgttttagagaatcatataaatgaacagttagacatggtctaaaggacaattgagtattttgacaacaggactctacagttttatctttttagtgtgcatgtgttctcctttttttttgcaaatagcttcacctatataatacttcatccattttattagtacatccatttagggtttagggttaatggtttttatagactaatttttttagtacatctattttattctattttagcctctaaattaagaaaactaaaactctattttagtttttttatttaataatttagatataaaatagaataaaataaagtgactaaaaattaaacaaataccctttaagaaattaaaaaaactaaggaaacatttttcttgtttcgagtagataatgccagcctgttaaacgccgtcgacgagtctaacggacaccaaccagcgaaccagcagcgtcgcgtcgggccaagcgaagcagacggcacggcatctctgtcgctgcctctggacccctctcgagagttccgctccaccgttggacttgctccgctgtcggcatccagaaattgcgtggcggagcggcagacgtgagccggcacggcaggcggcctcctcctcctctcacggcaccggcagctacgggggattcctttcccaccgctccttcgctttcccttcctcgcccgccgtaataaatagacaccccctccacaccctctttccccaacctcgtgttgttcggagcgcacacacacacaaccagatctcccccaaatccacccgtcggcacctccgcttcaaggtacgccgctcgtcctcccccccccccctctctaccttctctagatcggcgttccggtccatgcatggttagggcccggtagttctacttctgttcatgtttgtgttagatccgtgtttgtgttagatccgtgctgctagcgttcgtacacggatgcgacctgtacgtcagacacgttctgattgctaacttgccagtgtttctctttggggaatcctgggatggctctagccgttccgcagacgggatcgatttcatgattttttttgtttcgttgcatagggtttggtttgcccttttcctttatttcaatatatgccgtgcacttgtttgtcgggtcatcttttcatgcttttttttgtcttggttgtgatgatgtggtctggttgggcggtcgttctagatcggagtagaattctgtttcaaactacctggtggatttattaattttggatctgtatgtgtgtgccatacatattcatagttacgaattgaagatgatggatggaaatatcgatctaggataggtatacatgttgatgcgggttttactgatgcatatacagagatgctttttgttcgcttggttgtgatgatgtggtgtggttgggcggtcgttcattcgttctagatcggagtagaatactgtttcaaactacctggtgtatttattaattttggaactgtatgtgtgtgtcatacatcttcatagttacgagtttaagatggatggaaatatcgatctaggataggtatacatgttgatgtgggttttactgatgcatatacatgatggcatatgcagcatctattcatatgctctaaccttgagtacctatctattataataaacaagtatgttttataattattttgatcttgatatacttggatgatggcatatgcagcagctatatgtggatttttttagcactgccttcatacgctatttatttgcttggtactgtttcttttgtcgatgctcaccctgttgtttggtgttacttctgcaggtcgactttaacttagcctaggatccatggccactgtgaacaactggctcgctttctccctctccccgcaggagctgccgccctcccagacgacggactccacactcatctcggccgccaccgccgaccatgtctccggcgatgtctgcttcaacatcccccaagattggagcatgaggggatcagagctttcggcgctcgtcgcggagccgaagctggaggacttcctcggcggcatctccttctccgagcagcatcacaaggccaactgcaacatgatacccagcactagcagcacagtttgctacgcgagctcaggtgctagcaccggctaccatcaccagctgtaccaccagcccaccagctcagcgctccacttcgcggactccgtaatggtggcttcctcggccggtgtccacgacggcggtgccatgctcagcgcggccgccgctaacggtgtcgctggcgctgccagtgccaacggcggcggcatcgggctgtccatgattaagaactggctgcggagccaaccggcgcccatgcagccgagggtggcggcggctgagggcgcgcaggggctctctttgtccatgaacatggcggggacgacccaaggcgctgctggcatgccacttctcgctggagagcgcgcacgggcgcccgagagtgtatcgacgtcagcacagggtggagccgtcgtcgtcacggcgccgaaggaggatagcggtggcagcggtgttgccggcgctctagtagccgtgagcacggacacgggtggcagcggcggcgcgtcggctgacaacacggcaaggaagacggtggacacgttcgggcagcgcacgtcgatttaccgtggcgtgacaaggcatagatggactgggagatatgaggcacatctttgggataacagttgcagaagggaagggcaaactcgtaagggtcgtcaagtctatttaggtggctatgataaagaggagaaagctgctagggcttatgatcttgctgctctgaagtactggggtgccacaacaacaacaaattttccagtgagtaactacgaaaaggagctcgaggacatgaagcacatgacaaggcaggagtttgtagcgtctctgagaaggaagagcagtggtttctccagaggtgcatccatttacaggggagtgactaggcatcaccaacatggaagatggcaagcacggattggacgagttgcagggaacaaggatctttacttgggcaccttcagcacccaggaggaggcagcggaggcgtacgacatcgcggcgatcaagttccgcggcctcaacgccgtcaccaacttcgacatgagccgctacgacgtgaagagcatcctggacagcagcgccctccccatcggcagcgccgccaagcgcctcaaggaggccgaggccgcagcgtccgcgcagcaccaccacgccggcgtggtgagctacgacgtcggccgcatcgcctcgcagctcggcgacggcggagccctggcggcggcgtacggcgcgcactaccacggcgccgcctggccgaccatcgcgttccagccgggcgccgccagcacaggcctgtaccacccgtacgcgcagcagccaatgcgcggcggcgggtggtgcaagcaggagcaggaccacgcggtgatcgcggccgcgcacagcctgcaggacctccaccacctgaacctgggcgcggccggcgcgcacgactttttctcggcagggcagcaggccgccgccgctgcgatgcacggcctgggtagcatcgacagtgcgtcgctcgagcacagcaccggctccaactccgtcgtctacaacggcggggtcggcgacagcaacggcgccagcgccgtcggcggcagtggcggtggctacatgatgccgatgagcgctgccggagcaaccactacatcggcaatggtgagccacgagcaggtgcatgcacgggcctacgacgaagccaagcaggctgctcagatggggtacgagagctacctggtgaacgcggagaacaatggtggcggaaggatgtctgcatgggggactgtcgtgtctgcagccgcggcggcagcagcaagcagcaacgacaacatggccgccgacgtcgggcatggcggcgcgcagctcttcagtgtctggaacgacacttaatattggtaccgtcatgggtcgtttaagctgccgatgtgcctgcgtcgtctggtgccctctctccatatggaggttgtcaaagtatctgctgttcgtgtcatgagtcgtgtcagtgttggtttaataatggaccggttgtgttgtgtgtgcgtactacccagaactatgacaaatcatgaataagtttgatgtttgaaattaaagcctgtgctcattatgttctgtctttcagttgtctcctaatatttgcctgcaggtactggctatctaccgtttcttacttaggaggtgtttgaatgcactaaaactaatagttagtggctaaaattagttaaaacatccaaacaccatagctaatagttgaactattagctatttttggaaaattagttaatagtgaggtagttatttgttagctagctaattcaactaacaatttttagccaactaacaattagtttcagtgcattcaaacacccccttaatgttaaggtggttctatctaccgtctcctaatatatggttgattgttcggtttgttgctatgctattgggttctgattgctgctagttcttgctgaatccagaagttctcgtagtatagctcagattcatattatttatttgagtgataagtgatccaggttattactatgttagctaggttttttttacaaggataaattatctgtgatcataattcttatgaaagctttatgtttcctggaggcagtggcatgcaatgcatgacagcaacttgatcacaccagctgaggtagatacggtaacaaggttcttaaatctgttcaccaaatcattggagaacacacatacacattcttgccagtcttggttagagaaatttcatgacaaaatgccaaagctgtcttgactcttcacttttggccatgagtcgtgacgcgacttattgaactagtctagggcgcggctaacaacctagcttagattgccttgtctaaacccttaggctaacgcgccactctagaaggccgatctactgcgcagccggctttaattcgtaacgagcagtttataccgttttgcgctgcattcaccttcgtgagtccggaccccggaagacaggaactgtagcctttttccctttgctagcatgaatatgaatagaataacacgaatttaacatcaattcagctcatattggaacaatctacgcctaaaatttagtggaacacgttttgctcattttccttgaaaagcaacagtgaagcaacatcggtaaaggttcttttggttgcctctaacggtctaacctgaggattcagttataatctggaacatgacagaaacagagcctcgcacccgttttgggaccaaaaccacatgatcgatctccaagaagattattttggacaatatttttccagccacaggcaatccgaagaccacaaatcagaggcactccaaatgcagcccatccattggaccatacagataagacccggataaggcagagcccatcgtgaccgtcaaatagatcacgtccggtctacggccgtccgatctgccacccagagatagcaccgggatttcctataagcacttttcctatttgtagcccgtgacgagcccagcgccacacaccaacctcagcacaccaaggagagtacgtggaggagcagccccatggtccacaaccaagcactcccatcatcatgcatgcagcaggctgtgctgtggacctgatcgagtttcaattgatccaagcaagcaagagggatgggagtccttggttgtggactagacttgtccatcttctggattggccaacttaattaatgtatgaaataaaaggatgcacacatagtgacatgctaatcactataatgtgggcatcaaagttgtgtgttatgtgtaattactagttatctgaataaaagagaaagagatcatccatatttcttatcctaaatgaatgtcacgtgtctttataattctttgatgaaccagatgcatttcattaaccaaatccatatacatataaatattaatcatatataattaatatcaattgggttagcaaaacaaatctagtctaggtgtgttttgcattaagacccgtcgtcaagtaggaattccagaaatcaacgcacggtaactaaatcctcgcgctaagctgggtcagtctagaaggccgatctcccgggataacttcgtatagcatacattatacgaagttatgaattccggaccgggttaccgaattcctgcccttaaggccaattgttcaagattcattcaacaattgaaacatctcccatgattaaatcagtataaggttgctatggtcttgcttgacaaagtttttttttgagggaatttcaactaaatttttgagtgaaactatcaaatactgattttaaaaaatttttataaaaggaagcgcagagataaaaggccatctatgctacaaaagtacccaaaaatgtaatcctaaagtatgaattgcattttttttttgtttggacgaaaggaaaggagtattaccacaagaatgatatcatcttcatatttagatcttttttgggtaaagcttgagattctctaaatatagagaaatcagaagaaaaaaaaaccgtgttttggtggttttgatttctagcctccacaataactttgacggcgtcgacaagtctaacggacaccaagcagcgaaccaccagcgccgagccaagcgaagcagacggccgagacgttgacaccttcggcgcggcatctctcgagagttccgctccggcgctccacctccaccgctggcggtttcttattccgttccgttccgcctcctgctctgctcctctccacaccacacggcacgaaaccgttacggcaccggcagcacccagcacgggagaggggattcctttcccaccgttccttccctttccgccccgccgctataaatagccagccccatccccagcttttttccccaatctcatctcctctctcctgttgttcggagcacacgcacaatccgatcgatccccaaatccccttcgtctctcctcgcgagcctcgtggatcccagcttcaaggtacggcgatcgatcatcccccctccttctctctaccttcttttctctagactacatcggatggcgatccatggttagggcctgctagtttcccttcctgttttgtcgatggctgcgaggcacaatagatctgatggcgttatgacggctaacttgtcatgttgttgcgatttatagtccctttaggagatcagtttaatttctcggatggttcgagatcggtggtccatggttagtaccctaagatccgcgctgttagggttcgtagatggaggcgacctgttctgattgttaacttgtcagtacctgggaaatcctgggatggttctagctcgtccgcagatgagatcgatttcatgatcctctgtatcttgtttcgttgcctaggttccgtctaatctatccgtggtatgatgtagatgttttgatcgtgctaactacgtcttgtaaagttaattgtcaggtcataatttttagcatgcctttttttttgtttggttttgtctaattgggctgtcgttctagatcagagtagaagactgttccaaactacctgctggatttattgaacttggatctgtatgtgtgtcacatatcttcataaattcatgattaagatggattgaaatatcttttatctttttggtatggatagttctatatgttggtgtggctttgttagatgtatacatgcttagatacatgaagcaacgtgctgctactgtttagtaattgctgttcatttgtctaataaacagataaggatatgtatttatgttgctgttggttttgctggtactttgttggatacaaatgcttcaatacagaaaacagcatgctgctacgatttaccatttatctaatcttatcatatgtctaatctaataaacaaacatgcttttaaattatcttcatatgcttggatgatggcatacacagcggctatgtgtggttttttaaatacccagcatcatgggcatgcatgacactgctttaatatgctttttatttgcttgagactgtttcttttgtttatactgaccctttagttcggtgactcttctgcaggtcgactttaacttagcctaggatccatggcccagtccaagcacggcctgaccaaggagatgaccatgaagtaccgcatggagggctgcgtggacggccacaagttcgtgatcaccggcgagggcatcggctaccccttcaagggcaagcaggccatcaacctgtgcgtggtggagggcggccccttgcccttcgccgaggacatcttgtccgccgccttcatgtacggcaaccgcgtgttcaccgagtacccccaggacatcgtcgactacttcaagaactcctgccccgccggctacacctgggaccgctccttcctgttcgaggacggcgccgtgtgcatctgcaacgccgacatcaccgtgagcgtggaggagaactgcatgtaccacgagtccaagttctacggcgtgaacttccccgccgacggccccgtgatgaagaagatgaccgacaactgggagccctcctgcgagaagatcatccccgtgcccaagcagggcatcttgaagggcgacgtgagcatgtacctgctgctgaaggacggtggccgcttgcgctgccagttcgacaccgtgtacaaggccaagtccgtgccccgcaagatgcccgactggcacttcatccagcacaagctgacccgcgaggaccgcagcgacgccaagaaccagaagtggcacctgaccgagcacgccatcgcctccggctccgccttgccctccggactcagatctcgatagggtaccaatggccagttaacagatccagctgctgctgttctagggttcacaagtctgcctatttgtcttccccaatggagctatggttgtctggtctggtccttggtcgtgtcccgtttcattgtgtactatttacctgtaatgtgtatccttaagtctggtttgatggtgtctgaaacgttttgctgtggtagagcagcatggaagaactataatgaataagtgatccctaatcattgtgtccaaattttgcttctgctatacccttttgtgctgtttcttatgttttgcttaaaaatttgatctgacaaacaaatttgtctaaattatgctcttgttctgactgtgtactgtacacatttgtattgctaccggtttggcacatagttttctctttgattgcagatcaaacccttctgattgcagattgcttggctatggctgatgtgctcactgttcttctttagcttgtatattgctgatggtggcttggctacggctgaaaaagttgctgctgcgccgacttggcaactgttgctccagtaatgctttgtcctctcttcctagccgccgacttggcacttggcagctgttgctcctgtaatgcgttgttatctcttatctcttgagatgtactatgattttgaggctgtttgacttgtgccagattgccagtgctgatgctatattatctcaggtttttatgctagtatatgttttactgtgtgctgcctgtgtcgagttacgtaatctattgaaccgctatgcgtgttgatgccctgttgttgcttgccagattgatgcccctgttgcttgcagcttgcaagctgtagtgaaatcctaaaattcgaaaccaaatctattctgaacttttgaagatctgtgatgtccggaagaaaagattcaaacagataaacgggactctccagaatctataaaataaatgatcgacaaacgctttgctttggtaggcttcctagttagttagcggaccgggatccgacggcgtcttcaccgccccgccgccgcccgagccggacttgtcgctgccgccgccgctgctcatcttgcgcgcttgtgtccctccctcagtccctgcgttcgcggatcgcgggcgggtgcgacccgtttggactccggccggtagccttcgtgccgacctcgctcggtccaccggtttgtcggggacccacatgtcagtgaaggtacgcgtccacgtccacagaccctactaccccagacgagtccaaatcgctgttccctcacactctcgtgtaccagcgcgcggcggaaagcacctttccaacaaccgccgacacgtcggtcccacgtcggcatgctccaccggtcagtgtttggcgtgtacggctcccggcgacgaacgagtgtggcctaagctttcctactcccatcccatctgagccacacatctctctcacgccacgcgcacaaaacagccaggctcccacgcgcatcaaccggctctccctttccgtgccactcgcccccaagccccaaaccctcgccgccgcctccgagacagccgccgccacctaggccatggccaccgccgccgccgcgtctaccgcgctcactggcgccactaccgctgcgcccaaggcgaggcgccgggcgcacctcctggccacccgccgcgccctcgccgcgcccatcaggtgctcagcggcgtcacccgccatgccgatggctcccccggccaccccgctccggccgtggggccccaccgagccccgcaagggtgctgacatcctcgtcgagtccctcgagcgctgcggcgtccgcgacgtcttcgcctaccccggcggcgcgtcgatggagatccaccaggcactcacccgctcccccgtcatcgccaaccacctcttccgccacgagcaaggggaggcctttgccgcctccggctacgcgcgctcctcgggccgcgtcggcgtctgcatcgccacctccggccccggcgccaccaacctagtctccgcgctcgccgacgcgctgctcgattccgtcccgatggtcgccatcacgggacaggtggcgcgacgcatgattggcaccgacgccttccaggagacgcccatcgtcgaggtcacgcgctccatcaccaagcacaactacctggtcctcgacgtcgacgacatcccccgcgtcgtgcaggaggctttcttcctcgcctcctctggtcgaccagggccggtgcttgtcgacatccccaaggacatccagcagcagatggcggtgcctgtctgggacaagcccatgagtctgcctgggtacattgcgcgccttcccaagccccctgcgactgagttgcttgagcaggtgctgcgtcttgttggtgaatcgcggcgccctgttctttatgtgggcggtggctgcgcagcatctggtgaggagttgcgacgctttgtggagctgactggaatcccggtcacaactactcttatgggcctcggcaacttccccagcgacgacccactgtctctgcgcatgctaggtatgcatgggacggtgtatgcaaattatgcagtggataaggccgatctgttgcttgcacttggtgtgcggtttgatgatcgcgtgacagggaagattgaggcttttgcaagcagggctaagattgtgcacgttgatattgatccggctgagattggcaagaacaagcagccacatgtgtccatctgtgcagatgttaagcttgctttgcagggcatgaatgctcttcttgaaggaagcacatcaaagaagagctttgactttggctcatggaacgatgagttggatcagcagaagagggaattcccccttgggtataaaacatctaatgaggagatccagccacaatatgctattcaggttcttgatgagctgacgaaaggcgaggccatcatcggcacaggtgttgggcagcaccagatgtgggcggcacagtactacacttacaagcggccaaggcagtggttgtcttcagctggtcttggggctatgggatttggtttgccggctgctgctggtgcttctgtggcaaacccaggtgtcactgttgttgacatcgatggagatggtagctttctcatgaacgttcaggagctagctatgatccgaattgagaacctcccagtgaaggtctttgtgctaaacaaccagcacctggggatggtggtgcagttggaggacaggttctataaggccaacagagcgcacacatacttgggaaacccagagaatgaaagtgagatatatccagatttcgtgacgatcgccaaagggttcaacattccagccgtccgtgtgacaaagaagaacgaagtccgcgcagcgataaagaagatgctcgagactccagggccgtacctcttggatataatcgtcccacaccaggagcatgtgttgcctatgatccctagtggtggggctttcaaggatatgatcctggatggtgatggcaggactgtgtactgacttcgaataggtacccggggatcctctagtgccgtgggtcgtttaagctgccgctgtacctgtgtcgtctggtgccttctggtgtacctgggaggttgtcgtctatcaagtatctgtggttggtgtcatgagtcagtgagtcccaatactgttcgtgtcctgtgtgcattatacccaaaactgttatgggcaaatcatgaataagcttgatgttcgaacttaaaagtctctgctcaatatggtattatggttgtttttgttcgtctcctaatatttgcctgggatcaaattttattggctggtgttcatttgacctccatgttcttgctaggctccattttttactctacagccataatatgtttgattgtttggtttgttctttgttgtacacctggttctgtcgagcttagttttcgacactggcttacagcttaacatgttgctattttattgggttctgattgctattttattgggttctgattgctagtttttgctgaatccaaaaaccatgttatttatttaagcgatccaggttattattatgatggtggctaagtttttttttttccaagggtaaattttctggattctccagtgtttctgtggccgaattcaatcactagagtcgacctgcaaagcttcggtccgggcctagaaggcccgcgccacttacgcttgattccgatgacttcgtaggttcctagctcaagccgctcgtgtccaagcgtcacttacgattagctaatgattacggcatctaggaccgactagttcttatgtgcttctagtctccaaatgtggttgatagttattttgctctaagatcaacagtaatgaagtataaatcatcgttgtggtgtgctactcggttaattgagcattaacacacacaaacatgacgaggatggtataatctccaaaaatgtgtactttgttaggtgggaccctatagccttgattaatgtgctatgttaggcatgcctggaaacgtgtgacgcatatgttttgtgaacctgttgatattatatgtgcttttatattaccatattttattaaaatactaatatttattactagtaagatataacattctatctagcttaaaaactaaccataaatattccataataactagatttaccaaactaatatactaaatatacataataaatacaaaattaacaagacaataatcaatatttatgagcttaatatatttagacattatggttggtcgacgataatcatgctaacttttcgtaattgcttgattgaaatatgcttagaataatgcctctttgttctacatggcaaatagggaccattatggtgtaacaccctgggaaccacaaacaccccgaaatgctactaaactacacaactaaccttcatatataaaatttcgacagcatctcctttgaaaatttgcatagacgtggaagcaacagagtataaacagatctgcgtttaaacgtgcaagcgctactagacaattcagtacattaaaaacgtccgcaatgtgttattaagttgtctaagcgtcaatttgtttacaccacaatatatcctgcca

SEQ ID NO: 31 - DNA, 22397 bp, Artificial sequence
  PHP94332
gtttacccgccaatatatcctgtcaaacactgcggccgcacttgaccgcggatggagccggagctgtggtgaggccatcgacgggaggtgggggagaacacagtctcagtgttctttgtgagtccgcaaggtttttagcttttctgtattaattaaggttgctgttggctgtagaatacggtcgtggaagagctgtatcggtagctactacgtaagctattatatactggaagtctggagctcgtcgatctccggtcgtcttcctccatttctcctcgtcttgctttgactgctgctaccatttgcttctgttttctgatgaagcatgccatgtcggccaccagtgtttgtgtggtttttgcagggaatggctttcaagtgctgtgattgaatggccctcgtcgtcctcggctgagctcacatggacgcgtcatgtgagtgagatatatgatcatatgatgagtggggttcgggtgagtgcgtacttgaagtaggatcccgctttcactcattcattcattggcctttaaaccgggaaattttcgcgaggagatggagggaagcaagcagggtgacgagtgcagagtgccgcgagcgctttgtcaaaaggcaccgccgtaggcaaaaaaatcaatggccctgactgactcgatggtagtactactgtagagactagagagggttgctccccatatcttcgtgtgacttttactccagcattgcatttccgtcattgagacgttaattaatagcagctttcgggacagatgactgtggccatgtttcgtcacggccgcttcgtgccagctgggggtactatagtactgtgattttgttagtaaaaactttcattaggccaccattgacgaccgggccttcgcttttgctgcgctaattaaccatttcccggcgaccgaagggaacatgaacatgccccgacacatgagggcatgaggactagtgttctccctgtcgttcgttgacttgactagtgatagtttaaacgctcttcaactggaagagcggttactaccggttcactagctagctgctaatcgagctagttaccctatgaggtgacatgaagcgctcacggttactatgacggttagcttcacgactgttggtggcagtagcgtacgacttagctatagttccggacttacctagctaataacttcgtatagcatacattatacgaagttatggttaccgaattcgagctcggtaccctggttcacaaactcaatacaacacacagtggagtagggtattacgctccggcggcccgaaccactctaaatccttgtgtcctcgtgtgctcttccaccattaatgactgtaattgcagggacacgaagagttgtagcgcttttgccaacaagatccgctatatgctagtagagtggaacctgcacagcaacaagcatccaataatctgagaataagaattatgtgtggtgatggttctcatctctgcaactcgccattttcgcgagagaaccaaatccaagttggtgaagatcatgatttgggctcatgggctggcatagtagctattacctttgcaattgtggttcgaatctatccgatattctccttttcagggagagctaatgcttatgcttattgggtattttggtttgacactgcttcacgcccaaaaaaaggcaactatgtctgagttggatatggcccaaaaaaaggcagctatgtctgagttggatatggaagtcttctttcgtttagggtgaagtaagaccaagctcatgagcttattatcttaggtcggaacaaattagttgataggcatggcacatttatcaaattataatgattttaacagaaaagcaacacctctttttcagcagcaccagctttgcaagctgcaattgacactccaagcatagtatttgctccaaactcagcctgcatttcgcacaatatcatatctatttccatttggataaaatatattttccagaaatatgggaacagaatcaagatacagaaaaaagttgtggtagtagtggtaagtggaaacacaagtacagtgaaaagatagcattatttctgaacagtcaaattaaccgaaataagtagtatcacatactgcccctaaattgactacacccaatgtaaagaattgcttgagcatattgagccatcagttgtttgtttgtgtaacggatttgacaatgcagagttcaggagcaaaaaaccgcaaaggagagaaagagggaaaggatctcctagtatcccaccttgtggcgcgccctgtcaagtgcatgatggcctggtcgatctgcgtctgctgctgcggttccatcccaacgagtgcctccgacaccttgtcgttgatcacccgcaccgcgtaggcgacccccctggcgaggaacttccgcctctcggaggccccggccgcgtcggcggcggcgccctcgagcgcgcccacgctagccgtagatgctcggtgcacggccttgttggtgtgcaactcgacctcaacggccggtgcgctacgcccgtcaaggatctggcgcgcccgcaccctcgtgatcacggtgggcgcctcccgcctcatgtggccgacgatgaaaagcgccgggttaggggccttggcgcgcaccgccgtattcagggcctcctcgctcttgcgcgagagcaggtgcttccccaggtactcctgcactgacaaggctgccacagcggtggaatttgtcctcacgacttcgccacgtcgtcctcacctccctggcttcccacgactccgccgtatcgaggtgctcggtgggtcgtcttaatccgaagtccgaactaggaagacgagacagagaggtctgaggaatgggcctcgtttgatgttgagctgaattatttttccagcataagcccaggtcttggtccatgaacaaaattactagaaacccagcccagtactacgatctaaaagagggactgccactggatagctctctctagcattctccacgctccaatacagcggcgtcgtgtctatccgggtctatccgcgaacacgtgagaactctccagaaactgctttctcctccacttcatctctctcgctttccctctataaaaagaccccttctaggaattgagggagacagcaagcaccaagcagcgatccgaagctcaatcaattcactcaaacctcttccccaaatcttcgattagatcttcgttgacaagaagactagaaccgaacctgacatgtccaacctgctcacggttcaccagaaccttccggctcttccagtggacgcgacgtccgatgaagtcaggaagaacctcatggacatgttccgcgacaggcaagcgttcagcgagcacacctggaagatgctgctctccgtctgccgctcctgggctgcatggtgcaagctgaacaacaggaagtggttccccgctgagcccgaggacgtgagggattaccttctgtacctgcaagcgcgaggtttgtttctgcttctacctttgatatatatataataattatcattaattagtagtaatataatatttcaaatatttttttcaaaataaaagaatgtagtatatagcaattgcttttctgtagtttataagtgtgtatattttaatttataacttttctaatatatgaccaaaacatggtgatgcctaggtctggcagtgaagaccatccagcaacaccttggacaactgaacatgcttcacaggcgctccggcctcccgcgccccagcgactcgaacgccgtgagcctcgtcatgcgccgcatcaggaaggaaaacgtcgatgccggcgaaagggcaaagcaggccctcgcgttcgagaggaccgatttcgaccaggtccgcagcctgatggagaacagcgacaggtgccaggacattaggaacctggcgttcctcggaattgcatacaacacgctcctcaggatcgcggaaattgcccgcattcgcgtgaaggacattagccgcaccgacggcggcaggatgcttatccacattggcaggaccaagacgctcgtttccaccgcaggcgtcgaaaaggccctcagcctcggagtgaccaagctcgtcgaacgctggatctccgtgtccggcgtcgcggacgacccaaacaactacctcttctgccgcgtccgcaagaacggggtggctgcccctagcgccaccagccaactcagcacgagggccttggaaggtattttcgaggccacccaccgcctgatctacggcgcgaaggatgacagcggtcaacgctacctcgcatggtccgggcactccgcccgcgttggagctgctagggacatggcccgcgccggtgtttccatccccgaaatcatgcaggcgggtggatggacgaacgtgaacattgtcatgaactacattcgcaaccttgacagcgagacgggcgcaatggttcgcctcctggaagatggtgactgaggtacccaacctagacttgtccatcttctggattggccaacttaattaatgtatgaaataaaaggatgcacacatagtgacatgctaatcactataatgtgggcatcaaagttgtgtgttatgtgtaattactagttatctgaataaaagagaaagagatcatccatatttcttatcctaaatgaatgtcacgtgtctttataattctttgatgaaccagatgcatttcattaaccaaatccatatacatataaatattaatcatatataattaatatcaattgggttagcaaaacaaatctagtctaggtgtgttttgcgatccgatcgaggccggccacactgatagtttaaactgaaggcgggaaacgacaatctgatcatgagcggagaattaagggagtcacgttatgacccccgccgatgacgcgggacaagccgttttacgtttggaactgacagaaccgcaacgattgaaggagccactcagccgcgggtttctggagtttaatgagctaagcacatacgtcagaaaccattattgcgcgttcaaaagtcgcctaaggtcactatcagctagcaaatatttcttgtcaaaaatgctccactgacgttccataaattcccctcggtatccaattagagtctcatattcactctcccggcggatctcgactctagaggatcgctcaggaaggccgctgagatagagccatggcggccaatgcgggcggcggtggagcgggaggaggcagcggcagcggcagcgtggctgcgccggcggtgtgccgccccagcggctcgcggtggacgccgacgccggagcagatcaggatgctgaaggagctctactacggctgcggcatccggtcgcccagctcggagcagatccagcgcatcaccgccatgctgcggcagcacggcaagatcgagggcaagaacgtcttctactggttccagaaccacaaggcccgcgagcgccagaagcgccgcctcaccagcctcgacgtcaacgtgcccgccgccggcgcggccgacgccaccaccagccaactcggcgtcctctcgctgtcgtcgccgccgccttcaggcgcggcgcctccctcgcccaccctcggcttctacgccgccggcaatggcggcggatcggctgtgctgctggacacgagttccgactggggcagcagcggcgctgctatggccaccgagacatgcttcctgcaggactacatgggcgtgacggacacgggcagctcgtcgcagtggccacgcttctcgtcgtcggacacgataatggcggcggccgcggcgcgggcggcgacgacgcgggcgcccgagacgctccctctcttcccgacctgcggcgacgacggcggcagcggtagcagcagctacttgccgttctggggtgccgcgtccacaactgccggcgccacttcttccgttgcgatccaacagcaacaccagctgcaggagcagtacagcttttacagcaacagcaacagcacccagctggccggcaccggcaaccaagacgtatcggcaacagcagcagcagccgccgccctggagctgagcctcagctcatggtgctccccttaccctgctgcagggagtatgtgagagcaacgcgagctgccactgctcttcactgatgtctctggaatggaaggaggaggaagtgagaacagatcattcgacaaagcagcattagtccgttgatcggtggaagaccactcgtcagtgttgagttgaatgtttgatcaataaaatacggcaatgctgtaagggttgttttttatgccattgataatacactgtactgttcagttgttgaactctatttcttagccatgccaagtgcttttcttattttgaataacattacagcaaaaagttgaaagacaaaaaaaaaaacccccgaacagagtgctttgggtcccaagcttctttagactgtgttcggcgttccccctaaatttctccccctatatctcactcacttgtcacatcagcgttctctttccccctatatctccacgctctacagcagttccacctatatcaaacctctataccccaccacaacaatattatatactttcatcttcaactaactcatgtaccttccaatttttttctactaataattatttacgtgcacagaaacttagcaaggagagagagagcgggaatttaaatgctcggcgttaggcttttagtccgctaggtggctagaccgaggttaggacgctagttcactaggggcctagtggtgttttaagacgtcacggtcacccggtccgggcctagaaggccagcttcaagtttgtacaaaaaagcaggctccggccagaatggcccggaccgaagcttgcatgcctgcagtgcagcgtgacccggtcgtgcccctctctagagataatgagcattgcatgtctaagttataaaaaattaccacatattttttttgtcacacttgtttgaagtgcagtttatctatctttatacatatatttaaactttactctacgaataatataatctatagtactacaataatatcagtgttttagagaatcatataaatgaacagttagacatggtctaaaggacaattgagtattttgacaacaggactctacagttttatctttttagtgtgcatgtgttctcctttttttttgcaaatagcttcacctatataatacttcatccattttattagtacatccatttagggtttagggttaatggtttttatagactaatttttttagtacatctattttattctattttagcctctaaattaagaaaactaaaactctattttagtttttttatttaataatttagatataaaatagaataaaataaagtgactaaaaattaaacaaataccctttaagaaattaaaaaaactaaggaaacatttttcttgtttcgagtagataatgccagcctgttaaacgccgtcgacgagtctaacggacaccaaccagcgaaccagcagcgtcgcgtcgggccaagcgaagcagacggcacggcatctctgtcgctgcctctggacccctctcgagagttccgctccaccgttggacttgctccgctgtcggcatccagaaattgcgtggcggagcggcagacgtgagccggcacggcaggcggcctcctcctcctctcacggcaccggcagctacgggggattcctttcccaccgctccttcgctttcccttcctcgcccgccgtaataaatagacaccccctccacaccctctttccccaacctcgtgttgttcggagcgcacacacacacaaccagatctcccccaaatccacccgtcggcacctccgcttcaaggtacgccgctcgtcctcccccccccccctctctaccttctctagatcggcgttccggtccatgcatggttagggcccggtagttctacttctgttcatgtttgtgttagatccgtgtttgtgttagatccgtgctgctagcgttcgtacacggatgcgacctgtacgtcagacacgttctgattgctaacttgccagtgtttctctttggggaatcctgggatggctctagccgttccgcagacgggatcgatttcatgattttttttgtttcgttgcatagggtttggtttgcccttttcctttatttcaatatatgccgtgcacttgtttgtcgggtcatcttttcatgcttttttttgtcttggttgtgatgatgtggtctggttgggcggtcgttctagatcggagtagaattctgtttcaaactacctggtggatttattaattttggatctgtatgtgtgtgccatacatattcatagttacgaattgaagatgatggatggaaatatcgatctaggataggtatacatgttgatgcgggttttactgatgcatatacagagatgctttttgttcgcttggttgtgatgatgtggtgtggttgggcggtcgttcattcgttctagatcggagtagaatactgtttcaaactacctggtgtatttattaattttggaactgtatgtgtgtgtcatacatcttcatagttacgagtttaagatggatggaaatatcgatctaggataggtatacatgttgatgtgggttttactgatgcatatacatgatggcatatgcagcatctattcatatgctctaaccttgagtacctatctattataataaacaagtatgttttataattattttgatcttgatatacttggatgatggcatatgcagcagctatatgtggatttttttagcactgccttcatacgctatttatttgcttggtactgtttcttttgtcgatgctcaccctgttgtttggtgttacttctgcaggtcgactttaacttagcctaggatccatggccactgtgaacaactggctcgctttctccctctccccgcaggagctgccgccctcccagacgacggactccacactcatctcggccgccaccgccgaccatgtctccggcgatgtctgcttcaacatcccccaagattggagcatgaggggatcagagctttcggcgctcgtcgcggagccgaagctggaggacttcctcggcggcatctccttctccgagcagcatcacaaggccaactgcaacatgatacccagcactagcagcacagtttgctacgcgagctcaggtgctagcaccggctaccatcaccagctgtaccaccagcccaccagctcagcgctccacttcgcggactccgtaatggtggcttcctcggccggtgtccacgacggcggtgccatgctcagcgcggccgccgctaacggtgtcgctggcgctgccagtgccaacggcggcggcatcgggctgtccatgattaagaactggctgcggagccaaccggcgcccatgcagccgagggtggcggcggctgagggcgcgcaggggctctctttgtccatgaacatggcggggacgacccaaggcgctgctggcatgccacttctcgctggagagcgcgcacgggcgcccgagagtgtatcgacgtcagcacagggtggagccgtcgtcgtcacggcgccgaaggaggatagcggtggcagcggtgttgccggcgctctagtagccgtgagcacggacacgggtggcagcggcggcgcgtcggctgacaacacggcaaggaagacggtggacacgttcgggcagcgcacgtcgatttaccgtggcgtgacaaggcatagatggactgggagatatgaggcacatctttgggataacagttgcagaagggaagggcaaactcgtaagggtcgtcaagtctatttaggtggctatgataaagaggagaaagctgctagggcttatgatcttgctgctctgaagtactggggtgccacaacaacaacaaattttccagtgagtaactacgaaaaggagctcgaggacatgaagcacatgacaaggcaggagtttgtagcgtctctgagaaggaagagcagtggtttctccagaggtgcatccatttacaggggagtgactaggcatcaccaacatggaagatggcaagcacggattggacgagttgcagggaacaaggatctttacttgggcaccttcagcacccaggaggaggcagcggaggcgtacgacatcgcggcgatcaagttccgcggcctcaacgccgtcaccaacttcgacatgagccgctacgacgtgaagagcatcctggacagcagcgccctccccatcggcagcgccgccaagcgcctcaaggaggccgaggccgcagcgtccgcgcagcaccaccacgccggcgtggtgagctacgacgtcggccgcatcgcctcgcagctcggcgacggcggagccctggcggcggcgtacggcgcgcactaccacggcgccgcctggccgaccatcgcgttccagccgggcgccgccagcacaggcctgtaccacccgtacgcgcagcagccaatgcgcggcggcgggtggtgcaagcaggagcaggaccacgcggtgatcgcggccgcgcacagcctgcaggacctccaccacctgaacctgggcgcggccggcgcgcacgactttttctcggcagggcagcaggccgccgccgctgcgatgcacggcctgggtagcatcgacagtgcgtcgctcgagcacagcaccggctccaactccgtcgtctacaacggcggggtcggcgacagcaacggcgccagcgccgtcggcggcagtggcggtggctacatgatgccgatgagcgctgccggagcaaccactacatcggcaatggtgagccacgagcaggtgcatgcacgggcctacgacgaagccaagcaggctgctcagatggggtacgagagctacctggtgaacgcggagaacaatggtggcggaaggatgtctgcatgggggactgtcgtgtctgcagccgcggcggcagcagcaagcagcaacgacaacatggccgccgacgtcgggcatggcggcgcgcagctcttcagtgtctggaacgacacttaatattggtaccgtcatgggtcgtttaagctgccgatgtgcctgcgtcgtctggtgccctctctccatatggaggttgtcaaagtatctgctgttcgtgtcatgagtcgtgtcagtgttggtttaataatggaccggttgtgttgtgtgtgcgtactacccagaactatgacaaatcatgaataagtttgatgtttgaaattaaagcctgtgctcattatgttctgtctttcagttgtctcctaatatttgcctgcaggtactggctatctaccgtttcttacttaggaggtgtttgaatgcactaaaactaatagttagtggctaaaattagttaaaacatccaaacaccatagctaatagttgaactattagctatttttggaaaattagttaatagtgaggtagttatttgttagctagctaattcaactaacaatttttagccaactaacaattagtttcagtgcattcaaacacccccttaatgttaaggtggttctatctaccgtctcctaatatatggttgattgttcggtttgttgctatgctattgggttctgattgctgctagttcttgctgaatccagaagttctcgtagtatagctcagattcatattatttatttgagtgataagtgatccaggttattactatgttagctaggttttttttacaaggataaattatctgtgatcataattcttatgaaagctttatgtttcctggaggcagtggcatgcaatgcatgacagcaacttgatcacaccagctgaggtagatacggtaacaaggttcttaaatctgttcaccaaatcattggagaacacacatacacattcttgccagtcttggttagagaaatttcatgacaaaatgccaaagctgtcttgactcttcacttttggccatgagtcgtgacgcgacttattgaactagtctagggcgcggctaacaacctagcttagattgccttgtctaaacccttaggctaacgcgccactctagaaggccgatctaagcttgcatgcctgcagtgcagcgtgacccggtcgtgcccctctctagagataatgagcattgcatgtctaagttataaaaaattaccacatattttttttgtcacacttgtttgaagtgcagtttatctatctttatacatatatttaaactttactctacgaataatataatctatagtactacaataatatcagtgttttagagaatcatataaatgaacagttagacatggtctaaaggacaattgagtattttgacaacaggactctacagttttatctttttagtgtgcatgtgttctcctttttttttgcaaatagcttcacctatataatacttcatccattttattagtacatccatttagggtttagggttaatggtttttatagactaatttttttagtacatctattttattctattttagcctctaaattaagaaaactaaaactctattttagtttttttatttaataatttagatataaaatagaataaaataaagtgactaaaaattaaacaaataccctttaagaaattaaaaaaactaaggaaacatttttcttgtttcgagtagataatgccagcctgttaaacgccgtcgacgagtctaacggacaccaaccagcgaaccagcagcgtcgcgtcgggccaagcgaagcagacggcacggcatctctgtcgctgcctctggacccctctcgagagttccgctccaccgttggacttgctccgctgtcggcatccagaaattgcgtggcggagcggcagacgtgagccggcacggcaggcggcctcctcctcctctcacggcaccggcagctacgggggattcctttcccaccgctccttcgctttcccttcctcgcccgccgtaataaatagacaccccctccacaccctctttccccaacctcgtgttgttcggagcgcacacacacacaaccagatctcccccaaatccacccgtcggcacctccgcttcaaggtacgccgctcgtcctcccccccccccctctctaccttctctagatcggcgttccggtccatgcatggttagggcccggtagttctacttctgttcatgtttgtgttagatccgtgtttgtgttagatccgtgctgctagcgttcgtacacggatgcgacctgtacgtcagacacgttctgattgctaacttgccagtgtttctctttggggaatcctgggatggctctagccgttccgcagacgggatcgatttcatgattttttttgtttcgttgcatagggtttggtttgcccttttcctttatttcaatatatgccgtgcacttgtttgtcgggtcatcttttcatgcttttttttgtcttggttgtgatgatgtggtctggttgggcggtcgttctagatcggagtagaattctgtttcaaactacctggtggatttattaattttggatctgtatgtgtgtgccatacatattcatagttacgaattgaagatgatggatggaaatatcgatctaggataggtatacatgttgatgcgggttttactgatgcatatacagagatgctttttgttcgcttggttgtgatgatgtggtgtggttgggcggtcgttcattcgttctagatcggagtagaatactgtttcaaactacctggtgtatttattaattttggaactgtatgtgtgtgtcatacatcttcatagttacgagtttaagatggatggaaatatcgatctaggataggtatacatgttgatgtgggttttactgatgcatatacatgatggcatatgcagcatctattcatatgctctaaccttgagtacctatctattataataaacaagtatgttttataattattttgatcttgatatacttggatgatggcatatgcagcagctatatgtggatttttttagccctgccttcatacgctatttatttgcttggtactgtttcttttgtcgatgctcaccctgttgtttggtgttacttctgcaggtcgactttaacttagcctaggatccgtcccccagatttgctaggacaccgccgtacccacaccccggatcagttaatatcgtagacataatggccctccctgccatctccacaaccaagcactcccatcatcatgcatgcagcaggctgtgctgtggacctgatcgagtttcaattgatccaagcaagcaagagggatgggagtccttggttgtggactagacttgtccatcttctggattggccaacttaattaatgtatgaaataaaaggatgcacacatagtgacatgctaatcactataatgtgggcatcaaagttgtgtgttatgtgtaattactagttatctgaataaaagagaaagagatcatccatatttcttatcctaaatgaatgtcacgtgtctttataattctttgatgaaccagatgcatttcattaaccaaatccatatacatataaatattaatcatatataattaatatcaattgggttagcaaaacaaatctagtctaggtgtgttttgcattaagacccgtcgtcaagtaggaattccagaaatcaacgcacggtaactaaatcctcgcgctaagctgggtcagtctagaaggccgatctcccgggataacttcgtatagcatacattatacgaagttatgaattccggaccgggttaccgaattcctgcccttaaggccaattgttcaagattcattcaacaattgaaacatctcccatgattaaatcagtataaggttgctatggtcttgcttgacaaagtttttttttgagggaatttcaactaaatttttgagtgaaactatcaaatactgattttaaaaaatttttataaaaggaagcgcagagataaaaggccatctatgctacaaaagtacccaaaaatgtaatcctaaagtatgaattgcattttttttttgtttggacgaaaggaaaggagtattaccacaagaatgatatcatcttcatatttagatcttttttgggtaaagcttgagattctctaaatatagagaaatcagaagaaaaaaaaaccgtgttttggtggttttgatttctagcctccacaataactttgacggcgtcgacaagtctaacggacaccaagcagcgaaccaccagcgccgagccaagcgaagcagacggccgagacgttgacaccttcggcgcggcatctctcgagagttccgctccggcgctccacctccaccgctggcggtttcttattccgttccgttccgcctcctgctctgctcctctccacaccacacggcacgaaaccgttacggcaccggcagcacccagcacgggagaggggattcctttcccaccgttccttccctttccgccccgccgctataaatagccagccccatccccagcttttttccccaatctcatctcctctctcctgttgttcggagcacacgcacaatccgatcgatccccaaatccccttcgtctctcctcgcgagcctcgtggatcccagcttcaaggtacggcgatcgatcatcccccctccttctctctaccttcttttctctagactacatcggatggcgatccatggttagggcctgctagtttcccttcctgttttgtcgatggctgcgaggcacaatagatctgatggcgttatgacggctaacttgtcatgttgttgcgatttatagtccctttaggagatcagtttaatttctcggatggttcgagatcggtggtccatggttagtaccctaagatccgcgctgttagggttcgtagatggaggcgacctgttctgattgttaacttgtcagtacctgggaaatcctgggatggttctagctcgtccgcagatgagatcgatttcatgatcctctgtatcttgtttcgttgcctaggttccgtctaatctatccgtggtatgatgtagatgttttgatcgtgctaactacgtcttgtaaagttaattgtcaggtcataatttttagcatgcctttttttttgtttggttttgtctaattgggctgtcgttctagatcagagtagaagactgttccaaactacctgctggatttattgaacttggatctgtatgtgtgtcacatatcttcataaattcatgattaagatggattgaaatatcttttatctttttggtatggatagttctatatgttggtgtggctttgttagatgtatacatgcttagatacatgaagcaacgtgctgctactgtttagtaattgctgttcatttgtctaataaacagataaggatatgtatttatgttgctgttggttttgctggtactttgttggatacaaatgcttcaatacagaaaacagcatgctgctacgatttaccatttatctaatcttatcatatgtctaatctaataaacaaacatgcttttaaattatcttcatatgcttggatgatggcatacacagcggctatgtgtggttttttaaatacccagcatcatgggcatgcatgacactgctttaatatgctttttatttgcttgagactgtttcttttgtttatactgaccctttagttcggtgactcttctgcaggtcgactttaacttagcctaggatccatggcccagtccaagcacggcctgaccaaggagatgaccatgaagtaccgcatggagggctgcgtggacggccacaagttcgtgatcaccggcgagggcatcggctaccccttcaagggcaagcaggccatcaacctgtgcgtggtggagggcggccccttgcccttcgccgaggacatcttgtccgccgccttcatgtacggcaaccgcgtgttcaccgagtacccccaggacatcgtcgactacttcaagaactcctgccccgccggctacacctgggaccgctccttcctgttcgaggacggcgccgtgtgcatctgcaacgccgacatcaccgtgagcgtggaggagaactgcatgtaccacgagtccaagttctacggcgtgaacttccccgccgacggccccgtgatgaagaagatgaccgacaactgggagccctcctgcgagaagatcatccccgtgcccaagcagggcatcttgaagggcgacgtgagcatgtacctgctgctgaaggacggtggccgcttgcgctgccagttcgacaccgtgtacaaggccaagtccgtgccccgcaagatgcccgactggcacttcatccagcacaagctgacccgcgaggaccgcagcgacgccaagaaccagaagtggcacctgaccgagcacgccatcgcctccggctccgccttgccctccggactcagatctcgatagggtaccaatggccagttaacagatccagctgctgctgttctagggttcacaagtctgcctatttgtcttccccaatggagctatggttgtctggtctggtccttggtcgtgtcccgtttcattgtgtactatttacctgtaatgtgtatccttaagtctggtttgatggtgtctgaaacgttttgctgtggtagagcagcatggaagaactataatgaataagtgatccctaatcattgtgtccaaattttgcttctgctatacccttttgtgctgtttcttatgttttgcttaaaaatttgatctgacaaacaaatttgtctaaattatgctcttgttctgactgtgtactgtacacatttgtattgctaccggtttggcacatagttttctctttgattgcagatcaaacccttctgattgcagattgcttggctatggctgatgtgctcactgttcttctttagcttgtatattgctgatggtggcttggctacggctgaaaaagttgctgctgcgccgacttggcaactgttgctccagtaatgctttgtcctctcttcctagccgccgacttggcacttggcagctgttgctcctgtaatgcgttgttatctcttatctcttgagatgtactatgattttgaggctgtttgacttgtgccagattgccagtgctgatgctatattatctcaggtttttatgctagtatatgttttactgtgtgctgcctgtgtcgagttacgtaatctattgaaccgctatgcgtgttgatgccctgttgttgcttgccagattgatgcccctgttgcttgcagcttgcaagctgtagtgaaatcctaaaattcgaaaccaaatctattctgaacttttgaagatctgtgatgtccggaagaaaagattcaaacagataaacgggactctccagaatctataaaataaatgatcgacaaacgctttgctttggtaggcttcctagttagttagcggaccgggatccgacggcgtcttcaccgccccgccgccgcccgagccggacttgtcgctgccgccgccgctgctcatcttgcgcgcttgtgtccctccctcagtccctgcgttcgcggatcgcgggcgggtgcgacccgtttggactccggccggtagccttcgtgccgacctcgctcggtccaccggtttgtcggggacccacatgtcagtgaaggtacgcgtccacgtccacagaccctactaccccagacgagtccaaatcgctgttccctcacactctcgtgtaccagcgcgcggcggaaagcacctttccaacaaccgccgacacgtcggtcccacgtcggcatgctccaccggtcagtgtttggcgtgtacggctcccggcgacgaacgagtgtggcctaagctttcctactcccatcccatctgagccacacatctctctcacgccacgcgcacaaaacagccaggctcccacgcgcatcaaccggctctccctttccgtgccactcgcccccaagccccaaaccctcgccgccgcctccgagacagccgccgccacctaggccatggccaccgccgccgccgcgtctaccgcgctcactggcgccactaccgctgcgcccaaggcgaggcgccgggcgcacctcctggccacccgccgcgccctcgccgcgcccatcaggtgctcagcggcgtcacccgccatgccgatggctcccccggccaccccgctccggccgtggggccccaccgagccccgcaagggtgctgacatcctcgtcgagtccctcgagcgctgcggcgtccgcgacgtcttcgcctaccccggcggcgcgtcgatggagatccaccaggcactcacccgctcccccgtcatcgccaaccacctcttccgccacgagcaaggggaggcctttgccgcctccggctacgcgcgctcctcgggccgcgtcggcgtctgcatcgccacctccggccccggcgccaccaacctagtctccgcgctcgccgacgcgctgctcgattccgtcccgatggtcgccatcacgggacaggtggcgcgacgcatgattggcaccgacgccttccaggagacgcccatcgtcgaggtcacgcgctccatcaccaagcacaactacctggtcctcgacgtcgacgacatcccccgcgtcgtgcaggaggctttcttcctcgcctcctctggtcgaccagggccggtgcttgtcgacatccccaaggacatccagcagcagatggcggtgcctgtctgggacaagcccatgagtctgcctgggtacattgcgcgccttcccaagccccctgcgactgagttgcttgagcaggtgctgcgtcttgttggtgaatcgcggcgccctgttctttatgtgggcggtggctgcgcagcatctggtgaggagttgcgacgctttgtggagctgactggaatcccggtcacaactactcttatgggcctcggcaacttccccagcgacgacccactgtctctgcgcatgctaggtatgcatgggacggtgtatgcaaattatgcagtggataaggccgatctgttgcttgcacttggtgtgcggtttgatgatcgcgtgacagggaagattgaggcttttgcaagcagggctaagattgtgcacgttgatattgatccggctgagattggcaagaacaagcagccacatgtgtccatctgtgcagatgttaagcttgctttgcagggcatgaatgctcttcttgaaggaagcacatcaaagaagagctttgactttggctcatggaacgatgagttggatcagcagaagagggaattcccccttgggtataaaacatctaatgaggagatccagccacaatatgctattcaggttcttgatgagctgacgaaaggcgaggccatcatcggcacaggtgttgggcagcaccagatgtgggcggcacagtactacacttacaagcggccaaggcagtggttgtcttcagctggtcttggggctatgggatttggtttgccggctgctgctggtgcttctgtggcaaacccaggtgtcactgttgttgacatcgatggagatggtagctttctcatgaacgttcaggagctagctatgatccgaattgagaacctcccagtgaaggtctttgtgctaaacaaccagcacctggggatggtggtgcagttggaggacaggttctataaggccaacagagcgcacacatacttgggaaacccagagaatgaaagtgagatatatccagatttcgtgacgatcgccaaagggttcaacattccagccgtccgtgtgacaaagaagaacgaagtccgcgcagcgataaagaagatgctcgagactccagggccgtacctcttggatataatcgtcccacaccaggagcatgtgttgcctatgatccctagtggtggggctttcaaggatatgatcctggatggtgatggcaggactgtgtactgacttcgaataggtacccggggatcctctagtgccgtgggtcgtttaagctgccgctgtacctgtgtcgtctggtgccttctggtgtacctgggaggttgtcgtctatcaagtatctgtggttggtgtcatgagtcagtgagtcccaatactgttcgtgtcctgtgtgcattatacccaaaactgttatgggcaaatcatgaataagcttgatgttcgaacttaaaagtctctgctcaatatggtattatggttgtttttgttcgtctcctaatatttgcctgggatcaaattttattggctggtgttcatttgacctccatgttcttgctaggctccattttttactctacagccataatatgtttgattgtttggtttgttctttgttgtacacctggttctgtcgagcttagttttcgacactggcttacagcttaacatgttgctattttattgggttctgattgctattttattgggttctgattgctagtttttgctgaatccaaaaaccatgttatttatttaagcgatccaggttattattatgatggtggctaagtttttttttttccaagggtaaattttctggattctccagtgtttctgtggccgaattcaatcactagagtcgacctgcaaagcttcggtccgggcctagaaggcccgcgccacttacgcttgattccgatgacttcgtaggttcctagctcaagccgctcgtgtccaagcgtcacttacgattagctaatgattacggcatctaggaccgactagttcttatgtgcttctagtctccaaatgtggttgatagttattttgctctaagatcaacagtaatgaagtataaatcatcgttgtggtgtgctactcggttaattgagcattaacacacacaaacatgacgaggatggtataatctccaaaaatgtgtactttgttaggtgggaccctatagccttgattaatgtgctatgttaggcatgcctggaaacgtgtgacgcatatgttttgtgaacctgttgatattatatgtgcttttatattaccatattttattaaaatactaatatttattactagtaagatataacattctatctagcttaaaaactaaccataaatattccataataactagatttaccaaactaatatactaaatatacataataaatacaaaattaacaagacaataatcaatatttatgagcttaatatatttagacattatggttggtcgacgataatcatgctaacttttcgtaattgcttgattgaaatatgcttagaataatgcctctttgttctacatggcaaatagggaccattatggtgtaacaccctgggaaccacaaacaccccgaaatgctactaaactacacaactaaccttcatatataaaatttcgacagcatctcctttgaaaatttgcatagacgtggaagcaacagagtataaacagatctgcgtttaaacgtgcaagcgctactagacaattcagtacattaaaaacgtccgcaatgtgttattaagttgtctaagcgtcaatttgtttacaccacaatatatcctgcca

SEQ ID NO: 32 - DNA, 16455 bp, Artificial sequence
  PHP94636
gtttacccgccaatatatcctgtcaaacactgcggccgcacttgaccgcggatggagccggagctgtggtgaggccatcgacgggaggtgggggagaacacagtctcagtgttctttgtgagtccgcaaggtttttagcttttctgtattaattaaggttgctgttggctgtagaatacggtcgtggaagagctgtatcggtagctactacgtaagctattatatactggaagtctggagctcgtcgatctccggtcgtcttcctccatttctcctcgtcttgctttgactgctgctaccatttgcttctgttttctgatgaagcatgccatgtcggccaccagtgtttgtgtggtttttgcagggaatggctttcaagtgctgtgattgaatggccctcgtcgtcctcggctgagctcacatggacgcgtcatgtgagtgagatatatgatcatatgatgagtggggttcgggtgagtgcgtacttgaagtaggatcccgctttcactcattcattcattggcctttaaaccgggaaattttcgcgaggagatggagggaagcaagcagggtgacgagtgcagagtgccgcgagcgctttgtcaaaaggcaccgccgtaggcaaaaaaatcaatggccctgactgactcgatggtagtactactgtagagactagagagggttgctccccatatcttcgtgtgacttttactccagcattgcatttccgtcattgagacgttaattaatagcagctttcgggacagatgactgtggccatgtttcgtcacggccgcttcgtgccagctgggggtactatagtactgtgattttgttagtaaaaactttcattaggccaccattgacgaccgggccttcgcttttgctgcgctaattaaccatttcccggcgaccgaagggaacatgaacatgccccgacacatgagggcatgaggactagtgttctccctgtcgttcgttgacttgactagtgatagtttaaacgctcttcaactggaagagcggttactaccggttcactagctagctgctaatcgagctagttaccctatgaggtgacatgaagcgctcacggttactatgacggttagcttcacgactgttggtggcagtagcgtacgacttagctatagttccggacttacccttaagataacttcgtatagcatacattatacgaagttatgggcccacgcgtgaagagcggttaccagagctggtcacctttgtccaccaagatggaactgtcttcggccagaatggccatctggattcagcaggcctagaaggccatttatcgctatcaactttgtatagaaaagttgggccgaattcgagctcggtacggccagaatggcccggaccgggttaccaagcggccgcgaattcaagcttccttttgtctcccttttgtctcccttttgtctcccttttgtctcccttttgtctcccttttgtctcccttttgtctcccttttgtctcgaggacatctccactgacgtaagggatgacgcacaatcccactatccttcgcaagacccttcctctatataaggaagttcatttcatttggagaggaggatcccatggcggccaatgcgggcggcggtggagcgggaggaggcagcggcagcggcagcgtggctgcgccggcggtgtgccgccccagcggctcgcggtggacgccgacgccggagcagatcaggatgctgaaggagctctactacggctgcggcatccggtcgcccagctcggagcagatccagcgcatcaccgccatgctgcggcagcacggcaagatcgagggcaagaacgtcttctactggttccagaaccacaaggcccgcgagcgccagaagcgccgcctcaccagcctcgacgtcaacgtgcccgccgccggcgcggccgacgccaccaccagccaactcggcgtcctctcgctgtcgtcgccgccgccttcaggcgcggcgcctccctcgcccaccctcggcttctacgccgccggcaatggcggcggatcggctgtgctgctggacacgagttccgactggggcagcagcggcgctgctatggccaccgagacatgcttcctgcaggactacatgggcgtgacggacacgggcagctcgtcgcagtggccacgcttctcgtcgtcggacacgataatggcggcggccgcggcgcgggcggcgacgacgcgggcgcccgagacgctccctctcttcccgacctgcggcgacgacggcggcagcggtagcagcagctacttgccgttctggggtgccgcgtccacaactgccggcgccacttcttccgttgcgatccaacagcaacaccagctgcaggagcagtacagcttttacagcaacagcaacagcacccagctggccggcaccggcaaccaagacgtatcggcaacagcagcagcagccgccgccctggagctgagcctcagctcatggtgctccccttaccctgctgcagggagtatgtgagagcaacgcgagctgccactgctcttcactgatgtctctggaatggaaggaggaggaagtgagcatagcgttggtgcgttgctgtcaagggcgaattgtaccacatggttaacctagacttgtccatcttctggattggccaacttaattaatgtatgaaataaaaggatgcacacatagtgacatgctaatcactataatgtgggcatcaaagttgtgtgttatgtgtaattactagttatctgaataaaagagaaagagatcatccatatttcttatcctaaatgaatgtcacgtgtctttataattctttgatgaaccagatgcatttcattaaccaaatccatatacatataaatattaatcatatataattaatatcaattgggttagcaaaacaaatctagtctaggtgtgttttgcgaatgcggccgccaccgcggtggagctcgaattccggtccgggcctagaaggccagcttcaagtttgtacaaaaaagcaggctccggccagaatggcccggaccgggttaccgaattcttaccctagctccctgcggctgttacgcggtcccccatcaatcttctgttcttgcggttgtagcctgtgtaacagtgctagagtatgtatgataaataggttttaagtctgcttacatgacattttttattgtggaagagacatataaaaattagagagagtggttctcatgcaacggcggacggcccggtgctaaaagagcttcaagacaaaataatgaaacaggaagagagtagatttatctaagagccaactttattatatgaatgtgtttattgttggctttagatgatatggtaaggagttagagctaataatagataggctctattattattattattaattaaactcgctctaaggaggaaagtgggaggaagggacgaggacgaagactactggaagcatcgtgcatggatgatggatgtggtgtctcttaatgtaggtggccggaggatgtacgtgttaattgcgcgataagcactcagatccaaccgcaaactacctccacactgacacactgatagagagaaagagagacctccgacgactgccgccgcagatgagccacgtacgtatacgacgtctgccggccggctcaggctgccgccatcaccctgctcgaaagtcgcgttaggcggcgccagctacataggagtatctagtctagccagttagtatactactactgcgctgatgatgaattaactctgcatagatactgtacttgcctccctccaacacccaaccacctcctgctcggctcttaataacttggacacggatcgatgccatccaaggaagaacacgacgacgacgacggaacatccaccatgcaagcttgcatccatacgccgatacgcgtgcatccatccatccaccattatttccattttccaccgatcacacgtacacaggcctatttaaggagcgacatcccactgcaactctcctcactctatcagtgatagagtctctagcaaagcacttgccatctaccgaccgccgcattccaaacagcccgacgagctagcagagcggcaggcacctccctcctcaaggaacccatggccactgtgaacaactggctcgctttctccctctccccgcaggagctgccgccctcccagacgacggactccacactcatctcggccgccaccgccgaccatgtctccggcgatgtctgcttcaacatcccccaagattggagcatgaggggatcagagctttcggcgctcgtcgcggagccgaagctggaggacttcctcggcggcatctccttctccgagcagcatcacaaggccaactgcaacatgatacccagcactagcagcacagtttgctacgcgagctcaggtgctagcaccggctaccatcaccagctgtaccaccagcccaccagctcagcgctccacttcgcggactccgtaatggtggcttcctcggccggtgtccacgacggcggtgccatgctcagcgcggccgccgctaacggtgtcgctggcgctgccagtgccaacggcggcggcatcgggctgtccatgattaagaactggctgcggagccaaccggcgcccatgcagccgagggtggcggcggctgagggcgcgcaggggctctctttgtccatgaacatggcggggacgacccaaggcgctgctggcatgccacttctcgctggagagcgcgcacgggcgcccgagagtgtatcgacgtcagcacagggtggagccgtcgtcgtcacggcgccgaaggaggatagcggtggcagcggtgttgccggcgctctagtagccgtgagcacggacacgggtggcagcggcggcgcgtcggctgacaacacggcaaggaagacggtggacacgttcgggcagcgcacgtcgatttaccgtggcgtgacaaggcatagatggactgggagatatgaggcacatctttgggataacagttgcagaagggaagggcaaactcgtaagggtcgtcaagtctatttaggtggctatgataaagaggagaaagctgctagggcttatgatcttgctgctctgaagtactggggtgccacaacaacaacaaattttccagtgagtaactacgaaaaggagctcgaggacatgaagcacatgacaaggcaggagtttgtagcgtctctgagaaggaagagcagtggtttctccagaggtgcatccatttacaggggagtgactaggcatcaccaacatggaagatggcaagcacggattggacgagttgcagggaacaaggatctttacttgggcaccttcagcacccaggaggaggcagcggaggcgtacgacatcgcggcgatcaagttccgcggcctcaacgccgtcaccaacttcgacatgagccgctacgacgtgaagagcatcctggacagcagcgccctccccatcggcagcgccgccaagcgcctcaaggaggccgaggccgcagcgtccgcgcagcaccaccacgccggcgtggtgagctacgacgtcggccgcatcgcctcgcagctcggcgacggcggagccctggcggcggcgtacggcgcgcactaccacggcgccgcctggccgaccatcgcgttccagccgggcgccgccagcacaggcctgtaccacccgtacgcgcagcagccaatgcgcggcggcgggtggtgcaagcaggagcaggaccacgcggtgatcgcggccgcgcacagcctgcaggacctccaccacctgaacctgggcgcggccggcgcgcacgactttttctcggcagggcagcaggccgccgccgctgcgatgcacggcctgggtagcatcgacagtgcgtcgctcgagcacagcaccggctccaactccgtcgtctacaacggcggggtcggcgacagcaacggcgccagcgccgtcggcggcagtggcggtggctacatgatgccgatgagcgctgccggagcaaccactacatcggcaatggtgagccacgagcaggtgcatgcacgggcctacgacgaagccaagcaggctgctcagatggggtacgagagctacctggtgaacgcggagaacaatggtggcggaaggatgtctgcatgggggactgtcgtgtctgcagccgcggcggcagcagcaagcagcaacgacaacatggccgccgacgtcgggcatggcggcgcgcagctcttcagtgtctggaacgacacttaagcgtacctagtggtacctgacatcttatagtctgcaacctctcgtgtctgaattcctatctttatcaagtgttattgcttccacgactataggacagctttcgtcgaaagcttttgctcatgtgatctcgaaggattcatctagtctgatttttcgtgacttgtatcggttttattggattcatccaacatatatcaataaaaaatgagttgtgtttcctttcttcctagttcagttaaaattatttccctcctgcgcttgtgctgtaattgtctgtgtacctgttgtttgtgactgtgttagttcccttggatatgatttcgtatttgatatgtacatggagatagcttagcttcattattggagtatgaagttagtatgacatagtcactctcctggaaaattgacactgcaaaccatatttttattctgaaccacaaatcctagtcagtccgctggcatatgccgtccgtttgctgaatccagaacgtgggtttggagatgtacggctgagatgcctctatgcgaaggggatttcgtggtgaaacgagatgggagtagagcaacgcccgtggaagatgcttcaaacttccacacttttgagcaacgatcggcagtagtaaggtagacgatttcaagatcaaagcatatgaagataaacaacatcaacaacaaaatttgttggggttctatagagagaaacagagctacatacatacactgttttgtatctaccatctgagatgatgaaaagatgaaaaactaaagaatgccccggcgccaacgccaggacacgccgcgcgcgcgtcacccgagccatctcttgacccagccggcgctgtatatttacacacgttgcagcatcgatcaccacctgttcgatcgcgtcgccgtcaccggtaccgagctcgaattccggtccgggcctagaaggccgatctcccgggcacccagctttcttgtacaaagtggccgttaacggatcggccagatccctatagtattttaaaattgcattaacaaacatgtcctaattggtactcctgagatactataccctcctgttttaaaatagttggcattatcgaattatcattttactctttaatgttttctcttcttttaatatattttatgaattttaatgtattttaaaatgttatgcagttcgctctggacttttctgctgcgcctacacttgggtgtactgggcctaaattcagcctgaccgaccgcctgcattgaataatggatgagcaccggtaaaatccgcgtacccaactttcgagaagaaccgagacgtggcgggccgggccaccgacgcacggcaccagcgactgcacacgtcccgccggcgtacgtgtacgtgctgttccctcactggccgcccaatccactcatgcatgcccacgtacacccctgccgtggcgcgcccagatcctaatcctttcgccgttctgcacttctgctgcctataaatggcggcatcgaccgtcacctgcttcaccaccggcgagccacatcgagaacacgatcgagcacacaagcacgaagactcgtttaggagaaaccacaaaccaccaagccgtgcaagcaccaagcttggtcacccggtccgggcctagaaggccagcttcaagtttgtacaaaaaagcaggcttcgaaggagatagaaccgatccaccatgtccaacctgctcacggttcaccagaaccttccggctcttccagtggacgcgacgtccgatgaagtcaggaagaacctcatggacatgttccgcgacaggcaagcgttcagcgagcacacctggaagatgctgctctccgtctgccgctcctgggctgcatggtgcaagctgaacaacaggaagtggttccccgctgagcccgaggacgtgagggattaccttctgtacctgcaagcgcgaggtttgtttctgcttctacctttgatatatatataataattatcattaattagtagtaatataatatttcaaatatttttttcaaaataaaagaatgtagtatatagcaattgcttttctgtagtttataagtgtgtatattttaatttataacttttctaatatatgaccaaaacatggtgatgcctaggtctggcagtgaagaccatccagcaacaccttggacaactgaacatgcttcacaggcgctccggcctcccgcgccccagcgactcgaacgccgtgagcctcgtcatgcgccgcatcaggaaggaaaacgtcgatgccggcgaaagggcaaagcaggccctcgcgttcgagaggaccgatttcgaccaggtccgcagcctgatggagaacagcgacaggtgccaggacattaggaacctggcgttcctcggaattgcatacaacacgctcctcaggatcgcggaaattgcccgcattcgcgtgaaggacattagccgcaccgacggcggcaggatgcttatccacattggcaggaccaagacgctcgtttccaccgcaggcgtcgaaaaggccctcagcctcggagtgaccaagctcgtcgaacgctggatctccgtgtccggcgtcgcggacgacccaaacaactacctcttctgccgcgtccgcaagaacggggtggctgcccctagcgccaccagccaactcagcacgagggccttggaaggtattttcgaggccacccaccgcctgatctacggcgcgaaggatgacagcggtcaacgctacctcgcatggtccgggcactccgcccgcgttggagctgctagggacatggcccgcgccggtgtttccatccccgaaatcatgcaggcgggtggatggacgaacgtgaacattgtcatgaactacattcgcaaccttgacagcgagacgggcgcaatggttcgcctcctggaagatggtgactgagctagacccagctttcttgtacaaagtggccgttaacggatccagacttgtccatcttctggattggccaacttaattaatgtatgaaataaaaggatgcacacatagtgacatgctaatcactataatgtgggcatcaaagttgtgtgttatgtgtaattactagttatctgaataaaagagaaagagatcatccatatttcttatcctaaatgaatgtcacgtgtctttataattctttgatgaaccagatgcatttcattaaccaaatccatatacatataaatattaatcatatataattaatatcaattgggttagcaaaacaaatctagtctaggtgtgttttgcgaatgcggccgccaccgcggtggagctcgaattccggtccgggcctagaaggccagcttcggccgccccgggcaactttattatacaaagttgatagataaatcagatatctggttcctaaggacccggcggaccgattaaactgattcggtccgacgcgttacctaataacttcgtatagcatacattatacgaagttattagctaactaactagtaagcttggtcacccggtccgtcaatattctgattccgatgacttcgtaggttcctagctcaagccgctcgtgtccaagcgtcacttacgattagctaatgattacggcatctaggaccgactagtggcgcgccgactagctagctaaggtacgacttagctatagttccggacttaccggcgccgctagcctgcagtgcagcgtgacccggtcgtgcccctctctagagataatgagcattgcatgtctaagttataaaaaattaccacatattttttttgtcacacttgtttgaagtgcagtttatctatctttatacatatatttaaactttactctacgaataatataatctatagtactacaataatatcagtgttttagagaatcatataaatgaacagttagacatggtctaaaggacaattgagtattttgacaacaggactctacagttttatctttttagtgtgcatgtgttctcctttttttttgcaaatagcttcacctatataatacttcatccattttattagtacatccatttagggtttagggttaatggtttttatagactaatttttttagtacatctattttattctattttagcctctaaattaagaaaactaaaactctattttagtttttttatttaataatttagatataaaatagaataaaataaagtgactaaaaattaaacaaataccctttaagaaattaaaaaaactaaggaaacatttttcttgtttcgagtagataatgccagcctgttaaacgccgtcgacgagtctaacggacaccaaccagcgaaccagcagcgtcgcgtcgggccaagcgaagcagacggcacggcatctctgtcgctgcctctggacccctctcgagagttccgctccaccgttggacttgctccgctgtcggcatccagaaattgcgtggcggagcggcagacgtgagccggcacggcaggcggcctcctcctcctctcacggcaccggcagctacgggggattcctttcccaccgctccttcgctttcccttcctcgcccgccgtaataaatagacaccccctccacaccctctttccccaacctcgtgttgttcggagcgcacacacacacaaccagatctcccccaaatccacccgtcggcacctccgcttcaaggtacgccgctcgtcctcccccccccccctctctaccttctctagatcggcgttccggtccatgcatggttagggcccggtagttctacttctgttcatgtttgtgttagatccgtgtttgtgttagatccgtgctgctagcgttcgtacacggatgcgacctgtacgtcagacacgttctgattgctaacttgccagtgtttctctttggggaatcctgggatggctctagccgttccgcagacgggatcgatttcatgattttttttgtttcgttgcatagggtttggtttgcccttttcctttatttcaatatatgccgtgcacttgtttgtcgggtcatcttttcatgcttttttttgtcttggttgtgatgatgtggtctggttgggcggtcgttctagatcggagtagaattctgtttcaaactacctggtggatttattaattttggatctgtatgtgtgtgccatacatattcatagttacgaattgaagatgatggatggaaatatcgatctaggataggtatacatgttgatgcgggttttactgatgcatatacagagatgctttttgttcgcttggttgtgatgatgtggtgtggttgggcggtcgttcattcgttctagatcggagtagaatactgtttcaaactacctggtgtatttattaattttggaactgtatgtgtgtgtcatacatcttcatagttacgagtttaagatggatggaaatatcgatctaggataggtatacatgttgatgtgggttttactgatgcatatacatgatggcatatgcagcatctattcatatgctctaaccttgagtacctatctattataataaacaagtatgttttataattattttgatcttgatatacttggatgatggcatatgcagcagctatatgtggatttttttagccctgccttcatacgctatttatttgcttggtactgtttcttttgtcgatgctcaccctgttgtttggtgttacttctgcaggtcgactctagaggatcaattcgctagcgaagttcctattccgaagttcctattctctagaaagtataggaacttcagatccaccgggatccaccatggttgaacaagatggattgcacgcaggttctccggccgcttgggtggagaggctattcggctatgactgggcacaacagacaatcggctgctctgatgccgccgtgttccggctgtcagcgcaggggcgcccggttctttttgtcaagaccgacctgtccggtgccctgaatgaactgcaggacgaggcagcgcggctatcgtggctggccacgacgggcgttccttgcgcagctgtgctcgacgttgtcactgaagcgggaagggactggctgctattgggcgaagtgccggggcaggatctcctgtcatctcaccttgctcctgccgagaaagtatccatcatggctgatgcaatgcggcggctgcatacgcttgatccggctacctgcccattcgaccaccaagcgaaacatcgcatcgagcgagcacgtactcggatggaagccggtcttgtcgatcaggatgatctggacgaagagcatcaggggctcgcgccagccgaactgttcgccaggctcaaggcgcgcatgcccgacggcgatgatctcgtcgtgacccatggcgatgcctgcttgccgaatatcatggtggaaaatggccgcttttctggattcatcgactgtggccggctgggtgtggcggaccgctatcaggacatagcgttggctacccgtgatattgctgaagagcttggcggcgaatgggctgaccgcttcctcgtgctttacggtatcgccgctcccgattcgcagcgcatcgccttctatcgccttcttgacgagttcttctgaggatccaccatggttaacctagacttgtccatcttctggattggccaacttaattaatgtatgaaataaaaggatgcacacatagtgacatgctaatcactataatgtgggcatcaaagttgtgtgttatgtgtaattactagttatctgaataaaagagaaagagatcatccatatttcttatcctaaatgaatgtcacgtgtctttataattctttgatgaaccagatgcatttcattaaccaaatccatatacatataaatattaatcatatataattaatatcaattgggttagcaaaacaaatctagtctaggtgtgttttgcaagcttgcatgcctgcagtgcagcgtgacccggtcgtgcccctctctagagataatgagcattgcatgtctaagttataaaaaattaccacatattttttttgtcacacttgtttgaagtgcagtttatctatctttatacatatatttaaactttactctacgaataatataatctatagtactacaataatatcagtgttttagagaatcatataaatgaacagttagacatggtctaaaggacaattgagtattttgacaacaggactctacagttttatctttttagtgtgcatgtgttctcctttttttttgcaaatagcttcacctatataatacttcatccattttattagtacatccatttagggtttagggttaatggtttttatagactaatttttttagtacatctattttattctattttagcctctaaattaagaaaactaaaactctattttagtttttttatttaataatttagatataaaatagaataaaataaagtgactaaaaattaaacaaataccctttaagaaattaaaaaaactaaggaaacatttttcttgtttcgagtagataatgccagcctgttaaacgccgtcgacgagtctaacggacaccaaccagcgaaccagcagcgtcgcgtcgggccaagcgaagcagacggcacggcatctctgtcgctgcctctggacccctctcgagagttccgctccaccgttggacttgctccgctgtcggcatccagaaattgcgtggcggagcggcagacgtgagccggcacggcaggcggcctcctcctcctctcacggcaccggcagctacgggggattcctttcccaccgctccttcgctttcccttcctcgcccgccgtaataaatagacaccccctccacaccctctttccccaacctcgtgttgttcggagcgcacacacacacaaccagatctcccccaaatccacccgtcggcacctccgcttcaaggtacgccgctcgtcctcccccccccccctctctaccttctctagatcggcgttccggtccatgcatggttagggcccggtagttctacttctgttcatgtttgtgttagatccgtgtttgtgttagatccgtgctgctagcgttcgtacacggatgcgacctgtacgtcagacacgttctgattgctaacttgccagtgtttctctttggggaatcctgggatggctctagccgttccgcagacgggatcgatttcatgattttttttgtttcgttgcatagggtttggtttgcccttttcctttatttcaatatatgccgtgcacttgtttgtcgggtcatcttttcatgcttttttttgtcttggttgtgatgatgtggtctggttgggcggtcgttctagatcggagtagaattctgtttcaaactacctggtggatttattaattttggatctgtatgtgtgtgccatacatattcatagttacgaattgaagatgatggatggaaatatcgatctaggataggtatacatgttgatgcgggttttactgatgcatatacagagatgctttttgttcgcttggttgtgatgatgtggtgtggttgggcggtcgttcattcgttctagatcggagtagaatactgtttcaaactacctggtgtatttattaattttggaactgtatgtgtgtgtcatacatcttcatagttacgagtttaagatggatggaaatatcgatctaggataggtatacatgttgatgtgggttttactgatgcatatacatgatggcatatgcagcatctattcatatgctctaaccttgagtacctatctattataataaacaagtatgttttataattattttgatcttgatatacttggatgatggcatatgcagcagctatatgtggatttttttagccctgccttcatacgctatttatttgcttggtactgtttcttttgtcgatgctcaccctgttgtttggtgttacttctgcaggtcgactctagaggatccaccggtcgccaccatggccctgtccaacaagttcatcggcgacgacatgaagatgacctaccacatggacggctgcgtgaacggccactacttcaccgtgaagggcgagggcagcggcaagccctacgagggcacccagacctccaccttcaaggtgaccatggccaacggcggccccctggccttctccttcgacatcctgtccaccgtgttcatgtacggcaaccgctgcttcaccgcctaccccaccagcatgcccgactacttcaagcaggccttccccgacggcatgtcctacgagagaaccttcacctacgaggacggcggcgtggccaccgccagctgggagatcagcctgaagggcaactgcttcgagcacaagtccaccttccacggcgtgaacttccccgccgacggccccgtgatggccaagaagaccaccggctgggacccctccttcgagaagatgaccgtgtgcgacggcatcttgaagggcgacgtgaccgccttcctgatgctgcagggcggcggcaactacagatgccagttccacacctcctacaagaccaagaagcccgtgaccatgccccccaaccacgtggtggagcaccgcatcgccagaaccgacctggacaagggcggcaacagcgtgcagctgaccgagcacgccgtggcccacatcacctccgtggtgcccttctgaagcggccgcaacctagacttgtccatcttctggattggccaacttaattaatgtatgaaataaaaggatgcacacatagtgacatgctaatcactataatgtgggcatcaaagttgtgtgttatgtgtaattactagttatctgaataaaagagaaagagatcatccatatttcttatcctaaatgaatgtcacgtgtctttataattctttgatgaaccagatgcatttcattaaccaaatccatatacatataaatattaatcatatataattaatatcaattgggttagcaaaacaaatctagtctaggtgtgttttgcgaatgcggccgccaccgcggtggagctcgaatgcggccctagcgtatacgaagttcctattccgaagttcctattcttcaaaaagtataggaacttctgtaccgagctcgaattcattccgattaatcgtggcctcttgctcttcaggatgaagagctatgtttaaacgtgcaagcgctactagacaattcagtacattaaaaacgtccgcaatgtgttattaagttgtctaagcgtcaatttgtttacaccacaatatatcctgcca

SEQ ID NO: 33 - DNA, 19104 bp, Artificial sequence
  PHP94682
gtttacccgccaatatatcctgtcaaacactgcggccgcacttgaccgcggatggagccggagctgtggtgaggccatcgacgggaggtgggggagaacacagtctcagtgttctttgtgagtccgcaaggtttttagcttttctgtattaattaaggttgctgttggctgtagaatacggtcgtggaagagctgtatcggtagctactacgtaagctattatatactggaagtctggagctcgtcgatctccggtcgtcttcctccatttctcctcgtcttgctttgactgctgctaccatttgcttctgttttctgatgaagcatgccatgtcggccaccagtgtttgtgtggtttttgcagggaatggctttcaagtgctgtgattgaatggccctcgtcgtcctcggctgagctcacatggacgcgtcatgtgagtgagatatatgatcatatgatgagtggggttcgggtgagtgcgtacttgaagtaggatcccgctttcactcattcattcattggcctttaaaccgggaaattttcgcgaggagatggagggaagcaagcagggtgacgagtgcagagtgccgcgagcgctttgtcaaaaggcaccgccgtaggcaaaaaaatcaatggccctgactgactcgatggtagtactactgtagagactagagagggttgctccccatatcttcgtgtgacttttactccagcattgcatttccgtcattgagacgttaattaatagcagctttcgggacagatgactgtggccatgtttcgtcacggccgcttcgtgccagctgggggtactatagtactgtgattttgttagtaaaaactttcattaggccaccattgacgaccgggccttcgcttttgctgcgctaattaaccatttcccggcgaccgaagggaacatgaacatgccccgacacatgagggcatgaggactagtgttctccctgtcgttcgttgacttgactagtgatagtttaaacgctcttcaactggaagagcggttactaccggttcactagctagctgctaatcgagctagttaccctatgaggtgacatgaagcgctcacggttactatgacggttagcttcacgactgttggtggcagtagcgtacgacttagctatagttccggacttacctagctaataacttcgtatagcatacattatacgaagttatggttaccgaattcgagctcggtaccctggttcacaaactcaatacaacacacagtggagtagggtattacgctccggcggcccgaaccactctaaatccttgtgtcctcgtgtgctcttccaccattaatgactgtaattgcagggacacgaagagttgtagcgcttttgccaacaagatccgctatatgctagtagagtggaacctgcacagcaacaagcatccaataatctgagaataagaattatgtgtggtgatggttctcatctctgcaactcgccattttcgcgagagaaccaaatccaagttggtgaagatcatgatttgggctcatgggctggcatagtagctattacctttgcaattgtggttcgaatctatccgatattctccttttcagggagagctaatgcttatgcttattgggtattttggtttgacactgcttcacgcccaaaaaaaggcaactatgtctgagttggatatggcccaaaaaaaggcagctatgtctgagttggatatggaagtcttctttcgtttagggtgaagtaagaccaagctcatgagcttattatcttaggtcggaacaaattagttgataggcatggcacatttatcaaattataatgattttaacagaaaagcaacacctctttttcagcagcaccagctttgcaagctgcaattgacactccaagcatagtatttgctccaaactcagcctgcatttcgcacaatatcatatctatttccatttggataaaatatattttccagaaatatgggaacagaatcaagatacagaaaaaagttgtggtagtagtggtaagtggaaacacaagtacagtgaaaagatagcattatttctgaacagtcaaattaaccgaaataagtagtatcacatactgcccctaaattgactacacccaatgtaaagaattgcttgagcatattgagccatcagttgtttgtttgtgtaacggatttgacaatgcagagttcaggagcaaaaaaccgcaaaggagagaaagagggaaaggatctcctagtatcccaccttgtggcgcgccctgtcaagtgcatgatggcctggtcgatctgcgtctgctgctgcggttccatcccaacgagtgcctccgacaccttgtcgttgatcacccgcaccgcgtaggcgacccccctggcgaggaacttccgcctctcggaggccccggccgcgtcggcggcggcgccctcgagcgcgcccacgctagccgtagatgctcggtgcacggccttgttggtgtgcaactcgacctcaacggccggtgcgctacgcccgtcaaggatctggcgcgcccgcaccctcgtgatcacggtgggcgcctcccgcctcatgtggccgacgatgaaaagcgccgggttaggggccttggcgcgcaccgccgtattcagggcctcctcgctcttgcgcgagagcaggtgcttccccaggtactcctgcactgacaaggctgccacagcggtggaatttgtcctcacgacttcgccacgtcgtcctcacctccctggcttcccacgactccgccgtatcgaggtgctcggtgggtcgtcttaatccgaagtccgaactaggaagacgagacagagaggtctgaggaatgggcctcgtttgatgttgagctgaattatttttccagcataagcccaggtcttggtccatgaacaaaattactagaaacccagcccagtactacgatctaaaagagggactgccactggatagctctctctagcattctccacgctccaatacagcggcgtcgtgtctatccgggtctatccgcgaacacgtgagaactctccagaaactgctttctcctccacttcatctctctcgctttccctctataaaaagaccccttctaggaattgagggagacagcaagcaccaagcagcgatccgaagctcaatcaattcactcaaacctcttccccaaatcttcgattagatcttcgttgacaagaagactagaaccgaacctgacatgtccaacctgctcacggttcaccagaaccttccggctcttccagtggacgcgacgtccgatgaagtcaggaagaacctcatggacatgttccgcgacaggcaagcgttcagcgagcacacctggaagatgctgctctccgtctgccgctcctgggctgcatggtgcaagctgaacaacaggaagtggttccccgctgagcccgaggacgtgagggattaccttctgtacctgcaagcgcgaggtttgtttctgcttctacctttgatatatatataataattatcattaattagtagtaatataatatttcaaatatttttttcaaaataaaagaatgtagtatatagcaattgcttttctgtagtttataagtgtgtatattttaatttataacttttctaatatatgaccaaaacatggtgatgcctaggtctggcagtgaagaccatccagcaacaccttggacaactgaacatgcttcacaggcgctccggcctcccgcgccccagcgactcgaacgccgtgagcctcgtcatgcgccgcatcaggaaggaaaacgtcgatgccggcgaaagggcaaagcaggccctcgcgttcgagaggaccgatttcgaccaggtccgcagcctgatggagaacagcgacaggtgccaggacattaggaacctggcgttcctcggaattgcatacaacacgctcctcaggatcgcggaaattgcccgcattcgcgtgaaggacattagccgcaccgacggcggcaggatgcttatccacattggcaggaccaagacgctcgtttccaccgcaggcgtcgaaaaggccctcagcctcggagtgaccaagctcgtcgaacgctggatctccgtgtccggcgtcgcggacgacccaaacaactacctcttctgccgcgtccgcaagaacggggtggctgcccctagcgccaccagccaactcagcacgagggccttggaaggtattttcgaggccacccaccgcctgatctacggcgcgaaggatgacagcggtcaacgctacctcgcatggtccgggcactccgcccgcgttggagctgctagggacatggcccgcgccggtgtttccatccccgaaatcatgcaggcgggtggatggacgaacgtgaacattgtcatgaactacattcgcaaccttgacagcgagacgggcgcaatggttcgcctcctggaagatggtgactgagctagacccagctttcttgtacaaagtggccgttaacggatgcagacttgtccatcttctggattggccaacttaattaatgtatgaaataaaaggatgcacacatagtgacatgctaatcactataatgtgggcatcaaagttgtgtgttatgtgtaattactagttatctgaataaaagagaaagagatcatccatatttcttatcctaaatgaatgtcacgtgtctttataattctttgatgaaccagatgcatttcattaaccaaatccatatacatataaatattaatcatatataattaatatcaattgggttagcaaaacaaatctagtctaggtgtgttttgcgaatgcgaccttcttatgtgcttctagtctccaaatgtggttgatagttattttgctctaagatcaacagtaatgaagtataaatcatcgttgtggtgtgctactcggttaattgagcattaacacacacaaacatgacgaggatggtataatctccaaaaatgtgtactttgttaggtcgatcggaagttgaagacaaagaaggtcttaaatcctggctagcaacactgaactatgccagaaaccacatcaaagcatatcggcaagcttcttggcccattatatccaaagacctcagagaaaggtgagcgaaggctcaattcagaagattggaagctgatcaataggatcaagacaatggtgagaacgcttccaaatctcactattccaccagaagatgcatacattatcattgaaacagatgcatgtgcaactggatggggagcagtatgcaagtggaagaaaaacaaggcagacccaagaaatacagagcaaatctgtaggtatgccagtggaaaatttgataagccaaaaggaacctgtgatgcagaaatctatggggttatgaatggcttagaaaagatgagattgttctacttggacaaaagagagatcacagtcagaactgacagtagtgcaatcgaaaggttctacaacaagagtgctgaacacaagccttctgagatcagatggatcaggttcatggactacatcactggtgcaggaccagagatagtcattgaacacataaaagggaagaggaatggtttagctgacatcttgtccaggctcaaagccaaattagctcagaatgaaccaacggaagagatgatcctgcttacacaagccataagggaagtaattccttatccagatcatccatacactgagcaactcagagaatggggaaacaaaattctcgatccattccccacattcaagaaggacatgttcgaaagaacagagcaagcttttatgctaacagaggaaccagttctactctgtgcatgcaggaagcctgcaattcagttagtgtccagaacatctgccaacccaggaaggaaattcttcaagtgcgcaatgaacaaatgccattgctggtactgggcagatctcattgaagaacacattcaagacagaattgatgaatttctcaagaatcttgaagttctgaagaccggtggcgtgcaaacaatggaggaggaacttatgaaggaagtcaccaagctgaagatagaagaggaggagttcgaggaataccaggccacaccaagggctatgtcgccagtagccgcagaagatgtgctagatctccaagacgtaagcaatgacgattgaggaggcattgacgtcagggatgaccgcagcggagagtactgggcccattcagtggatgctccactgagttgtattattgtgtgcttttcggacaagtgtgctgtccactttcttttggcacctgtgccactttattccttgtctgccacgatgcctttgcttagcttgtaagcaaggatcgcagtgcgtgtgtgacaccaccccccttccgacgctctgcctatataaggcaccgtctgtaagctcttacgatcatcggtagttcaccaaggatcggtagttcaccacatgagtatttgagtcaagtttggcttgaataataagaattacacctttccgcaggatccatggcggccaatgcgggcggcggtggagcgggaggaggcagcggcagcggcagcgtggctgcgccggcggtgtgccgccccagcggctcgcggtggacgccgacgccggagcagatcaggatgctgaaggagctctactacggctgcggcatccggtcgcccagctcggagcagatccagcgcatcaccgccatgctgcggcagcacggcaagatcgagggcaagaacgtcttctactggttccagaaccacaaggcccgcgagcgccagaagcgccgcctcaccagcctcgacgtcaacgtgcccgccgccggcgcggccgacgccaccaccagccaactcggcgtcctctcgctgtcgtcgccgccgccttcaggcgcggcgcctccctcgcccaccctcggcttctacgccgccggcaatggcggcggatcggctgtgctgctggacacgagttccgactggggcagcagcggcgctgctatggccaccgagacatgcttcctgcaggactacatgggcgtgacggacacgggcagctcgtcgcagtggccacgcttctcgtcgtcggacacgataatggcggcggccgcggcgcgggcggcgacgacgcgggcgcccgagacgctccctctcttcccgacctgcggcgacgacggcggcagcggtagcagcagctacttgccgttctggggtgccgcgtccacaactgccggcgccacttcttccgttgcgatccaacagcaacaccagctgcaggagcagtacagcttttacagcaacagcaacagcacccagctggccggcaccggcaaccaagacgtatcggcaacagcagcagcagccgccgccctggagctgagcctcagctcatggtgctccccttaccctgctgcagggagtatgtgagagcaacgcgagctgccactgctcttcactgatgtctctggaatggaaggaggaggaagtgagaacagatcattcgacaaagcagcattagtccgttgatcggtggaagaccactcgtcagtgttgagttgaatgtttgatcaataaaatacggcaatgctgtaagggttgttttttatgccattgataatacactgtactgttcagttgttgaactctatttcttagccatgccaagtgcttttcttattttgaataacattacagcaaaaagttgaaagacaaaaaaaaaaacccccgaacagagtgctttgggtcccaagcttctttagactgtgttcggcgttccccctaaatttctccccctatatctcactcacttgtcacatcagcgttctctttccccctatatctccacgctctacagcagttccacctatatcaaacctctataccccaccacaacaatattatatactttcatcttcaactaactcatgtaccttccaatttttttctactaataattatttacgtgcacagaaacttagcaaggagagagagagcgggaatttaaatgctcggcgttaggcttttagtccgctaggtggctagaccgaggttaggacgctagttcactaggggcctagtggtgttttaagacgtcacggtcaccacgcgtggaccgaagcttgcatgcctgcagtgcagcgtgacccggtcgtgcccctctctagagataatgagcattgcatgtctaagttataaaaaattaccacatattttttttgtcacacttgtttgaagtgcagtttatctatctttatacatatatttaaactttactctacgaataatataatctatagtactacaataatatcagtgttttagagaatcatataaatgaacagttagacatggtctaaaggacaattgagtattttgacaacaggactctacagttttatctttttagtgtgcatgtgttctcctttttttttgcaaatagcttcacctatataatacttcatccattttattagtacatccatttagggtttagggttaatggtttttatagactaatttttttagtacatctattttattctattttagcctctaaattaagaaaactaaaactctattttagtttttttatttaataatttagatataaaatagaataaaataaagtgactaaaaattaaacaaataccctttaagaaattaaaaaaactaaggaaacatttttcttgtttcgagtagataatgccagcctgttaaacgccgtcgacgagtctaacggacaccaaccagcgaaccagcagcgtcgcgtcgggccaagcgaagcagacggcacggcatctctgtcgctgcctctggacccctctcgagagttccgctccaccgttggacttgctccgctgtcggcatccagaaattgcgtggcggagcggcagacgtgagccggcacggcaggcggcctcctcctcctctcacggcaccggcagctacgggggattcctttcccaccgctccttcgctttcccttcctcgcccgccgtaataaatagacaccccctccacaccctctttccccaacctcgtgttgttcggagcgcacacacacacaaccagatctcccccaaatccacccgtcggcacctccgcttcaaggtacgccgctcgtcctcccccccccccctctctaccttctctagatcggcgttccggtccatgcatggttagggcccggtagttctacttctgttcatgtttgtgttagatccgtgtttgtgttagatccgtgctgctagcgttcgtacacggatgcgacctgtacgtcagacacgttctgattgctaacttgccagtgtttctctttggggaatcctgggatggctctagccgttccgcagacgggatcgatttcatgattttttttgtttcgttgcatagggtttggtttgcccttttcctttatttcaatatatgccgtgcacttgtttgtcgggtcatcttttcatgcttttttttgtcttggttgtgatgatgtggtctggttgggcggtcgttctagatcggagtagaattctgtttcaaactacctggtggatttattaattttggatctgtatgtgtgtgccatacatattcatagttacgaattgaagatgatggatggaaatatcgatctaggataggtatacatgttgatgcgggttttactgatgcatatacagagatgctttttgttcgcttggttgtgatgatgtggtgtggttgggcggtcgttcattcgttctagatcggagtagaatactgtttcaaactacctggtgtatttattaattttggaactgtatgtgtgtgtcatacatcttcatagttacgagtttaagatggatggaaatatcgatctaggataggtatacatgttgatgtgggttttactgatgcatatacatgatggcatatgcagcatctattcatatgctctaaccttgagtacctatctattataataaacaagtatgttttataattattttgatcttgatatacttggatgatggcatatgcagcagctatatgtggatttttttagccctgccttcatacgctatttatttgcttggtactgtttcttttgtcgatgctcaccctgttgtttggtgttacttctgcaggtcgactttaacttagcctaggatccgcccatggactccagcagcttcctccctgccgccggcgcggagaatggctcggcggcgggcggcgccaacaatggcggcgctgctcagcagcatgcggcgccggcgatccgcgagcaggaccggctgatgccgatcgcgaacgtgatccgcatcatgcggcgcgtgctgccggcgcacgccaagattagcgacgacgccaaggagacgatccaggagtgcgtgtcggagtacatcagcttcatcacgggggaggccaacgagcggtgccagcgggagcagcgcaagaccatcaccgccgaggacgtgctgtgggccatgagccgcctcggcttcgacgactacgtcgagccgctcggcgcctacctccaccgctaccgcgagttcgagggcgacgcgcgcggcgtcgggctcgtccctggggccgccccatcgcgcggcggcgaccaccacccgcactccatgtcgccagcggcgatgctcaagtcccgcgggccagtctccggagccgccatgctaccgcaccaccaccaccaccacgacatgcagatgcacgccgccatgtacgggggaacggccgtgcccccgccggccgggcctcctcaccacggcgggttcctcatgccacacccacagggtagtagccactacctgccttacgcgtacgagcccacgtacggcggtgagcacgcgatggctgcatactatggaggcgccgcgtacgcgcccggcaacggcgggagcggcgacggcagtggcagtggcggcggtggcgggagcgcgtcgcacacaccgcagggcagcggcggcttggagcacccgcacccgttcgcgtacaagtagttatgtacaggtacctgacatcttatagtctgcaacctctcgtgtctgaattcctatctttatcaagtgttattgcttccacgactataggacagctttcgtcgaaagcttttgctcatgtgatctcgaaggattcatctagtctgatttttcgtgacttgtatcggttttattggattcatccaacatatatcaataaaaaatgagttgtgtttcctttcttcctagttcagttaaaattatttccctcctgcgcttgtgctgtaattgtctgtgtacctgttgtttgtgactgtgttagttcccttggatatgatttcgtatttgatatgtacatggagatagcttagcttcattattggagtatgaagttagtatgacatagtcactctcctggaaaattgacactgcaaaccatatttttattctgaaccacaaatcctagtcagtccgctggcatatgccgtccgtttgctgaatccagaacgtgggtttggagatgtacggctgagatgcctctatgcgaaggggatttcgtggtgaaacgagatgggagtagagcaacgcccgtggaagatgcttcaaacttccacacttttgagcaacgatcggcagtagtaaggtagacgatttcaagatcaaagcatatgaagataaacaacatcaacaacaaaatttgttggggttctatagagagaaacagagctacatacatacactgttttgtatctaccatctgagatgatgaaaagatgaaaaactaaagaatgccccggcgccaacgccaggacacgccgcgcgcgcgtcacccgagccatctcttgacccagccggcgctgtatatttacacacgttgcagcatcgatcaccacctgttcgatcgcgtcgccgtcaccggtaccgagctcgaattccggattaagacccgtcgtcaagtaggaattccagaaatcaacgcacggtaactaaatcctcgcgctaagctgggtcagtgcgcacgataacttcgtatagcatacattatacgaagttataacagcggaccgggttaccgaattcctgcccttaaggccaattgttcaagattcattcaacaattgaaacatctcccatgattaaatcagtataaggttgctatggtcttgcttgacaaagtttttttttgagggaatttcaactaaatttttgagtgaaactatcaaatactgattttaaaaaatttttataaaaggaagcgcagagataaaaggccatctatgctacaaaagtacccaaaaatgtaatcctaaagtatgaattgcattttttttttgtttggacgaaaggaaaggagtattaccacaagaatgatatcatcttcatatttagatcttttttgggtaaagcttgagattctctaaatatagagaaatcagaagaaaaaaaaaccgtgttttggtggttttgatttctagcctccacaataactttgacggcgtcgacaagtctaacggacaccaagcagcgaaccaccagcgccgagccaagcgaagcagacggccgagacgttgacaccttcggcgcggcatctctcgagagttccgctccggcgctccacctccaccgctggcggtttcttattccgttccgttccgcctcctgctctgctcctctccacaccacacggcacgaaaccgttacggcaccggcagcacccagcacgggagaggggattcctttcccaccgttccttccctttccgccccgccgctataaatagccagccccatccccagcttttttccccaatctcatctcctctctcctgttgttcggagcacacgcacaatccgatcgatccccaaatccccttcgtctctcctcgcgagcctcgtggatcccagcttcaaggtacggcgatcgatcatcccccctccttctctctaccttcttttctctagactacatcggatggcgatccatggttagggcctgctagtttcccttcctgttttgtcgatggctgcgaggcacaatagatctgatggcgttatgacggctaacttgtcatgttgttgcgatttatagtccctttaggagatcagtttaatttctcggatggttcgagatcggtggtccatggttagtaccctaagatccgcgctgttagggttcgtagatggaggcgacctgttctgattgttaacttgtcagtacctgggaaatcctgggatggttctagctcgtccgcagatgagatcgatttcatgatcctctgtatcttgtttcgttgcctaggttccgtctaatctatccgtggtatgatgtagatgttttgatcgtgctaactacgtcttgtaaagttaattgtcaggtcataatttttagcatgcctttttttttgtttggttttgtctaattgggctgtcgttctagatcagagtagaagactgttccaaactacctgctggatttattgaacttggatctgtatgtgtgtcacatatcttcataaattcatgattaagatggattgaaatatcttttatctttttggtatggatagttctatatgttggtgtggctttgttagatgtatacatgcttagatacatgaagcaacgtgctgctactgtttagtaattgctgttcatttgtctaataaacagataaggatatgtatttatgttgctgttggttttgctggtactttgttggatacaaatgcttcaatacagaaaacagcatgctgctacgatttaccatttatctaatcttatcatatgtctaatctaataaacaaacatgcttttaaattatcttcatatgcttggatgatggcatacacagcggctatgtgtggttttttaaatacccagcatcatgggcatgcatgacactgctttaatatgctttttatttgcttgagactgtttcttttgtttatactgaccctttagttcggtgactcttctgcaggtcgactttaacttagcctaggatccatggcccagtccaagcacggcctgaccaaggagatgaccatgaagtaccgcatggagggctgcgtggacggccacaagttcgtgatcaccggcgagggcatcggctaccccttcaagggcaagcaggccatcaacctgtgcgtggtggagggcggccccttgcccttcgccgaggacatcttgtccgccgccttcatgtacggcaaccgcgtgttcaccgagtacccccaggacatcgtcgactacttcaagaactcctgccccgccggctacacctgggaccgctccttcctgttcgaggacggcgccgtgtgcatctgcaacgccgacatcaccgtgagcgtggaggagaactgcatgtaccacgagtccaagttctacggcgtgaacttccccgccgacggccccgtgatgaagaagatgaccgacaactgggagccctcctgcgagaagatcatccccgtgcccaagcagggcatcttgaagggcgacgtgagcatgtacctgctgctgaaggacggtggccgcttgcgctgccagttcgacaccgtgtacaaggccaagtccgtgccccgcaagatgcccgactggcacttcatccagcacaagctgacccgcgaggaccgcagcgacgccaagaaccagaagtggcacctgaccgagcacgccatcgcctccggctccgccttgccctccggactcagatctcgatagggtaccaatggccagttaacagatccagctgctgctgttctagggttcacaagtctgcctatttgtcttccccaatggagctatggttgtctggtctggtccttggtcgtgtcccgtttcattgtgtactatttacctgtaatgtgtatccttaagtctggtttgatggtgtctgaaacgttttgctgtggtagagcagcatggaagaactataatgaataagtgatccctaatcattgtgtccaaattttgcttctgctatacccttttgtgctgtttcttatgttttgcttaaaaatttgatctgacaaacaaatttgtctaaattatgctcttgttctgactgtgtactgtacacatttgtattgctaccggtttggcacatagttttctctttgattgcagatcaaacccttctgattgcagattgcttggctatggctgatgtgctcactgttcttctttagcttgtatattgctgatggtggcttggctacggctgaaaaagttgctgctgcgccgacttggcaactgttgctccagtaatgctttgtcctctcttcctagccgccgacttggcacttggcagctgttgctcctgtaatgcgttgttatctcttatctcttgagatgtactatgattttgaggctgtttgacttgtgccagattgccagtgctgatgctatattatctcaggtttttatgctagtatatgttttactgtgtgctgcctgtgtcgagttacgtaatctattgaaccgctatgcgtgttgatgccctgttgttgcttgccagattgatgcccctgttgcttgcagcttgcaagctgtagtgaaatcctaaaattcgaaaccaaatctattctgaacttttgaagatctgtgatgtccggaagaaaagattcaaacagataaacgggactctccagaatctataaaataaatgatcgacaaacgctttgctttggtaggcttcctagttagttagcggaccgggatccgacggcgtcttcaccgccccgccgccgcccgagccggacttgtcgctgccgccgccgctgctcatcttgcgcgcttgtgtccctccctcagtccctgcgttcgcggatcgcgggcgggtgcgacccgtttggactccggccggtagccttcgtgccgacctcgctcggtccaccggtttgtcggggacccacatgtcagtgaaggtacgcgtccacgtccacagaccctactaccccagacgagtccaaatcgctgttccctcacactctcgtgtaccagcgcgcggcggaaagcacctttccaacaaccgccgacacgtcggtcccacgtcggcatgctccaccggtcagtgtttggcgtgtacggctcccggcgacgaacgagtgtggcctaagctttcctactcccatcccatctgagccacacatctctctcacgccacgcgcacaaaacagccaggctcccacgcgcatcaaccggctctccctttccgtgccactcgcccccaagccccaaaccctcgccgccgcctccgagacagccgccgccacctaggccatggccaccgccgccgccgcgtctaccgcgctcactggcgccactaccgctgcgcccaaggcgaggcgccgggcgcacctcctggccacccgccgcgccctcgccgcgcccatcaggtgctcagcggcgtcacccgccatgccgatggctcccccggccaccccgctccggccgtggggccccaccgagccccgcaagggtgctgacatcctcgtcgagtccctcgagcgctgcggcgtccgcgacgtcttcgcctaccccggcggcgcgtcgatggagatccaccaggcactcacccgctcccccgtcatcgccaaccacctcttccgccacgagcaaggggaggcctttgccgcctccggctacgcgcgctcctcgggccgcgtcggcgtctgcatcgccacctccggccccggcgccaccaacctagtctccgcgctcgccgacgcgctgctcgattccgtcccgatggtcgccatcacgggacaggtggcgcgacgcatgattggcaccgacgccttccaggagacgcccatcgtcgaggtcacgcgctccatcaccaagcacaactacctggtcctcgacgtcgacgacatcccccgcgtcgtgcaggaggctttcttcctcgcctcctctggtcgaccagggccggtgcttgtcgacatccccaaggacatccagcagcagatggcggtgcctgtctgggacaagcccatgagtctgcctgggtacattgcgcgccttcccaagccccctgcgactgagttgcttgagcaggtgctgcgtcttgttggtgaatcgcggcgccctgttctttatgtgggcggtggctgcgcagcatctggtgaggagttgcgacgctttgtggagctgactggaatcccggtcacaactactcttatgggcctcggcaacttccccagcgacgacccactgtctctgcgcatgctaggtatgcatgggacggtgtatgcaaattatgcagtggataaggccgatctgttgcttgcacttggtgtgcggtttgatgatcgcgtgacagggaagattgaggcttttgcaagcagggctaagattgtgcacgttgatattgatccggctgagattggcaagaacaagcagccacatgtgtccatctgtgcagatgttaagcttgctttgcagggcatgaatgctcttcttgaaggaagcacatcaaagaagagctttgactttggctcatggaacgatgagttggatcagcagaagagggaattcccccttgggtataaaacatctaatgaggagatccagccacaatatgctattcaggttcttgatgagctgacgaaaggcgaggccatcatcggcacaggtgttgggcagcaccagatgtgggcggcacagtactacacttacaagcggccaaggcagtggttgtcttcagctggtcttggggctatgggatttggtttgccggctgctgctggtgcttctgtggcaaacccaggtgtcactgttgttgacatcgatggagatggtagctttctcatgaacgttcaggagctagctatgatccgaattgagaacctcccagtgaaggtctttgtgctaaacaaccagcacctggggatggtggtgcagttggaggacaggttctataaggccaacagagcgcacacatacttgggaaacccagagaatgaaagtgagatatatccagatttcgtgacgatcgccaaagggttcaacattccagccgtccgtgtgacaaagaagaacgaagtccgcgcagcgataaagaagatgctcgagactccagggccgtacctcttggatataatcgtcccacaccaggagcatgtgttgcctatgatccctagtggtggggctttcaaggatatgatcctggatggtgatggcaggactgtgtactgacttcgaataggtacccggggatcctctagtgccgtgggtcgtttaagctgccgctgtacctgtgtcgtctggtgccttctggtgtacctgggaggttgtcgtctatcaagtatctgtggttggtgtcatgagtcagtgagtcccaatactgttcgtgtcctgtgtgcattatacccaaaactgttatgggcaaatcatgaataagcttgatgttcgaacttaaaagtctctgctcaatatggtattatggttgtttttgttcgtctcctaatatttgcctgggatcaaattttattggctggtgttcatttgacctccatgttcttgctaggctccattttttactctacagccataatatgtttgattgtttggtttgttctttgttgtacacctggttctgtcgagcttagttttcgacactggcttacagcttaacatgttgctattttattgggttctgattgctattttattgggttctgattgctagtttttgctgaatccaaaaaccatgttatttatttaagcgatccaggttattattatgatggtggctaagtttttttttttccaagggtaaattttctggattctccagtgtttctgtggccgaattcaatcactagagtcgacctgcaaagcttcggtccgggcctagaaggcccgcgccacttacgcttgattccgatgacttcgtaggttcctagctcaagccgctcgtgtccaagcgtcacttacgattagctaatgattacggcatctaggaccgactagctagctagctaagagctcggtaccgagctcgaattcattccgattaatcgtggcctcttgctcttcaggatgaagagctatgtttaaacgtgcaagcgctactagacaattcagtacattaaaaacgtccgcaatgtgttattaagttgtctaagcgtcaatttgtttacaccacaatatatcctgcca

SEQ ID NO: 34 - DNA, 20402 bp, Artificial sequence
  PHP94684
gtttacccgccaatatatcctgtcaaacactgcggccgcacttgaccgcggatggagccggagctgtggtgaggccatcgacgggaggtgggggagaacacagtctcagtgttctttgtgagtccgcaaggtttttagcttttctgtattaattaaggttgctgttggctgtagaatacggtcgtggaagagctgtatcggtagctactacgtaagctattatatactggaagtctggagctcgtcgatctccggtcgtcttcctccatttctcctcgtcttgctttgactgctgctaccatttgcttctgttttctgatgaagcatgccatgtcggccaccagtgtttgtgtggtttttgcagggaatggctttcaagtgctgtgattgaatggccctcgtcgtcctcggctgagctcacatggacgcgtcatgtgagtgagatatatgatcatatgatgagtggggttcgggtgagtgcgtacttgaagtaggatcccgctttcactcattcattcattggcctttaaaccgggaaattttcgcgaggagatggagggaagcaagcagggtgacgagtgcagagtgccgcgagcgctttgtcaaaaggcaccgccgtaggcaaaaaaatcaatggccctgactgactcgatggtagtactactgtagagactagagagggttgctccccatatcttcgtgtgacttttactccagcattgcatttccgtcattgagacgttaattaatagcagctttcgggacagatgactgtggccatgtttcgtcacggccgcttcgtgccagctgggggtactatagtactgtgattttgttagtaaaaactttcattaggccaccattgacgaccgggccttcgcttttgctgcgctaattaaccatttcccggcgaccgaagggaacatgaacatgccccgacacatgagggcatgaggactagtgttctccctgtcgttcgttgacttgactagtgatagtttaaacgctcttcaactggaagagcggttactaccggttcactagctagctgctaatcgagctagttaccctatgaggtgacatgaagcgctcacggttactatgacggttagcttcacgactgttggtggcagtagcgtacgacttagctatagttccggacttacccagatcttggccaataacttcgtatagcatacattatacgaagttataggtacaattcgagctcggtaccctggttcacaaactcaatacaacacacagtggagtagggtattacgctccggcggcccgaaccactctaaatccttgtgtcctcgtgtgctcttccaccattaatgactgtaattgcagggacacgaagagttgtagcgcttttgccaacaagatccgctatatgctagtagagtggaacctgcacagcaacaagcatccaataatctgagaataagaattatgtgtggtgatggttctcatctctgcaactcgccattttcgcgagagaaccaaatccaagttggtgaagatcatgatttgggctcatgggctggcatagtagctattacctttgcaattgtggttcgaatctatccgatattctccttttcagggagagctaatgcttatgcttattgggtattttggtttgacactgcttcacgcccaaaaaaaggcaactatgtctgagttggatatggcccaaaaaaaggcagctatgtctgagttggatatggaagtcttctttcgtttagggtgaagtaagaccaagctcatgagcttattatcttaggtcggaacaaattagttgataggcatggcacatttatcaaattataatgattttaacagaaaagcaacacctctttttcagcagcaccagctttgcaagctgcaattgacactccaagcatagtatttgctccaaactcagcctgcatttcgcacaatatcatatctatttccatttggataaaatatattttccagaaatatgggaacagaatcaagatacagaaaaaagttgtggtagtagtggtaagtggaaacacaagtacagtgaaaagatagcattatttctgaacagtcaaattaaccgaaataagtagtatcacatactgcccctaaattgactacacccaatgtaaagaattgcttgagcatattgagccatcagttgtttgtttgtgtaacggatttgacaatgcagagttcaggagcaaaaaaccgcaaaggagagaaagagggaaaggatctcctagtatcccaccttgtggcgcgccctgtcaagtgcatgatggcctggtcgatctgcgtctgctgctgcggttccatcccaacgagtgcctccgacaccttgtcgttgatcacccgcaccgcgtaggcgacccccctggcgaggaacttccgcctctcggaggccccggccgcgtcggcggcggcgccctcgagcgcgcccacgctagccgtagatgctcggtgcacggccttgttggtgtgcaactcgacctcaacggccggtgcgctacgcccgtcaaggatctggcgcgcccgcaccctcgtgatcacggtgggcgcctcccgcctcatgtggccgacgatgaaaagcgccgggttaggggccttggcgcgcaccgccgtattcagggcctcctcgctcttgcgcgagagcaggtgcttccccaggtactcctgcactgacaaggctgccacagcggtggaatttgtcctcacgacttcgccacgtcgtcctcacctccctggcttcccacgactccgccgtatcgaggtgctcggtgggtcgtcttaatccgaagtccgaactaggaagacgagacagagaggtctgaggaatgggcctcgtttgatgttgagctgaattatttttccagcataagcccaggtcttggtccatgaacaaaattactagaaacccagcccagtactacgatctaaaagagggactgccactggatagctctctctagcattctccacgctccaatacagcggcgtcgtgtctatccgggtctatccgcgaacacgtgagaactctccagaaactgctttctcctccacttcatctctctcgctttccctctataaaaagaccccttctaggaattgagggagacagcaagcaccaagcagcgatccgaagctcaatcaattcactcaaacctcttccccaaatcttcgattagatcttcgttgacaagaagactagaaccgaacctgacatgtccaacctgctcacggttcaccagaaccttccggctcttccagtggacgcgacgtccgatgaagtcaggaagaacctcatggacatgttccgcgacaggcaagcgttcagcgagcacacctggaagatgctgctctccgtctgccgctcctgggctgcatggtgcaagctgaacaacaggaagtggttccccgctgagcccgaggacgtgagggattaccttctgtacctgcaagcgcgaggtttgtttctgcttctacctttgatatatatataataattatcattaattagtagtaatataatatttcaaatatttttttcaaaataaaagaatgtagtatatagcaattgcttttctgtagtttataagtgtgtatattttaatttataacttttctaatatatgaccaaaacatggtgatgcctaggtctggcagtgaagaccatccagcaacaccttggacaactgaacatgcttcacaggcgctccggcctcccgcgccccagcgactcgaacgccgtgagcctcgtcatgcgccgcatcaggaaggaaaacgtcgatgccggcgaaagggcaaagcaggccctcgcgttcgagaggaccgatttcgaccaggtccgcagcctgatggagaacagcgacaggtgccaggacattaggaacctggcgttcctcggaattgcatacaacacgctcctcaggatcgcggaaattgcccgcattcgcgtgaaggacattagccgcaccgacggcggcaggatgcttatccacattggcaggaccaagacgctcgtttccaccgcaggcgtcgaaaaggccctcagcctcggagtgaccaagctcgtcgaacgctggatctccgtgtccggcgtcgcggacgacccaaacaactacctcttctgccgcgtccgcaagaacggggtggctgcccctagcgccaccagccaactcagcacgagggccttggaaggtattttcgaggccacccaccgcctgatctacggcgcgaaggatgacagcggtcaacgctacctcgcatggtccgggcactccgcccgcgttggagctgctagggacatggcccgcgccggtgtttccatccccgaaatcatgcaggcgggtggatggacgaacgtgaacattgtcatgaactacattcgcaaccttgacagcgagacgggcgcaatggttcgcctcctggaagatggtgactgaggtacccaacctagacttgtccatcttctggattggccaacttaattaatgtatgaaataaaaggatgcacacatagtgacatgctaatcactataatgtgggcatcaaagttgtgtgttatgtgtaattactagttatctgaataaaagagaaagagatcatccatatttcttatcctaaatgaatgtcacgtgtctttataattctttgatgaaccagatgcatttcattaaccaaatccatatacatataaatattaatcatatataattaatatcaattgggttagcaaaacaaatctagtctaggtgtgttttgcgatccgatatcgatctcccatccttaaaacaccactaggcccctagtgaactagcgtcctaacctcggtctagccacctagcggactaaaagcctaacgccgagccccgggtggccttctaggcccggaccgggtgaccccgctctctctctccttgctaagtttctgtgcacgtaaataattattagtagaaaaaaattggaaggtacatgagttagttgaagatgaaagtatataatattgttgtggtggggtatagaggtttgatataggtggaactgctgtagagcgtggagatatagggggaaagagaacgctgatgtgacaagtgagtgagatatagggggagaaatttagggggaacgccgaacacagtctaaagaagcttgggacccaaagcactctgttcgggggtttttttttttgtctttcaactttttgctgtaatgttattcaaaataagaaaagcacttggcatggctaagaaatagagttcaacaactgaacagtacagtgtattatcaatggcataaaaaacaacccttacagcattgccgtattttattgatcaaacattcaactcaacactgacgagtggtcttccaccgatcaacggactaatgctgctttgtcgaatgatctgttctcacttcctcctccttccattccagagacatcagtgaagagcagtggcagctcgcgttgctctcacatactccctgcagcagggtaaggggagcaccatgagctgaggctcagctccagggcggcggctgctgctgctgttgccgatacgtcttggttgccggtgccggccagctgggtgctgttgctgttgctgtaaaagctgtactgctcctgcagctggtgttgctgttggatcgcaacggaagaagtggcgccggcagttgtggacgcggcaccccagaacggcaagtagctgctgctaccgctgccgccgtcgtcgccgcaggtcgggaagagagggagcgtctcgggcgcccgcgtcgtcgccgcccgcgccgcggccgccgccattatcgtgtccgacgacgagaagcgtggccactgcgacgagctgcccgtgtccgtcacgcccatgtagtcctgcaggaagcatgtctcggtggccatagcagcgccgctgctgccccagtcggaactcgtgtccagcagcacagccgatccgccgccattgccggcggcgtagaagccgagggtgggcgagggaggcgccgcgcctgaaggcggcggcgacgacagcgagaggacgccgagttggctggtggtggcgtcggccgcgccggcggcgggcacgttgacgtcgaggctggtgaggcggcgcttctggcgctcgcgggccttgtggttctggaaccagtagaagacgttcttgccctcgatcttgccgtgctgccgcagcatggcggtgatgcgctggatctgctccgagctgggcgaccggatgccgcagccgtagtagagctccttcagcatcctgatctgctccggcgtcggcgtccaccgcgagccgctggggcggcacaccgccggcgcagccacgctgccgctgccgctgcctcctcccgctccaccgccgcccgcattggccgccatggatcctgcagaagtaacaccaaacaacagggtgagcatcggacaaaagaaacagtaccaagcaaataaatagcgtatgaaggcagggctaaaaaatccacatatagctgctgcatatgccatcatccaagtatatcaagatcaaaataattataaaacatacttgtttattataatagataggtactcaaggttagagcatatgaatagatgccgcatatgccatcatgtatatgcatcagtaaaacccacatcaacatgtatacctatcctagatcaatatttccatccatcatcttaaactcgtaactatgaagatgtatggcacacacataaagatacaaaattaataaatccaccaggtagtttgaaacagtattctactccgatctagaacgaccgcccaaccagaccacatcatcacaaccaagcgaaaaaaagcatctctgtatatgcatcagtaaaacccgcatcaacatgtatacctatcctagatcgatatttccatccatcatcttaaactcgtaactatgaagatgtaggcacatacatacagatcctttaataaatccaccaggtagtttgaaacagtattctactccgatctagaacgaccctttaataaatccaccaggtagtttgaaacagtattctactccgatctagaacgaccgcccaaccagaccatatcatcacaaccaagcgagaaaaaaagcatctctgtatatgcatcagtaaaacccgcatcaacatgtatacctatcctagatcgatatttccatccatcatcttaaactcgtaactatgaagatgtatggcacacacatacagatacaaaattaataaatccaccaggtagcttgaaacagtatcctactccgatctagaacgaccgcccaaccagaccacatcatcacaaacatgaacatgaacatgtttgctctaacacaaacatgaacagaagtagaactaccgggccctaaccatggaccggatcgccgatctagagaaggtagagagaggggggggggaggatgagcggcgtaccttgaagcggaggtgccgacggctggatttgggggagatctggttgcgtgtgtgtgcgctccgaacgaacacgaggttggggaagagggtgtggagggggtgtctatttattacggcgggcgaggaagggaaagcgaaggagcggtgggaaaggaatcccccgtagctgccggtgccgtgagaggaggaagaggccgcctgccgtgccgcctcacgtctgccgctccgccacgcaatttctggatgccgacagcggagcaagtccaacggtggagcggaactctcgagaggggtccagggatcgctatcaactttgtatagaaaagttgggccgagctcggtacggccagaatggcccggaccggcagcttgcatgcctgcagtgcagcgtgacccggtcgtgcccctctctagagataatgagcattgcatgtctaagttataaaaaattaccacatattttttttgtcacacttgtttgaagtgcagtttatctatctttatacatatatttaaactttactctacgaataatataatctatagtactacaataatatcagtgttttagagaatcatataaatgaacagttagacatggtctaaaggacaattgagtattttgacaacaggactctacagttttatctttttagtgtgcatgtgttctcctttttttttgcaaatagcttcacctatataatacttcatccattttattagtacatccatttagggtttagggttaatggtttttatagactaatttttttagtacatctattttattctattttagcctctaaattaagaaaactaaaactctattttagtttttttatttaataatttagatataaaatagaataaaataaagtgactaaaaattaaacaaataccctttaagaaattaaaaaaactaaggaaacatttttcttgtttcgagtagataatgccagcctgttaaacgccgtcgacgagtctaacggacaccaaccagcgaaccagcagcgtcgcgtcgggccaagcgaagcagacggcacggcatctctgtcgctgcctctggacccctctcgagagttccgctccaccgttggacttgctccgctgtcggcatccagaaattgcgtggcggagcggcagacgtgagccggcacggcaggcggcctcctcctcctctcacggcaccggcagctacgggggattcctttcccaccgctccttcgctttcccttcctcgcccgccgtaataaatagacaccccctccacaccctctttccccaacctcgtgttgttcggagcgcacacacacacaaccagatctcccccaaatccacccgtcggcacctccgcttcaaggtacgccgctcgtcctcccccccccccctctctaccttctctagatcggcgttccggtccatgcatggttagggcccggtagttctacttctgttcatgtttgtgttagatccgtgtttgtgttagatccgtgctgctagcgttcgtacacggatgcgacctgtacgtcagacacgttctgattgctaacttgccagtgtttctctttggggaatcctgggatggctctagccgttccgcagacgggatcgatttcatgattttttttgtttcgttgcatagggtttggtttgcccttttcctttatttcaatatatgccgtgcacttgtttgtcgggtcatcttttcatgcttttttttgtcttggttgtgatgatgtggtctggttgggcggtcgttctagatcggagtagaattctgtttcaaactacctggtggatttattaattttggatctgtatgtgtgtgccatacatattcatagttacgaattgaagatgatggatggaaatatcgatctaggataggtatacatgttgatgcgggttttactgatgcatatacagagatgctttttgttcgcttggttgtgatgatgtggtgtggttgggcggtcgttcattcgttctagatcggagtagaatactgtttcaaactacctggtgtatttattaattttggaactgtatgtgtgtgtcatacatcttcatagttacgagtttaagatggatggaaatatcgatctaggataggtatacatgttgatgtgggttttactgatgcatatacatgatggcatatgcagcatctattcatatgctctaaccttgagtacctatctattataataaacaagtatgttttataattattttgatcttgatatacttggatgatggcatatgcagcagctatatgtggatttttttagccctgccttcatacgctatttatttgcttggtactgtttcttttgtcgatgctcaccctgttgtttggtgttacttctgcaggtcgactttaacttagcctagcatggccactgtgaacaactggctcgctttctccctctccccgcaggagctgccgccctcccagacgacggactccacactcatctcggccgccaccgccgaccatgtctccggcgatgtctgcttcaacatcccccaagattggagcatgaggggatcagagctttcggcgctcgtcgcggagccgaagctggaggacttcctcggcggcatctccttctccgagcagcatcacaaggccaactgcaacatgatacccagcactagcagcacagtttgctacgcgagctcaggtgctagcaccggctaccatcaccagctgtaccaccagcccaccagctcagcgctccacttcgcggactccgtaatggtggcttcctcggccggtgtccacgacggcggtgccatgctcagcgcggccgccgctaacggtgtcgctggcgctgccagtgccaacggcggcggcatcgggctgtccatgattaagaactggctgcggagccaaccggcgcccatgcagccgagggtggcggcggctgagggcgcgcaggggctctctttgtccatgaacatggcggggacgacccaaggcgctgctggcatgccacttctcgctggagagcgcgcacgggcgcccgagagtgtatcgacgtcagcacagggtggagccgtcgtcgtcacggcgccgaaggaggatagcggtggcagcggtgttgccggcgctctagtagccgtgagcacggacacgggtggcagcggcggcgcgtcggctgacaacacggcaaggaagacggtggacacgttcgggcagcgcacgtcgatttaccgtggcgtgacaaggcatagatggactgggagatatgaggcacatctttgggataacagttgcagaagggaagggcaaactcgtaagggtcgtcaagtctatttaggtggctatgataaagaggagaaagctgctagggcttatgatcttgctgctctgaagtactggggtgccacaacaacaacaaattttccagtgagtaactacgaaaaggagctcgaggacatgaagcacatgacaaggcaggagtttgtagcgtctctgagaaggaagagcagtggtttctccagaggtgcatccatttacaggggagtgactaggcatcaccaacatggaagatggcaagcacggattggacgagttgcagggaacaaggatctttacttgggcaccttcagcacccaggaggaggcagcggaggcgtacgacatcgcggcgatcaagttccgcggcctcaacgccgtcaccaacttcgacatgagccgctacgacgtgaagagcatcctggacagcagcgccctccccatcggcagcgccgccaagcgcctcaaggaggccgaggccgcagcgtccgcgcagcaccaccacgccggcgtggtgagctacgacgtcggccgcatcgcctcgcagctcggcgacggcggagccctggcggcggcgtacggcgcgcactaccacggcgccgcctggccgaccatcgcgttccagccgggcgccgccagcacaggcctgtaccacccgtacgcgcagcagccaatgcgcggcggcgggtggtgcaagcaggagcaggaccacgcggtgatcgcggccgcgcacagcctgcaggacctccaccacctgaacctgggcgcggccggcgcgcacgactttttctcggcagggcagcaggccgccgccgctgcgatgcacggcctgggtagcatcgacagtgcgtcgctcgagcacagcaccggctccaactccgtcgtctacaacggcggggtcggcgacagcaacggcgccagcgccgtcggcggcagtggcggtggctacatgatgccgatgagcgctgccggagcaaccactacatcggcaatggtgagccacgagcaggtgcatgcacgggcctacgacgaagccaagcaggctgctcagatggggtacgagagctacctggtgaacgcggagaacaatggtggcggaaggatgtctgcatgggggactgtcgtgtctgcagccgcggcggcagcagcaagcagcaacgacaacatggccgccgacgtcgggcatggcggcgcgcagctcttcagtgtctggaacgacacttaatattggtaccgtcatgggtcgtttaagctgccgatgtgcctgcgtcgtctggtgccctctctccatatggaggttgtcaaagtatctgctgttcgtgtcatgagtcgtgtcagtgttggtttaataatggaccggttgtgttgtgtgtgcgtactacccagaactatgacaaatcatgaataagtttgatgtttgaaattaaagcctgtgctcattatgttctgtctttcagttgtctcctaatatttgcctgcaggtactggctatctaccgtttcttacttaggaggtgtttgaatgcactaaaactaatagttagtggctaaaattagttaaaacatccaaacaccatagctaatagttgaactattagctatttttggaaaattagttaatagtgaggtagttatttgttagctagctaattcaactaacaatttttagccaactaacaattagtttcagtgcattcaaacacccccttaatgttaaggtggttctatctaccgtctcctaatatatggttgattgttcggtttgttgctatgctattgggttctgattgctgctagttcttgctgaatccagaagttctcgtagtatagctcagattcatattatttatttgagtgataagtgatccaggttattactatgttagctaggttttttttacaaggataaattatctgtgatcataattcttatgaaagctttatgtttcctggaggcagtggcatgcaatgcatgacagcaacttgatcacaccagctgaggtagatacggtaacaaggttcttaaatctgttcaccaaatcattggagaacacacatacacattcttgccagtcttggttagagaaatttcatgacaaaatgccaaagctgtcttgactcttcacttttggccatgagtcgtgacgcgacttattgaactagtctagggcgcggctaacaacctagcttagattgccttgtctaaacccttaggctaacgcgccactctagaaggccgatctcccgggataacttcgtatagcatacattatacgaagttatgaattccggaccggcctagaaggccccagagctggtcaccccatacgattggaagcttcaagtttgtacaaaaaagcaggctggatcggccagaatggccccggaccgggttaccaagcggccgcggaattcctgcccttaaggccaattgttcaagattcattcaacaattgaaacatctcccatgattaaatcagtataaggttgctatggtcttgcttgacaaagtttttttttgagggaatttcaactaaatttttgagtgaaactatcaaatactgattttaaaaaatttttataaaaggaagcgcagagataaaaggccatctatgctacaaaagtacccaaaaatgtaatcctaaagtatgaattgcattttttttttgtttggacgaaaggaaaggagtattaccacaagaatgatatcatcttcatatttagatcttttttgggtaaagcttgagattctctaaatatagagaaatcagaagaaaaaaaaaccgtgttttggtggttttgatttctagcctccacaataactttgacggcgtcgacaagtctaacggacaccaagcagcgaaccaccagcgccgagccaagcgaagcagacggccgagacgttgacaccttcggcgcggcatctctcgagagttccgctccggcgctccacctccaccgctggcggtttcttattccgttccgttccgcctcctgctctgctcctctccacaccacacggcacgaaaccgttacggcaccggcagcacccagcacgggagaggggattcctttcccaccgttccttccctttccgccccgccgctataaatagccagccccatccccagcttttttccccaatctcatctcctctctcctgttgttcggagcacacgcacaatccgatcgatccccaaatccccttcgtctctcctcgcgagcctcgtggatcccagcttcaaggtacggcgatcgatcatcccccctccttctctctaccttcttttctctagactacatcggatggcgatccatggttagggcctgctagtttcccttcctgttttgtcgatggctgcgaggcacaatagatctgatggcgttatgacggctaacttgtcatgttgttgcgatttatagtccctttaggagatcagtttaatttctcggatggttcgagatcggtggtccatggttagtaccctaagatccgcgctgttagggttcgtagatggaggcgacctgttctgattgttaacttgtcagtacctgggaaatcctgggatggttctagctcgtccgcagatgagatcgatttcatgatcctctgtatcttgtttcgttgcctaggttccgtctaatctatccgtggtatgatgtagatgttttgatcgtgctaactacgtcttgtaaagttaattgtcaggtcataatttttagcatgcctttttttttgtttggttttgtctaattgggctgtcgttctagatcagagtagaagactgttccaaactacctgctggatttattgaacttggatctgtatgtgtgtcacatatcttcataaattcatgattaagatggattgaaatatcttttatctttttggtatggatagttctatatgttggtgtggctttgttagatgtatacatgcttagatacatgaagcaacgtgctgctactgtttagtaattgctgttcatttgtctaataaacagataaggatatgtatttatgttgctgttggttttgctggtactttgttggatacaaatgcttcaatacagaaaacagcatgctgctacgatttaccatttatctaatcttatcatatgtctaatctaataaacaaacatgcttttaaattatcttcatatgcttggatgatggcatacacagcggctatgtgtggttttttaaatacccagcatcatgggcatgcatgacactgctttaatatgctttttatttgcttgagactgtttcttttgtttatactgaccctttagttcggtgactcttctgcaggtcgactttaacttagcctaggatccatggcccagtccaagcacggcctgaccaaggagatgaccatgaagtaccgcatggagggctgcgtggacggccacaagttcgtgatcaccggcgagggcatcggctaccccttcaagggcaagcaggccatcaacctgtgcgtggtggagggcggccccttgcccttcgccgaggacatcttgtccgccgccttcatgtacggcaaccgcgtgttcaccgagtacccccaggacatcgtcgactacttcaagaactcctgccccgccggctacacctgggaccgctccttcctgttcgaggacggcgccgtgtgcatctgcaacgccgacatcaccgtgagcgtggaggagaactgcatgtaccacgagtccaagttctacggcgtgaacttccccgccgacggccccgtgatgaagaagatgaccgacaactgggagccctcctgcgagaagatcatccccgtgcccaagcagggcatcttgaagggcgacgtgagcatgtacctgctgctgaaggacggtggccgcttgcgctgccagttcgacaccgtgtacaaggccaagtccgtgccccgcaagatgcccgactggcacttcatccagcacaagctgacccgcgaggaccgcagcgacgccaagaaccagaagtggcacctgaccgagcacgccatcgcctccggctccgccttgccctccggactcagatctcgatagggtacctgacatcttatagtctgcaacctctcgtgtctgaattcctatctttatcaagtgttattgcttccacgactataggacagctttcgtcgaaaggttttgctcatgtgatctcgaaggattcatctagtctgatttttcgtgacttgtatcggttttattggattcatccaacatatatcaataaaaaatgagttgtgtttcctttcttcctagttcagttaaaattatttccctcctgcgcttgtgctgtaattgtctgtgtacctgttgtttgtgactgtgttagttcccttggatatgatttcgtatttgatatgtacatggagatagcttagcttcattattggagtatgaagttagtatgacatagtcactctcctggaaaattgacactgcaaaccatatttttattctgaaccacaaatcctagtcagtccgctggcatatgccgtccgtttgctgaatccagaacgtgggtttggagatgtacggctgagatgcctctatgcgaaggggatttcgtggtgaaacgagatgggagtagagcaacgcccgtggaagatgcttcaaacttccacacttttgagcaacgatcggcagtagtaaggtagacgatttcaagatcaaagcatatgaagataaacaacatcaacaacaaaatttgttggggttctatagagagaaacagagctacatacatacactgttttgtatctaccatctgagatgatgaaaagatgaaaaactaaagaatgccccggcgccaacgccaggacacgccgcgcgcgcgtcacccgagccatctcttgacccagccggcgctgtatatttacacacgttgcagcatcgatcaccacctgttcgatcgcgtcgccgtcaccaagcttggcgcgccggtcacccggtccgggcctagaaggccacccggggtcggaggagactagccgttagttagtgcagaccgtctctaatcagtgactagcgacgtcccgacccacccagctttcttgtacaaagtggcccggggcggccgaagctggccttctaggcccggaccgggttaccgcggccgcgaattcaggtgactcttagcgatccgacggcgtcttcaccgccccgccgccgcccgagccggacttgtcgctgccgccgccgctgctcatcttgcgcgcttgtgtccctccctcagtccctgcgttcgcggatcgcgggcgggtgcgacccgtttggactccggccggtagccttcgtgccgacctcgctcggtccaccggtttgtcggggacccacatgtcagtgaaggtacgcgtccacgtccacagaccctactaccccagacgagtccaaatcgctgttccctcacactctcgtgtaccagcgcgcggcggaaagcacctttccaacaaccgccgacacgtcggtcccacgtcggcatgctccaccggtcagtgtttggcgtgtacggctcccggcgacgaacgagtgtggcctaagctttcctactcccatcccatctgagccacacatctctctcacgccacgcgcacaaaacagccaggctcccacgcgcatcaaccggctctccctttccgtgccactcgcccccaagccccaaaccctcgccgccgcctccgagacagccgccgccacctaggccatggccaccgccgccgccgcgtctaccgcgctcactggcgccactaccgctgcgcccaaggcgaggcgccgggcgcacctcctggccacccgccgcgccctcgccgcgcccatcaggtgctcagcggcgtcacccgccatgccgatggctcccccggccaccccgctccggccgtggggccccaccgagccccgcaagggtgctgacatcctcgtcgagtccctcgagcgctgcggcgtccgcgacgtcttcgcctaccccggcggcgcgtcgatggagatccaccaggcactcacccgctcccccgtcatcgccaaccacctcttccgccacgagcaaggggaggcctttgccgcctccggctacgcgcgctcctcgggccgcgtcggcgtctgcatcgccacctccggccccggcgccaccaacctagtctccgcgctcgccgacgcgctgctcgattccgtcccgatggtcgccatcacgggacaggtggcgcgacgcatgattggcaccgacgccttccaggagacgcccatcgtcgaggtcacgcgctccatcaccaagcacaactacctggtcctcgacgtcgacgacatcccccgcgtcgtgcaggaggctttcttcctcgcctcctctggtcgaccagggccggtgcttgtcgacatccccaaggacatccagcagcagatggcggtgcctgtctgggacaagcccatgagtctgcctgggtacattgcgcgccttcccaagccccctgcgactgagttgcttgagcaggtgctgcgtcttgttggtgaatcgcggcgccctgttctttatgtgggcggtggctgcgcagcatctggtgaggagttgcgacgctttgtggagctgactggaatcccggtcacaactactcttatgggcctcggcaacttccccagcgacgacccactgtctctgcgcatgctaggtatgcatgggacggtgtatgcaaattatgcagtggataaggccgatctgttgcttgcacttggtgtgcggtttgatgatcgcgtgacagggaagattgaggcttttgcaagcagggctaagattgtgcacgttgatattgatccggctgagattggcaagaacaagcagccacatgtgtccatctgtgcagatgttaagcttgctttgcagggcatgaatgctcttcttgaaggaagcacatcaaagaagagctttgactttggctcatggaacgatgagttggatcagcagaagagggaattcccccttgggtataaaacatctaatgaggagatccagccacaatatgctattcaggttcttgatgagctgacgaaaggcgaggccatcatcggcacaggtgttgggcagcaccagatgtgggcggcacagtactacacttacaagcggccaaggcagtggttgtcttcagctggtcttggggctatgggatttggtttgccggctgctgctggtgcttctgtggcaaacccaggtgtcactgttgttgacatcgatggagatggtagctttctcatgaacgttcaggagctagctatgatccgaattgagaacctcccagtgaaggtctttgtgctaaacaaccagcacctggggatggtggtgcagttggaggacaggttctataaggccaacagagcgcacacatacttgggaaacccagagaatgaaagtgagatatatccagatttcgtgacgatcgccaaagggttcaacattccagccgtccgtgtgacaaagaagaacgaagtccgcgcagcgataaagaagatgctcgagactccagggccgtacctcttggatataatcgtcccacaccaggagcatgtgttgcctatgatccctagtggtggggctttcaaggatatgatcctggatggtgatggcaggactgtgtactgacttcgaataggtacccggggatcctctagtgccgtgggtcgtttaagctgccgctgtacctgtgtcgtctggtgccttctggtgtacctgggaggttgtcgtctatcaagtatctgtggttggtgtcatgagtcagtgagtcccaatactgttcgtgtcctgtgtgcattatacccaaaactgttatgggcaaatcatgaataagcttgatgttcgaacttaaaagtctctgctcaatatggtattatggttgtttttgttcgtctcctaatatttgcctgggatcaaattttattggctggtgttcatttgacctccatgttcttgctaggctccattttttactctacagccataatatgtttgattgtttggtttgttctttgttgtacacctggttctgtcgagcttagttttcgacactggcttacagcttaacatgttgctattttattgggttctgattgctattttattgggttctgattgctagtttttgctgaatccaaaaaccatgttatttatttaagcgatccaggttattattatgatggtggctaagtttttttttttccaagggtaaattttctggattctccagtgtttctgtggccgaattcaatcactagagtcgacctgcaggcatgcccgcggtggagctcgaattccggtccgggcctagaaggccagcttcggccgccccgggcaactttattatacaaagttgatagatgtacctgattccgatgacttcgtaggttcctagctcaagccgctcgtgtccaagcgtcacttacgattagctaatgattacggcatctaggaccgactagctagctagctaagagctcggtaccgagctcgaattcattccgattaatcgtggcctcttgctcttcaggatgaagagctatgtttaaacgtgcaagcgctactagacaattcagtacattaaaaacgtccgcaatgtgttattaagttgtctaagcgtcaatttgtttacaccacaatatatcctgcca

SEQ ID NO: 35 - DNA, 17497 bp, Artificial sequence
  PHP94685
gtttacccgccaatatatcctgtcaaacactgcggccgcacttgaccgcggatggagccggagctgtggtgaggccatcgacgggaggtgggggagaacacagtctcagtgttctttgtgagtccgcaaggtttttagcttttctgtattaattaaggttgctgttggctgtagaatacggtcgtggaagagctgtatcggtagctactacgtaagctattatatactggaagtctggagctcgtcgatctccggtcgtcttcctccatttctcctcgtcttgctttgactgctgctaccatttgcttctgttttctgatgaagcatgccatgtcggccaccagtgtttgtgtggtttttgcagggaatggctttcaagtgctgtgattgaatggccctcgtcgtcctcggctgagctcacatggacgcgtcatgtgagtgagatatatgatcatatgatgagtggggttcgggtgagtgcgtacttgaagtaggatcccgctttcactcattcattcattggcctttaaaccgggaaattttcgcgaggagatggagggaagcaagcagggtgacgagtgcagagtgccgcgagcgctttgtcaaaaggcaccgccgtaggcaaaaaaatcaatggccctgactgactcgatggtagtactactgtagagactagagagggttgctccccatatcttcgtgtgacttttactccagcattgcatttccgtcattgagacgttaattaatagcagctttcgggacagatgactgtggccatgtttcgtcacggccgcttcgtgccagctgggggtactatagtactgtgattttgttagtaaaaactttcattaggccaccattgacgaccgggccttcgcttttgctgcgctaattaaccatttcccggcgaccgaagggaacatgaacatgccccgacacatgagggcatgaggactagtgttctccctgtcgttcgttgacttgactagtgatagtttaaacgctcttcaactggaagagcggttactaccggttcactagctagctgctaatcgagctagttaccctatgaggtgacatgaagcgctcacggttactatgacggttagcttcacgactgttggtggcagtagcgtacgacttagctatagttccggacttacccagatcttggccaataacttcgtatagcatacattatacgaagttatcagatcttggccaaggtaccttcgaaattgggtcatcggatcccatccttaaaacaccactaggcccctagtgaactagcgtcctaacctcggtctagccacctagcggactaaaagcctaacgccgagccccgggtggccttctaggcccggaccgggtgaccccgctctctctctccttgctaagtttctgtgcacgtaaataattattagtagaaaaaaattggaaggtacatgagttagttgaagatgaaagtatataatattgttgtggtggggtatagaggtttgatataggtggaactgctgtagagcgtggagatatagggggaaagagaacgctgatgtgacaagtgagtgagatatagggggagaaatttagggggaacgccgaacacagtctaaagaagcttgggacccaaagcactctgttcgggggtttttttttttgtctttcaactttttgctgtaatgttattcaaaataagaaaagcacttggcatggctaagaaatagagttcaacaactgaacagtacagtgtattatcaatggcataaaaaacaacccttacagcattgccgtattttattgatcaaacattcaactcaacactgacgagtggtcttccaccgatcaacggactaatgctgctttgtcgaatgatctgttctcacttcctcctccttccattccagagacatcagtgaagagcagtggcagctcgcgttgctctcacatactccctgcagcagggtaaggggagcaccatgagctgaggctcagctccagggcggcggctgctgctgctgttgccgatacgtcttggttgccggtgccggccagctgggtgctgttgctgttgctgtaaaagctgtactgctcctgcagctggtgttgctgttggatcgcaacggaagaagtggcgccggcagttgtggacgcggcaccccagaacggcaagtagctgctgctaccgctgccgccgtcgtcgccgcaggtcgggaagagagggagcgtctcgggcgcccgcgtcgtcgccgcccgcgccgcggccgccgccattatcgtgtccgacgacgagaagcgtggccactgcgacgagctgcccgtgtccgtcacgcccatgtagtcctgcaggaagcatgtctcggtggccatagcagcgccgctgctgccccagtcggaactcgtgtccagcagcacagccgatccgccgccattgccggcggcgtagaagccgagggtgggcgagggaggcgccgcgcctgaaggcggcggcgacgacagcgagaggacgccgagttggctggtggtggcgtcggccgcgccggcggcgggcacgttgacgtcgaggctggtgaggcggcgcttctggcgctcgcgggccttgtggttctggaaccagtagaagacgttcttgccctcgatcttgccgtgctgccgcagcatggcggtgatgcgctggatctgctccgagctgggcgaccggatgccgcagccgtagtagagctccttcagcatcctgatctgctccggcgtcggcgtccaccgcgagccgctggggcggcacaccgccggcgcagccacgctgccgctgccgctgcctcctcccgctccaccgccgcccgcattggccgccatggatcctgcagaagtaacaccaaacaacagggtgagcatcggacaaaagaaacagtaccaagcaaataaatagcgtatgaaggcagggctaaaaaatccacatatagctgctgcatatgccatcatccaagtatatcaagatcaaaataattataaaacatacttgtttattataatagataggtactcaaggttagagcatatgaatagatgccgcatatgccatcatgtatatgcatcagtaaaacccacatcaacatgtatacctatcctagatcaatatttccatccatcatcttaaactcgtaactatgaagatgtatggcacacacataaagatacaaaattaataaatccaccaggtagtttgaaacagtattctactccgatctagaacgaccgcccaaccagaccacatcatcacaaccaagcgaaaaaaagcatctctgtatatgcatcagtaaaacccgcatcaacatgtatacctatcctagatcgatatttccatccatcatcttaaactcgtaactatgaagatgtaggcacatacatacagatcctttaataaatccaccaggtagtttgaaacagtattctactccgatctagaacgaccctttaataaatccaccaggtagtttgaaacagtattctactccgatctagaacgaccgcccaaccagaccatatcatcacaaccaagcgagaaaaaaagcatctctgtatatgcatcagtaaaacccgcatcaacatgtatacctatcctagatcgatatttccatccatcatcttaaactcgtaactatgaagatgtatggcacacacatacagatacaaaattaataaatccaccaggtagcttgaaacagtatcctactccgatctagaacgaccgcccaaccagaccacatcatcacaaacatgaacatgaacatgtttgctctaacacaaacatgaacagaagtagaactaccgggccctaaccatggaccggatcgccgatctagagaaggtagagagaggggggggggaggatgagcggcgtaccttgaagcggaggtgccgacggctggatttgggggagatctggttgcgtgtgtgtgcgctccgaacgaacacgaggttggggaagagggtgtggagggggtgtctatttattacggcgggcgaggaagggaaagcgaaggagcggtgggaaaggaatcccccgtagctgccggtgccgtgagaggaggaagaggccgcctgccgtgccgcctcacgtctgccgctccgccacgcaatttctggatgccgacagcggagcaagtccaacggtggagcggaactctcgagaggggtccagggaattcgattggtcaccgggccctgggattagacgtcatggcttacgtcatttccttcgtcctgttgctcactgattgagctgtgagtggagggaccactggaagatgcttcactaattttcttagtggagggaccggcttctcatgcttcacacaagtggctgtcgggcatcatcttttttagcttttgacaaagcaatgttttagtgggtcgacggtcacatcgtcattgccgtggaaatttaaaaatacacgccaaacataaaaagtaaaggttctgagagaccgacaggtcacatcagcctttaattatttcgtatgggcgtaagcccttacgtcatggctccattattgctttaggtctacatcactcctctttgattggctcatgatctcgttgctcgagttttgtggtcgtcactgcgttcgtcatacgcattagtgagtgggctgtcaggacagctcttttccacgttattttgttccccacttgtactagaggaatctgctttatctttgcaataaaggcaaagatgcttttggtaggtgcgcctaacaattctgcaccattccttttttgtctggtccccacaagccagctgctcgatgccaggtttatcgctatcaactttgtatagaaaagttgggccgagctcggtacggccagaatggcccggaccggcagcttgcatgcctgcagtgcagcgtgacccggtcgtgcccctctctagagataatgagcattgcatgtctaagttataaaaaattaccacatattttttttgtcacacttgtttgaagtgcagtttatctatctttatacatatatttaaactttactctacgaataatataatctatagtactacaataatatcagtgttttagagaatcatataaatgaacagttagacatggtctaaaggacaattgagtattttgacaacaggactctacagttttatctttttagtgtgcatgtgttctcctttttttttgcaaatagcttcacctatataatacttcatccattttattagtacatccatttagggtttagggttaatggtttttatagactaatttttttagtacatctattttattctattttagcctctaaattaagaaaactaaaactctattttagtttttttatttaataatttagatataaaatagaataaaataaagtgactaaaaattaaacaaataccctttaagaaattaaaaaaactaaggaaacatttttcttgtttcgagtagataatgccagcctgttaaacgccgtcgacgagtctaacggacaccaaccagcgaaccagcagcgtcgcgtcgggccaagcgaagcagacggcacggcatctctgtcgctgcctctggacccctctcgagagttccgctccaccgttggacttgctccgctgtcggcatccagaaattgcgtggcggagcggcagacgtgagccggcacggcaggcggcctcctcctcctctcacggcaccggcagctacgggggattcctttcccaccgctccttcgctttcccttcctcgcccgccgtaataaatagacaccccctccacaccctctttccccaacctcgtgttgttcggagcgcacacacacacaaccagatctcccccaaatccacccgtcggcacctccgcttcaaggtacgccgctcgtcctcccccccccccctctctaccttctctagatcggcgttccggtccatgcatggttagggcccggtagttctacttctgttcatgtttgtgttagatccgtgtttgtgttagatccgtgctgctagcgttcgtacacggatgcgacctgtacgtcagacacgttctgattgctaacttgccagtgtttctctttggggaatcctgggatggctctagccgttccgcagacgggatcgatttcatgattttttttgtttcgttgcatagggtttggtttgcccttttcctttatttcaatatatgccgtgcacttgtttgtcgggtcatcttttcatgcttttttttgtcttggttgtgatgatgtggtctggttgggcggtcgttctagatcggagtagaattctgtttcaaactacctggtggatttattaattttggatctgtatgtgtgtgccatacatattcatagttacgaattgaagatgatggatggaaatatcgatctaggataggtatacatgttgatgcgggttttactgatgcatatacagagatgctttttgttcgcttggttgtgatgatgtggtgtggttgggcggtcgttcattcgttctagatcggagtagaatactgtttcaaactacctggtgtatttattaattttggaactgtatgtgtgtgtcatacatcttcatagttacgagtttaagatggatggaaatatcgatctaggataggtatacatgttgatgtgggttttactgatgcatatacatgatggcatatgcagcatctattcatatgctctaaccttgagtacctatctattataataaacaagtatgttttataattattttgatcttgatatacttggatgatggcatatgcagcagctatatgtggatttttttagccctgccttcatacgctatttatttgcttggtactgtttcttttgtcgatgctcaccctgttgtttggtgttacttctgcaggtcgactttaacttagcctagcatggccactgtgaacaactggctcgctttctccctctccccgcaggagctgccgccctcccagacgacggactccacactcatctcggccgccaccgccgaccatgtctccggcgatgtctgcttcaacatcccccaagattggagcatgaggggatcagagctttcggcgctcgtcgcggagccgaagctggaggacttcctcggcggcatctccttctccgagcagcatcacaaggccaactgcaacatgatacccagcactagcagcacagtttgctacgcgagctcaggtgctagcaccggctaccatcaccagctgtaccaccagcccaccagctcagcgctccacttcgcggactccgtaatggtggcttcctcggccggtgtccacgacggcggtgccatgctcagcgcggccgccgctaacggtgtcgctggcgctgccagtgccaacggcggcggcatcgggctgtccatgattaagaactggctgcggagccaaccggcgcccatgcagccgagggtggcggcggctgagggcgcgcaggggctctctttgtccatgaacatggcggggacgacccaaggcgctgctggcatgccacttctcgctggagagcgcgcacgggcgcccgagagtgtatcgacgtcagcacagggtggagccgtcgtcgtcacggcgccgaaggaggatagcggtggcagcggtgttgccggcgctctagtagccgtgagcacggacacgggtggcagcggcggcgcgtcggctgacaacacggcaaggaagacggtggacacgttcgggcagcgcacgtcgatttaccgtggcgtgacaaggcatagatggactgggagatatgaggcacatctttgggataacagttgcagaagggaagggcaaactcgtaagggtcgtcaagtctatttaggtggctatgataaagaggagaaagctgctagggcttatgatcttgctgctctgaagtactggggtgccacaacaacaacaaattttccagtgagtaactacgaaaaggagctcgaggacatgaagcacatgacaaggcaggagtttgtagcgtctctgagaaggaagagcagtggtttctccagaggtgcatccatttacaggggagtgactaggcatcaccaacatggaagatggcaagcacggattggacgagttgcagggaacaaggatctttacttgggcaccttcagcacccaggaggaggcagcggaggcgtacgacatcgcggcgatcaagttccgcggcctcaacgccgtcaccaacttcgacatgagccgctacgacgtgaagagcatcctggacagcagcgccctccccatcggcagcgccgccaagcgcctcaaggaggccgaggccgcagcgtccgcgcagcaccaccacgccggcgtggtgagctacgacgtcggccgcatcgcctcgcagctcggcgacggcggagccctggcggcggcgtacggcgcgcactaccacggcgccgcctggccgaccatcgcgttccagccgggcgccgccagcacaggcctgtaccacccgtacgcgcagcagccaatgcgcggcggcgggtggtgcaagcaggagcaggaccacgcggtgatcgcggccgcgcacagcctgcaggacctccaccacctgaacctgggcgcggccggcgcgcacgactttttctcggcagggcagcaggccgccgccgctgcgatgcacggcctgggtagcatcgacagtgcgtcgctcgagcacagcaccggctccaactccgtcgtctacaacggcggggtcggcgacagcaacggcgccagcgccgtcggcggcagtggcggtggctacatgatgccgatgagcgctgccggagcaaccactacatcggcaatggtgagccacgagcaggtgcatgcacgggcctacgacgaagccaagcaggctgctcagatggggtacgagagctacctggtgaacgcggagaacaatggtggcggaaggatgtctgcatgggggactgtcgtgtctgcagccgcggcggcagcagcaagcagcaacgacaacatggccgccgacgtcgggcatggcggcgcgcagctcttcagtgtctggaacgacacttaatattggtaccgtcatgggtcgtttaagctgccgatgtgcctgcgtcgtctggtgccctctctccatatggaggttgtcaaagtatctgctgttcgtgtcatgagtcgtgtcagtgttggtttaataatggaccggttgtgttgtgtgtgcgtactacccagaactatgacaaatcatgaataagtttgatgtttgaaattaaagcctgtgctcattatgttctgtctttcagttgtctcctaatatttgcctgcaggtactggctatctaccgtttcttacttaggaggtgtttgaatgcactaaaactaatagttagtggctaaaattagttaaaacatccaaacaccatagctaatagttgaactattagctatttttggaaaattagttaatagtgaggtagttatttgttagctagctaattcaactaacaatttttagccaactaacaattagtttcagtgcattcaaacacccccttaatgttaaggtggttctatctaccgtctcctaatatatggttgattgttcggtttgttgctatgctattgggttctgattgctgctagttcttgctgaatccagaagttctcgtagtatagctcagattcatattatttatttgagtgataagtgatccaggttattactatgttagctaggttttttttacaaggataaattatctgtgatcataattcttatgaaagctttatgtttcctggaggcagtggcatgcaatgcatgacagcaacttgatcacaccagctgaggtagatacggtaacaaggttcttaaatctgttcaccaaatcattggagaacacacatacacattcttgccagtcttggttagagaaatttcatgacaaaatgccaaagctgtcttgactcttcacttttggccatgagtcgtgacgcgacttattgaactagtctagggcgcggctaacaacctagcttagattgccttgtctaaacccttaggctaacgcgccactctagaaggccgatctcccgggataacttcgtatagcatacattatacgaagttatgaattccggaccggcctagaaggccccagagctggtcaccccatacgattggaagcttcaagtttgtacaaaaaagcaggctggatcggccagaatggccccggaccgggttaccaagcggccgcggaattcctgcccttaaggccaattgttcaagattcattcaacaattgaaacatctcccatgattaaatcagtataaggttgctatggtcttgcttgacaaagtttttttttgagggaatttcaactaaatttttgagtgaaactatcaaatactgattttaaaaaatttttataaaaggaagcgcagagataaaaggccatctatgctacaaaagtacccaaaaatgtaatcctaaagtatgaattgcattttttttttgtttggacgaaaggaaaggagtattaccacaagaatgatatcatcttcatatttagatcttttttgggtaaagcttgagattctctaaatatagagaaatcagaagaaaaaaaaaccgtgttttggtggttttgatttctagcctccacaataactttgacggcgtcgacaagtctaacggacaccaagcagcgaaccaccagcgccgagccaagcgaagcagacggccgagacgttgacaccttcggcgcggcatctctcgagagttccgctccggcgctccacctccaccgctggcggtttcttattccgttccgttccgcctcctgctctgctcctctccacaccacacggcacgaaaccgttacggcaccggcagcacccagcacgggagaggggattcctttcccaccgttccttccctttccgccccgccgctataaatagccagccccatccccagcttttttccccaatctcatctcctctctcctgttgttcggagcacacgcacaatccgatcgatccccaaatccccttcgtctctcctcgcgagcctcgtggatcccagcttcaaggtacggcgatcgatcatcccccctccttctctctaccttcttttctctagactacatcggatggcgatccatggttagggcctgctagtttcccttcctgttttgtcgatggctgcgaggcacaatagatctgatggcgttatgacggctaacttgtcatgttgttgcgatttatagtccctttaggagatcagtttaatttctcggatggttcgagatcggtggtccatggttagtaccctaagatccgcgctgttagggttcgtagatggaggcgacctgttctgattgttaacttgtcagtacctgggaaatcctgggatggttctagctcgtccgcagatgagatcgatttcatgatcctctgtatcttgtttcgttgcctaggttccgtctaatctatccgtggtatgatgtagatgttttgatcgtgctaactacgtcttgtaaagttaattgtcaggtcataatttttagcatgcctttttttttgtttggttttgtctaattgggctgtcgttctagatcagagtagaagactgttccaaactacctgctggatttattgaacttggatctgtatgtgtgtcacatatcttcataaattcatgattaagatggattgaaatatcttttatctttttggtatggatagttctatatgttggtgtggctttgttagatgtatacatgcttagatacatgaagcaacgtgctgctactgtttagtaattgctgttcatttgtctaataaacagataaggatatgtatttatgttgctgttggttttgctggtactttgttggatacaaatgcttcaatacagaaaacagcatgctgctacgatttaccatttatctaatcttatcatatgtctaatctaataaacaaacatgcttttaaattatcttcatatgcttggatgatggcatacacagcggctatgtgtggttttttaaatacccagcatcatgggcatgcatgacactgctttaatatgctttttatttgcttgagactgtttcttttgtttatactgaccctttagttcggtgactcttctgcaggtcgactttaacttagcctaggatccatggcccagtccaagcacggcctgaccaaggagatgaccatgaagtaccgcatggagggctgcgtggacggccacaagttcgtgatcaccggcgagggcatcggctaccccttcaagggcaagcaggccatcaacctgtgcgtggtggagggcggccccttgcccttcgccgaggacatcttgtccgccgccttcatgtacggcaaccgcgtgttcaccgagtacccccaggacatcgtcgactacttcaagaactcctgccccgccggctacacctgggaccgctccttcctgttcgaggacggcgccgtgtgcatctgcaacgccgacatcaccgtgagcgtggaggagaactgcatgtaccacgagtccaagttctacggcgtgaacttccccgccgacggccccgtgatgaagaagatgaccgacaactgggagccctcctgcgagaagatcatccccgtgcccaagcagggcatcttgaagggcgacgtgagcatgtacctgctgctgaaggacggtggccgcttgcgctgccagttcgacaccgtgtacaaggccaagtccgtgccccgcaagatgcccgactggcacttcatccagcacaagctgacccgcgaggaccgcagcgacgccaagaaccagaagtggcacctgaccgagcacgccatcgcctccggctccgccttgccctccggactcagatctcgatagggtacctgacatcttatagtctgcaacctctcgtgtctgaattcctatctttatcaagtgttattgcttccacgactataggacagctttcgtcgaaaggttttgctcatgtgatctcgaaggattcatctagtctgatttttcgtgacttgtatcggttttattggattcatccaacatatatcaataaaaaatgagttgtgtttcctttcttcctagttcagttaaaattatttccctcctgcgcttgtgctgtaattgtctgtgtacctgttgtttgtgactgtgttagttcccttggatatgatttcgtatttgatatgtacatggagatagcttagcttcattattggagtatgaagttagtatgacatagtcactctcctggaaaattgacactgcaaaccatatttttattctgaaccacaaatcctagtcagtccgctggcatatgccgtccgtttgctgaatccagaacgtgggtttggagatgtacggctgagatgcctctatgcgaaggggatttcgtggtgaaacgagatgggagtagagcaacgcccgtggaagatgcttcaaacttccacacttttgagcaacgatcggcagtagtaaggtagacgatttcaagatcaaagcatatgaagataaacaacatcaacaacaaaatttgttggggttctatagagagaaacagagctacatacatacactgttttgtatctaccatctgagatgatgaaaagatgaaaaactaaagaatgccccggcgccaacgccaggacacgccgcgcgcgcgtcacccgagccatctcttgacccagccggcgctgtatatttacacacgttgcagcatcgatcaccacctgttcgatcgcgtcgccgtcaccaagcttggcgcgccggtcacccggtccgggcctagaaggccacccggggtcggaggagactagccgttagttagtgcagaccgtctctaatcagtgactagcgacgtcccgacccacccagctttcttgtacaaagtggcccggggcggccgaagctggccttctaggcccggaccgggttaccgcggccgcgaattcaggtgactcttagcgatccgacggcgtcttcaccgccccgccgccgcccgagccggacttgtcgctgccgccgccgctgctcatcttgcgcgcttgtgtccctccctcagtccctgcgttcgcggatcgcgggcgggtgcgacccgtttggactccggccggtagccttcgtgccgacctcgctcggtccaccggtttgtcggggacccacatgtcagtgaaggtacgcgtccacgtccacagaccctactaccccagacgagtccaaatcgctgttccctcacactctcgtgtaccagcgcgcggcggaaagcacctttccaacaaccgccgacacgtcggtcccacgtcggcatgctccaccggtcagtgtttggcgtgtacggctcccggcgacgaacgagtgtggcctaagctttcctactcccatcccatctgagccacacatctctctcacgccacgcgcacaaaacagccaggctcccacgcgcatcaaccggctctccctttccgtgccactcgcccccaagccccaaaccctcgccgccgcctccgagacagccgccgccacctaggccatggccaccgccgccgccgcgtctaccgcgctcactggcgccactaccgctgcgcccaaggcgaggcgccgggcgcacctcctggccacccgccgcgccctcgccgcgcccatcaggtgctcagcggcgtcacccgccatgccgatggctcccccggccaccccgctccggccgtggggccccaccgagccccgcaagggtgctgacatcctcgtcgagtccctcgagcgctgcggcgtccgcgacgtcttcgcctaccccggcggcgcgtcgatggagatccaccaggcactcacccgctcccccgtcatcgccaaccacctcttccgccacgagcaaggggaggcctttgccgcctccggctacgcgcgctcctcgggccgcgtcggcgtctgcatcgccacctccggccccggcgccaccaacctagtctccgcgctcgccgacgcgctgctcgattccgtcccgatggtcgccatcacgggacaggtggcgcgacgcatgattggcaccgacgccttccaggagacgcccatcgtcgaggtcacgcgctccatcaccaagcacaactacctggtcctcgacgtcgacgacatcccccgcgtcgtgcaggaggctttcttcctcgcctcctctggtcgaccagggccggtgcttgtcgacatccccaaggacatccagcagcagatggcggtgcctgtctgggacaagcccatgagtctgcctgggtacattgcgcgccttcccaagccccctgcgactgagttgcttgagcaggtgctgcgtcttgttggtgaatcgcggcgccctgttctttatgtgggcggtggctgcgcagcatctggtgaggagttgcgacgctttgtggagctgactggaatcccggtcacaactactcttatgggcctcggcaacttccccagcgacgacccactgtctctgcgcatgctaggtatgcatgggacggtgtatgcaaattatgcagtggataaggccgatctgttgcttgcacttggtgtgcggtttgatgatcgcgtgacagggaagattgaggcttttgcaagcagggctaagattgtgcacgttgatattgatccggctgagattggcaagaacaagcagccacatgtgtccatctgtgcagatgttaagcttgctttgcagggcatgaatgctcttcttgaaggaagcacatcaaagaagagctttgactttggctcatggaacgatgagttggatcagcagaagagggaattcccccttgggtataaaacatctaatgaggagatccagccacaatatgctattcaggttcttgatgagctgacgaaaggcgaggccatcatcggcacaggtgttgggcagcaccagatgtgggcggcacagtactacacttacaagcggccaaggcagtggttgtcttcagctggtcttggggctatgggatttggtttgccggctgctgctggtgcttctgtggcaaacccaggtgtcactgttgttgacatcgatggagatggtagctttctcatgaacgttcaggagctagctatgatccgaattgagaacctcccagtgaaggtctttgtgctaaacaaccagcacctggggatggtggtgcagttggaggacaggttctataaggccaacagagcgcacacatacttgggaaacccagagaatgaaagtgagatatatccagatttcgtgacgatcgccaaagggttcaacattccagccgtccgtgtgacaaagaagaacgaagtccgcgcagcgataaagaagatgctcgagactccagggccgtacctcttggatataatcgtcccacaccaggagcatgtgttgcctatgatccctagtggtggggctttcaaggatatgatcctggatggtgatggcaggactgtgtactgacttcgaataggtacccggggatcctctagtgccgtgggtcgtttaagctgccgctgtacctgtgtcgtctggtgccttctggtgtacctgggaggttgtcgtctatcaagtatctgtggttggtgtcatgagtcagtgagtcccaatactgttcgtgtcctgtgtgcattatacccaaaactgttatgggcaaatcatgaataagcttgatgttcgaacttaaaagtctctgctcaatatggtattatggttgtttttgttcgtctcctaatatttgcctgggatcaaattttattggctggtgttcatttgacctccatgttcttgctaggctccattttttactctacagccataatatgtttgattgtttggtttgttctttgttgtacacctggttctgtcgagcttagttttcgacactggcttacagcttaacatgttgctattttattgggttctgattgctattttattgggttctgattgctagtttttgctgaatccaaaaaccatgttatttatttaagcgatccaggttattattatgatggtggctaagtttttttttttccaagggtaaattttctggattctccagtgtttctgtggccgaattcaatcactagagtcgacctgcaggcatgcccgcggtggagctcgaattccggtccgggcctagaaggccagcttcggccgccccgggcaactttattatacaaagttgatagatgtacctgattccgatgacttcgtaggttcctagctcaagccgctcgtgtccaagcgtcacttacgattagctaatgattacggcatctaggaccgactagctaactaactagtacgtacgcgccgactagctagctaaggtaccgagctcgaattcattccgattaatcgtggcctcttgctcttcaggatgaagagctatgtttaaacgtgcaagcgctactagacaattcagtacattaaaaacgtccgcaatgtgttattaagttgtctaagcgtcaatttgtttacaccacaatatatcctgcca

SEQ ID NO: 36 - DNA, 16917 bp, Artificial sequence
  PHP94715
gtttacccgccaatatatcctgtcaaacactgcggccgcacttgaccgcggatggagccggagctgtggtgaggccatcgacgggaggtgggggagaacacagtctcagtgttctttgtgagtccgcaaggtttttagcttttctgtattaattaaggttgctgttggctgtagaatacggtcgtggaagagctgtatcggtagctactacgtaagctattatatactggaagtctggagctcgtcgatctccggtcgtcttcctccatttctcctcgtcttgctttgactgctgctaccatttgcttctgttttctgatgaagcatgccatgtcggccaccagtgtttgtgtggtttttgcagggaatggctttcaagtgctgtgattgaatggccctcgtcgtcctcggctgagctcacatggacgcgtcatgtgagtgagatatatgatcatatgatgagtggggttcgggtgagtgcgtacttgaagtaggatcccgctttcactcattcattcattggcctttaaaccgggaaattttcgcgaggagatggagggaagcaagcagggtgacgagtgcagagtgccgcgagcgctttgtcaaaaggcaccgccgtaggcaaaaaaatcaatggccctgactgactcgatggtagtactactgtagagactagagagggttgctccccatatcttcgtgtgacttttactccagcattgcatttccgtcattgagacgttaattaatagcagctttcgggacagatgactgtggccatgtttcgtcacggccgcttcgtgccagctgggggtactatagtactgtgattttgttagtaaaaactttcattaggccaccattgacgaccgggccttcgcttttgctgcgctaattaaccatttcccggcgaccgaagggaacatgaacatgccccgacacatgagggcatgaggactagtgttctccctgtcgttcgttgacttgactagtgatagtttaaacgctcttcaactggaagagcggttactaccggttcactagctagctgctaatcgagctagttaccctatgaggtgacatgaagcgctcacggttactatgacggttagcttcacgactgttggtggcagtagcgtacgacttagctatagttccggacttacccttaagataacttcgtatagcatacattatacgaagttatgggcccacgcgtgaagagcggttaccagagctggtcacctttgtccaccaagatggaactgtcttcggccagaatggccatctggattcagcaggcctagaaggccatttatcgctatcaactttgtatagaaaagttgggccgaattcgagctcggtacggccagaatggcccggaccgggttaccaagcggccgcgaattcaagcttccttttgtctcccttttgtctcccttttgtctcccttttgtctcccttttgtctcccttttgtctcccttttgtctcccttttgtctcgaggacatctccactgacgtaagggatgacgcacaatcccactatccttcgcaagacccttcctctatataaggaagttcatttcatttggagaggaggatcccatggcggccaatgcgggcggcggtggagcgggaggaggcagcggcagcggcagcgtggctgcgccggcggtgtgccgccccagcggctcgcggtggacgccgacgccggagcagatcaggatgctgaaggagctctactacggctgcggcatccggtcgcccagctcggagcagatccagcgcatcaccgccatgctgcggcagcacggcaagatcgagggcaagaacgtcttctactggttccagaaccacaaggcccgcgagcgccagaagcgccgcctcaccagcctcgacgtcaacgtgcccgccgccggcgcggccgacgccaccaccagccaactcggcgtcctctcgctgtcgtcgccgccgccttcaggcgcggcgcctccctcgcccaccctcggcttctacgccgccggcaatggcggcggatcggctgtgctgctggacacgagttccgactggggcagcagcggcgctgctatggccaccgagacatgcttcctgcaggactacatgggcgtgacggacacgggcagctcgtcgcagtggccacgcttctcgtcgtcggacacgataatggcggcggccgcggcgcgggcggcgacgacgcgggcgcccgagacgctccctctcttcccgacctgcggcgacgacggcggcagcggtagcagcagctacttgccgttctggggtgccgcgtccacaactgccggcgccacttcttccgttgcgatccaacagcaacaccagctgcaggagcagtacagcttttacagcaacagcaacagcacccagctggccggcaccggcaaccaagacgtatcggcaacagcagcagcagccgccgccctggagctgagcctcagctcatggtgctccccttaccctgctgcagggagtatgtgagagcaacgcgagctgccactgctcttcactgatgtctctggaatggaaggaggaggaagtgagcatagcgttggtgcgttgctgtcaagggcgaattgtaccacatggttaacctagacttgtccatcttctggattggccaacttaattaatgtatgaaataaaaggatgcacacatagtgacatgctaatcactataatgtgggcatcaaagttgtgtgttatgtgtaattactagttatctgaataaaagagaaagagatcatccatatttcttatcctaaatgaatgtcacgtgtctttataattctttgatgaaccagatgcatttcattaaccaaatccatatacatataaatattaatcatatataattaatatcaattgggttagcaaaacaaatctagtctaggtgtgttttgcgaatgcggccgccaccgcggtggagctcgaattccggtccgggcctagaaggccagcttcaagtttgtacaaaaaagcaggctccggccagaatggcccggaccgggttaccgaattcgagctcggtaccatttaaattgcgcccgccacggccgtggaggtcgtattccggtcagcttgcatccctgcagtgcagcgtgacccggtcgtgcccctctctagagataatgagcattgcatgtctaagttataaaaaattaccacatattttttttgtcacacttgtttgaagtgcagtttatctatctttatacatatatttaaactttactctacgaataatataatctatagtactacaataatatcagtgttttagagaatcatataaatgaacagttagacatggtctaaaggacaattgagtattttgacaacaggactctacagttttatctttttagtgtgcatgtgttctcctttttttttgcaaatagcttcacctatataatacttcatccattttattagtacatccatttagggtttagggttaatggtttttatagactaatttttttagtacatctattttattctattttagcctctaaattaagaaaactaaaactctattttagtttttttatttaataatttagatataaaatagaataaaataaagtgactaaaaattaaacaaataccctttaagaaattaaaaaaactaaggaaacatttttcttgtttcgagtagataatgccagcctgttaaacgccgtcgacgagtctaacggacaccaaccagcgaaccagcagcgtcgcgtcgggccaagcgaagcagacggcacggcatctctgtcgctgcctctggacccctctcgagagttccgctccaccgttggacttgctccgctgtcggcatccagaaattgcgtggcggagcggcagacgtgagccggcacggcaggcggcctcctcctcctctcacggcaccggcagctacgggggattcctttcccaccgctccttcgctttcccttcctcgcccgccgtaataaatagacaccccctccacaccctctttccccaacctcgtgttgttcggagcgcacacacacacaaccagatctcccccaaatccacccgtcggcacctccgcttcaaggtacgccgctcgtcctcccccccccccctctctaccttctctagatcggcgttccggtccatgcatggttagggcccggtagttctacttctgttcatgtttgtgttagatccgtgtttgtgttagatccgtgctgctagcgttcgtacacggatgcgacctgtacgtcagacacgttctgattgctaacttgccagtgtttctctttggggaatcctgggatggctctagccgttccgcagacgggatcgatttcatgattttttttgtttcgttgcatagggtttggtttgcccttttcctttatttcaatatatgccgtgcacttgtttgtcgggtcatcttttcatgcttttttttgtcttggttgtgatgatgtggtctggttgggcggtcgttctagatcggagtagaattctgtttcaaactacctggtggatttattaattttggatctgtatgtgtgtgccatacatattcatagttacgaattgaagatgatggatggaaatatcgatctaggataggtatacatgttgatgcgggttttactgatgcatatacagagatgctttttgttcgcttggttgtgatgatgtggtgtggttgggcggtcgttcattcgttctagatcggagtagaatactgtttcaaactacctggtgtatttattaattttggaactgtatgtgtgtgtcatacatcttcatagttacgagtttaagatggatggaaatatcgatctaggataggtatacatgttgatgtgggttttactgatgcatatacatgatggcatatgcagcatctattcatatgctctaaccttgagtacctatctattataataaacaagtatgttttataattattttgatcttgatatacttggatgatggcatatgcagcagctatatgtggatttttttagccctgccttcatacgctatttatttgcttggtactgtttcttttgtcgatgctcaccctgttgtttggtgttacttctgcaggtcgactctagaggatccatggccactgtgaacaactggctcgctttctccctctccccgcaggagctgccgccctcccagacgacggactccacactcatctcggccgccaccgccgaccatgtctccggcgatgtctgcttcaacatcccccaagattggagcatgaggggatcagagctttcggcgctcgtcgcggagccgaagctggaggacttcctcggcggcatctccttctccgagcagcatcacaaggccaactgcaacatgatacccagcactagcagcacagtttgctacgcgagctcaggtgctagcaccggctaccatcaccagctgtaccaccagcccaccagctcagcgctccacttcgcggactccgtaatggtggcttcctcggccggtgtccacgacggcggtgccatgctcagcgcggccgccgctaacggtgtcgctggcgctgccagtgccaacggcggcggcatcgggctgtccatgattaagaactggctgcggagccaaccggcgcccatgcagccgagggtggcggcggctgagggcgcgcaggggctctctttgtccatgaacatggcggggacgacccaaggcgctgctggcatgccacttctcgctggagagcgcgcacgggcgcccgagagtgtatcgacgtcagcacagggtggagccgtcgtcgtcacggcgccgaaggaggatagcggtggcagcggtgttgccggcgctctagtagccgtgagcacggacacgggtggcagcggcggcgcgtcggctgacaacacggcaaggaagacggtggacacgttcgggcagcgcacgtcgatttaccgtggcgtgacaaggcatagatggactgggagatatgaggcacatctttgggataacagttgcagaagggaagggcaaactcgtaagggtcgtcaagtctatttaggtggctatgataaagaggagaaagctgctagggcttatgatcttgctgctctgaagtactggggtgccacaacaacaacaaattttccagtgagtaactacgaaaaggagctcgaggacatgaagcacatgacaaggcaggagtttgtagcgtctctgagaaggaagagcagtggtttctccagaggtgcatccatttacaggggagtgactaggcatcaccaacatggaagatggcaagcacggattggacgagttgcagggaacaaggatctttacttgggcaccttcagcacccaggaggaggcagcggaggcgtacgacatcgcggcgatcaagttccgcggcctcaacgccgtcaccaacttcgacatgagccgctacgacgtgaagagcatcctggacagcagcgccctccccatcggcagcgccgccaagcgcctcaaggaggccgaggccgcagcgtccgcgcagcaccaccacgccggcgtggtgagctacgacgtcggccgcatcgcctcgcagctcggcgacggcggagccctggcggcggcgtacggcgcgcactaccacggcgccgcctggccgaccatcgcgttccagccgggcgccgccagcacaggcctgtaccacccgtacgcgcagcagccaatgcgcggcggcgggtggtgcaagcaggagcaggaccacgcggtgatcgcggccgcgcacagcctgcaggacctccaccacctgaacctgggcgcggccggcgcgcacgactttttctcggcagggcagcaggccgccgccgctgcgatgcacggcctgggtagcatcgacagtgcgtcgctcgagcacagcaccggctccaactccgtcgtctacaacggcggggtcggcgacagcaacggcgccagcgccgtcggcggcagtggcggtggctacatgatgccgatgagcgctgccggagcaaccactacatcggcaatggtgagccacgagcaggtgcatgcacgggcctacgacgaagccaagcaggctgctcagatggggtacgagagctacctggtgaacgcggagaacaatggtggcggaaggatgtctgcatgggggactgtcgtgtctgcagccgcggcggcagcagcaagcagcaacgacaacatggccgccgacgtcgggcatggcggcgcgcagctcttcagtgtctggaacgacacttaagcgtacgtgccggcctggctctccgaaagggcgtattccagcacactggcggccgttactagacccaacctagacttgtccatcttctggattggccaacttaattaatgtatgaaataaaaggatgcacacatagtgacatgctaatcactataatgtgggcatcaaagttgtgtgttatgtgtaattactagttatctgaataaaagagaaagagatcatccatatttcttatcctaaatgaatgtcacgtgtctttataattctttgatgaaccagatgcatttcattaaccaaatccatatacatataaatattaatcatatataattaatatcaattgggttagcaaaacaaatctagtctaggtgtgttttgcgaatgcggcctccgggcacccagctttcttgtacaaagtggccgttaacggatcggccagatccctatagtattttaaaattgcattaacaaacatgtcctaattggtactcctgagatactataccctcctgttttaaaatagttggcattatcgaattatcattttactctttaatgttttctcttcttttaatatattttatgaattttaatgtattttaaaatgttatgcagttcgctctggacttttctgctgcgcctacacttgggtgtactgggcctaaattcagcctgaccgaccgcctgcattgaataatggatgagcaccggtaaaatccgcgtacccaactttcgagaagaaccgagacgtggcgggccgggccaccgacgcacggcaccagcgactgcacacgtcccgccggcgtacgtgtacgtgctgttccctcactggccgcccaatccactcatgcatgcccacgtacacccctgccgtggcgcgcccagatcctaatcctttcgccgttctgcacttctgctgcctataaatggcggcatcgaccgtcacctgcttcaccaccggcgagccacatcgagaacacgatcgagcacacaagcacgaagactcgtttaggagaaaccacaaaccaccaagccgtgcaagcaccaagcttggtcacccggtccgggcctagaaggccagcttcaagtttgtacaaaaaagcaggcttcgaaggagatagaaccgatccaccatgtccaacctgctcacggttcaccagaaccttccggctcttccagtggacgcgacgtccgatgaagtcaggaagaacctcatggacatgttccgcgacaggcaagcgttcagcgagcacacctggaagatgctgctctccgtctgccgctcctgggctgcatggtgcaagctgaacaacaggaagtggttccccgctgagcccgaggacgtgagggattaccttctgtacctgcaagcgcgaggtttgtttctgcttctacctttgatatatatataataattatcattaattagtagtaatataatatttcaaatatttttttcaaaataaaagaatgtagtatatagcaattgcttttctgtagtttataagtgtgtatattttaatttataacttttctaatatatgaccaaaacatggtgatgcctaggtctggcagtgaagaccatccagcaacaccttggacaactgaacatgcttcacaggcgctccggcctcccgcgccccagcgactcgaacgccgtgagcctcgtcatgcgccgcatcaggaaggaaaacgtcgatgccggcgaaagggcaaagcaggccctcgcgttcgagaggaccgatttcgaccaggtccgcagcctgatggagaacagcgacaggtgccaggacattaggaacctggcgttcctcggaattgcatacaacacgctcctcaggatcgcggaaattgcccgcattcgcgtgaaggacattagccgcaccgacggcggcaggatgcttatccacattggcaggaccaagacgctcgtttccaccgcaggcgtcgaaaaggccctcagcctcggagtgaccaagctcgtcgaacgctggatctccgtgtccggcgtcgcggacgacccaaacaactacctcttctgccgcgtccgcaagaacggggtggctgcccctagcgccaccagccaactcagcacgagggccttggaaggtattttcgaggccacccaccgcctgatctacggcgcgaaggatgacagcggtcaacgctacctcgcatggtccgggcactccgcccgcgttggagctgctagggacatggcccgcgccggtgtttccatccccgaaatcatgcaggcgggtggatggacgaacgtgaacattgtcatgaactacattcgcaaccttgacagcgagacgggcgcaatggttcgcctcctggaagatggtgactgagctagacccagctttcttgtacaaagtggccgttaacggatccagacttgtccatcttctggattggccaacttaattaatgtatgaaataaaaggatgcacacatagtgacatgctaatcactataatgtgggcatcaaagttgtgtgttatgtgtaattactagttatctgaataaaagagaaagagatcatccatatttcttatcctaaatgaatgtcacgtgtctttataattctttgatgaaccagatgcatttcattaaccaaatccatatacatataaatattaatcatatataattaatatcaattgggttagcaaaacaaatctagtctaggtgtgttttgcgaatgcggccgccaccgcggtggagctcgaattccggtccgggcctagaaggccagcttcggccgccccgggcaactttattatacaaagttgatagataaatcagatatctggttcctaaggacccggcggaccgattaaactgattcggtccgacgcgttacctaataacttcgtatagcatacattatacgaagttattagctaactaactagtaagcttggtcacccggtccgtcaatattctgattccgatgacttcgtaggttcctagctcaagccgctcgtgtccaagcgtcacttacgattagctaatgattacggcatctaggaccgactagtggcgcgccgactagctagctaaggtacgacttagctatagttccggacttaccggcgccgctagcctgcagtgcagcgtgacccggtcgtgcccctctctagagataatgagcattgcatgtctaagttataaaaaattaccacatattttttttgtcacacttgtttgaagtgcagtttatctatctttatacatatatttaaactttactctacgaataatataatctatagtactacaataatatcagtgttttagagaatcatataaatgaacagttagacatggtctaaaggacaattgagtattttgacaacaggactctacagttttatctttttagtgtgcatgtgttctcctttttttttgcaaatagcttcacctatataatacttcatccattttattagtacatccatttagggtttagggttaatggtttttatagactaatttttttagtacatctattttattctattttagcctctaaattaagaaaactaaaactctattttagtttttttatttaataatttagatataaaatagaataaaataaagtgactaaaaattaaacaaataccctttaagaaattaaaaaaactaaggaaacatttttcttgtttcgagtagataatgccagcctgttaaacgccgtcgacgagtctaacggacaccaaccagcgaaccagcagcgtcgcgtcgggccaagcgaagcagacggcacggcatctctgtcgctgcctctggacccctctcgagagttccgctccaccgttggacttgctccgctgtcggcatccagaaattgcgtggcggagcggcagacgtgagccggcacggcaggcggcctcctcctcctctcacggcaccggcagctacgggggattcctttcccaccgctccttcgctttcccttcctcgcccgccgtaataaatagacaccccctccacaccctctttccccaacctcgtgttgttcggagcgcacacacacacaaccagatctcccccaaatccacccgtcggcacctccgcttcaaggtacgccgctcgtcctcccccccccccctctctaccttctctagatcggcgttccggtccatgcatggttagggcccggtagttctacttctgttcatgtttgtgttagatccgtgtttgtgttagatccgtgctgctagcgttcgtacacggatgcgacctgtacgtcagacacgttctgattgctaacttgccagtgtttctctttggggaatcctgggatggctctagccgttccgcagacgggatcgatttcatgattttttttgtttcgttgcatagggtttggtttgcccttttcctttatttcaatatatgccgtgcacttgtttgtcgggtcatcttttcatgcttttttttgtcttggttgtgatgatgtggtctggttgggcggtcgttctagatcggagtagaattctgtttcaaactacctggtggatttattaattttggatctgtatgtgtgtgccatacatattcatagttacgaattgaagatgatggatggaaatatcgatctaggataggtatacatgttgatgcgggttttactgatgcatatacagagatgctttttgttcgcttggttgtgatgatgtggtgtggttgggcggtcgttcattcgttctagatcggagtagaatactgtttcaaactacctggtgtatttattaattttggaactgtatgtgtgtgtcatacatcttcatagttacgagtttaagatggatggaaatatcgatctaggataggtatacatgttgatgtgggttttactgatgcatatacatgatggcatatgcagcatctattcatatgctctaaccttgagtacctatctattataataaacaagtatgttttataattattttgatcttgatatacttggatgatggcatatgcagcagctatatgtggatttttttagccctgccttcatacgctatttatttgcttggtactgtttcttttgtcgatgctcaccctgttgtttggtgttacttctgcaggtcgactctagaggatcaattcgctagcgaagttcctattccgaagttcctattctctagaaagtataggaacttcagatccaccgggatccaccatggttgaacaagatggattgcacgcaggttctccggccgcttgggtggagaggctattcggctatgactgggcacaacagacaatcggctgctctgatgccgccgtgttccggctgtcagcgcaggggcgcccggttctttttgtcaagaccgacctgtccggtgccctgaatgaactgcaggacgaggcagcgcggctatcgtggctggccacgacgggcgttccttgcgcagctgtgctcgacgttgtcactgaagcgggaagggactggctgctattgggcgaagtgccggggcaggatctcctgtcatctcaccttgctcctgccgagaaagtatccatcatggctgatgcaatgcggcggctgcatacgcttgatccggctacctgcccattcgaccaccaagcgaaacatcgcatcgagcgagcacgtactcggatggaagccggtcttgtcgatcaggatgatctggacgaagagcatcaggggctcgcgccagccgaactgttcgccaggctcaaggcgcgcatgcccgacggcgatgatctcgtcgtgacccatggcgatgcctgcttgccgaatatcatggtggaaaatggccgcttttctggattcatcgactgtggccggctgggtgtggcggaccgctatcaggacatagcgttggctacccgtgatattgctgaagagcttggcggcgaatgggctgaccgcttcctcgtgctttacggtatcgccgctcccgattcgcagcgcatcgccttctatcgccttcttgacgagttcttctgaggatccaccatggttaacctagacttgtccatcttctggattggccaacttaattaatgtatgaaataaaaggatgcacacatagtgacatgctaatcactataatgtgggcatcaaagttgtgtgttatgtgtaattactagttatctgaataaaagagaaagagatcatccatatttcttatcctaaatgaatgtcacgtgtctttataattctttgatgaaccagatgcatttcattaaccaaatccatatacatataaatattaatcatatataattaatatcaattgggttagcaaaacaaatctagtctaggtgtgttttgcaagcttgcatgcctgcagtgcagcgtgacccggtcgtgcccctctctagagataatgagcattgcatgtctaagttataaaaaattaccacatattttttttgtcacacttgtttgaagtgcagtttatctatctttatacatatatttaaactttactctacgaataatataatctatagtactacaataatatcagtgttttagagaatcatataaatgaacagttagacatggtctaaaggacaattgagtattttgacaacaggactctacagttttatctttttagtgtgcatgtgttctcctttttttttgcaaatagcttcacctatataatacttcatccattttattagtacatccatttagggtttagggttaatggtttttatagactaatttttttagtacatctattttattctattttagcctctaaattaagaaaactaaaactctattttagtttttttatttaataatttagatataaaatagaataaaataaagtgactaaaaattaaacaaataccctttaagaaattaaaaaaactaaggaaacatttttcttgtttcgagtagataatgccagcctgttaaacgccgtcgacgagtctaacggacaccaaccagcgaaccagcagcgtcgcgtcgggccaagcgaagcagacggcacggcatctctgtcgctgcctctggacccctctcgagagttccgctccaccgttggacttgctccgctgtcggcatccagaaattgcgtggcggagcggcagacgtgagccggcacggcaggcggcctcctcctcctctcacggcaccggcagctacgggggattcctttcccaccgctccttcgctttcccttcctcgcccgccgtaataaatagacaccccctccacaccctctttccccaacctcgtgttgttcggagcgcacacacacacaaccagatctcccccaaatccacccgtcggcacctccgcttcaaggtacgccgctcgtcctcccccccccccctctctaccttctctagatcggcgttccggtccatgcatggttagggcccggtagttctacttctgttcatgtttgtgttagatccgtgtttgtgttagatccgtgctgctagcgttcgtacacggatgcgacctgtacgtcagacacgttctgattgctaacttgccagtgtttctctttggggaatcctgggatggctctagccgttccgcagacgggatcgatttcatgattttttttgtttcgttgcatagggtttggtttgcccttttcctttatttcaatatatgccgtgcacttgtttgtcgggtcatcttttcatgcttttttttgtcttggttgtgatgatgtggtctggttgggcggtcgttctagatcggagtagaattctgtttcaaactacctggtggatttattaattttggatctgtatgtgtgtgccatacatattcatagttacgaattgaagatgatggatggaaatatcgatctaggataggtatacatgttgatgcgggttttactgatgcatatacagagatgctttttgttcgcttggttgtgatgatgtggtgtggttgggcggtcgttcattcgttctagatcggagtagaatactgtttcaaactacctggtgtatttattaattttggaactgtatgtgtgtgtcatacatcttcatagttacgagtttaagatggatggaaatatcgatctaggataggtatacatgttgatgtgggttttactgatgcatatacatgatggcatatgcagcatctattcatatgctctaaccttgagtacctatctattataataaacaagtatgttttataattattttgatcttgatatacttggatgatggcatatgcagcagctatatgtggatttttttagccctgccttcatacgctatttatttgcttggtactgtttcttttgtcgatgctcaccctgttgtttggtgttacttctgcaggtcgactctagaggatccaccggtcgccaccatggccctgtccaacaagttcatcggcgacgacatgaagatgacctaccacatggacggctgcgtgaacggccactacttcaccgtgaagggcgagggcagcggcaagccctacgagggcacccagacctccaccttcaaggtgaccatggccaacggcggccccctggccttctccttcgacatcctgtccaccgtgttcatgtacggcaaccgctgcttcaccgcctaccccaccagcatgcccgactacttcaagcaggccttccccgacggcatgtcctacgagagaaccttcacctacgaggacggcggcgtggccaccgccagctgggagatcagcctgaagggcaactgcttcgagcacaagtccaccttccacggcgtgaacttccccgccgacggccccgtgatggccaagaagaccaccggctgggacccctccttcgagaagatgaccgtgtgcgacggcatcttgaagggcgacgtgaccgccttcctgatgctgcagggcggcggcaactacagatgccagttccacacctcctacaagaccaagaagcccgtgaccatgccccccaaccacgtggtggagcaccgcatcgccagaaccgacctggacaagggcggcaacagcgtgcagctgaccgagcacgccgtggcccacatcacctccgtggtgcccttctgaagcggccgcaacctagacttgtccatcttctggattggccaacttaattaatgtatgaaataaaaggatgcacacatagtgacatgctaatcactataatgtgggcatcaaagttgtgtgttatgtgtaattactagttatctgaataaaagagaaagagatcatccatatttcttatcctaaatgaatgtcacgtgtctttataattctttgatgaaccagatgcatttcattaaccaaatccatatacatataaatattaatcatatataattaatatcaattgggttagcaaaacaaatctagtctaggtgtgttttgcgaatgcggccgccaccgcggtggagctcgaatgcggccctagcgtatacgaagttcctattccgaagttcctattcttcaaaaagtataggaacttctgtaccgagctcgaattcattccgattaatcgtggcctcttgctcttcaggatgaagagctatgtttaaacgtgcaagcgctactagacaattcagtacattaaaaacgtccgcaatgtgttattaagttgtctaagcgtcaatttgtttacaccacaatatatcctgcca

SEQ ID NO: 37 - DNA, 20588 bp, Artificial sequence
  PHP95067
gtttacccgccaatatatcctgtcaaacactgatagtttaaactgaaggcgggaaacgacaatctgatcatgagcggagaattaagggagtcacgttatgacccccgccgatgacgcgggacaagccgttttacgtttggaactgacagaaccgcaacgttgaaggagccactcagcaagctggtacgattgtaatacgactcactatagggcgaattgagcgctgtttaaacgctcttcaactggaagagcggttacgctgtttaaacgctcttcaactggaagagcggttactaccggttcactagctagctgctaatcgagctagttaccctatgaggtgacatgaagcgctcacggttactatgacggttagcttcacgactgttggtggcagtagcgtacgacttagctatagttccggacttacccttaagcgatttaaatctgcggttaccgaattcgagctcggtacctagtacccttgtacttttggtttcacctgcatagagaaaacccacaagaatatgacagtctgatttgtcagtctcattctcaagcaacatttctctatccgttactttcatggtgaataacacaatccatcatcaatactttgtgttactcagaaactgaaagttattccgagtcttgcatatctttggacctactcgtttttctaccattattgctgattgttaagctctcgctacttgaatcggcattgttggagtgggaaggttcaaaaaattggagttatgactagttgtctctttctatgtacgatggagaaaatgaataaacaactgagaaaatggctcttgtttagttgatgatgctcttaagctttccactggttgccatatatgatttgggcatttcactttgatcttaatgggccttgtaaagcccaagactcatgattatctttagttgatgctcttaattaggtgtgggcaaataattcaaactgtatgtacccgaccaaaaccaaagcaaaaataatcgaaccaaaccgaaaatttaaaaataaccgaatgaaaactaaatcctataactgaaagaactgaaaccgaatcaaaatatttaatgtaaccaaaaatatccgaaatataattatattgtcaaaaatattaataatttctagattaaataattaaaaatacttaaaaatttatataaaatagtaaaaatactcgaaaataaccacaaatattcaaaaacaaccgaaatatcccaaaatattcaaagcaaaataaccgaatggataccaaattttaaaaccgaaaaaactggaacaaaaccaaaatcgaaccaaaatttcaaaaatcgaataaatactaaactttagaacaaaaaaaaacgataaccgaatgtatacgaaccaaagccgaattagataaccgaacgtccaggactactcttaatctttccgccacttatgatttgggctattactttgtttataatgagccttttcaagctcaagttcatgattgtccgtgagatgagaaactgacttgttggattcgaaaccctagctagtattggttaatacttaatacataaatgacctgcattgacatcatcatccaagaaaataaaaattgtatgcttgagatatttagttttcctagctaggttttctttattttagtaccgaatctttaggtgtgccacgttaatttagacccattttttcatacttaccaactgagtctagtttaatcatgactataatcgtataaaatgattcagtcgacgtcattgcgaacgtatataaaatcatccaaattgacgtcattccaaagaggtaagcatgcttatctaagagtccgagcatactaaacaagacgacattttatttgcactccaaatcaaattttgtattgcctaaagaaaaacaatcaaactcaagtttcttaaaattaatttcattcaaactaatcactttcaatatctcacatattattcatgccatttctatttgtctaaacatgatttaaaaaaaaaagtaaaatacaaagattactatgcaaaaactctataaaaaaaaattcaaatttcttatttatttgtgacatcaaattttcaaaataatttttttaattatcggttgatccggtcagtcgataaaaacataaactttcagcgaccgttaaaactttcctactaccgatttagagaaaatcttagcttgaaacgtaattgtaacctgccttcatgcaagtcgcaagatatgtcatcctaagttgtatatgttttctcaaaagatgtatttacttgagaaaatacgtttcaacgttgatggacaaccaattaagaatcaagcacctttcgtaatcaatttaggcttatcgtctaaggtatactgatttacgacagttgactagacttataaggaacaaaataatagaatagtttctaaacacttcacctaatcatagagactaagatggtaattcgtaaacgacaaagcctagtgacactgtccattgtaaaattccacatcatattagtattaaacatatacatgtagtttcctgaacacatgtagtatcaaacacacttcgtggcttcttcctcgaaacctgcggccgcgctatagttccggacttacccttaagataacttcgtatagcatacattatacgaagttatgggcccacgcgtgaagagcggttaccagagctggtcacctttgtccaccaagatggaactgtcttcggccagaatggccatctggattcagcaggcctagaaggccatttatcgctatcaactttgtatagaaaagttgggccgaattcgagctcggtacggccagaatggcccggaccgaagcttgcggccgcacactgatagtttaaactgaaggcgggaaacgacaatctgatcatgagcggagaattaagggagtcacgttatgacccccgccgatgacgcgggacaagccgttttacgtttggaactgacagaaccgcaacgttgaaggagccactcagccgcgggtttctggagtttaatgagctaagcacatacgtcagaaaccattattgcgcgttcaaaagtcgcctaaggtcactatcagctagcaaatatttcttgtcaaaaatgctccactgacgttccataaattcccctcggtatccaattagagtctcatattcactctcccgggggatctcgactctagaggatcgctcaggaaggccgctgagatagaggcatggcggccaatgcgggcggcggtggagcgggaggaggcagcggcagcggcagcgtggctgcgccggcggtgtgccgccccagcggctcgcggtggacgccgacgccggagcagatcaggatgctgaaggagctctactacggctgcggcatccggtcgcccagctcggagcagatccagcgcatcaccgccatgctgcggcagcacggcaagatcgagggcaagaacgtcttctactggttccagaaccacaaggcccgcgagcgccagaagcgccgcctcaccagcctcgacgtcaacgtgcccgccgccggcgcggccgacgccaccaccagccaactcggcgtcctctcgctgtcgtcgccgccgccttcaggcgcggcgcctccctcgcccaccctcggcttctacgccgccggcaatggcggcggatcggctgtgctgctggacacgagttccgactggggcagcagcggcgctgccatggccaccgagacatgcttcctgcaggactacatgggcgtgacggacacgggcagctcgtcgcagtggccacgcttctcgtcgtcggacacgataatggcggcggccgcggcgcgggcggcgacgacgcgggcgcccgagacgctccctctcttcccgacctgcggcgacgacggcggcagcggtagcagcagctacttgccgttctggggtgccgcgtccacaactgccggcgccacttcttccgttgcgatccagcagcaacaccagctgcaggagcagtacagcttttacagcaacagcaacagcacccagctggccggcaccggcaaccaagacgtatcggcaacagcagcagcagccgccgccctggagctgagcctcagctcatggtgctccccttaccctgctgcagggagtatgtgagagcaacgcgagctgccactgctcttcactgatgtctctggaatggaaggaggaggaagtgagcatagcgttggtgcgttgctgtcaagggcgaattcacatggttaacctagacttgtccatcttctggattggccaacttaattaatgtatgaaataaaaggatgcacacatagtgacatgctaatcactataatgtgggcatcaaagttgtgtgttatgtgtaattactagttatctgaataaaagagaaagagatcatccatatttcttatcctaaatgaatgtcacgtgtctttataattctttgatgaaccagatgcatttcattaaccaaatccatatacatataaatattaatcatatataattaatatcaattgggttagcaaaacaaatctagtctaggtgtgttttgcgaatgcggccgccaccgcggtggagctcgaattccggtccgggcctagaaggccagcttcaagtttgtacaaaaaagcaggctccggccagagttacccggaccgaagcttgcatgcctgcagtgcagcgtgacccggtcgtgcccctctctagagataatgagcattgcatgtctaagttataaaaaattaccacatattttttttgtcacacttgtttgaagtgcagtttatctatctttatacatatatttaaactttactctacgaataatataatctatagtactacaataatatcagtgttttagagaatcatataaatgaacagttagacatggtctaaaggacaattgagtattttgacaacaggactctacagttttatctttttagtgtgcatgtgttctcctttttttttgcaaatagcttcacctatataatacttcatccattttattagtacatccatttagggtttagggttaatggtttttatagactaatttttttagtacatctattttattctattttagcctctaaattaagaaaactaaaactctattttagtttttttatttaataatttagatataaaatagaataaaataaagtgactaaaaattaaacaaataccctttaagaaattaaaaaaactaaggaaacatttttcttgtttcgagtagataatgccagcctgttaaacgccgtcgacgagtctaacggacaccaaccagcgaaccagcagcgtcgcgtcgggccaagcgaagcagacggcacggcatctctgtcgctgcctctggacccctctcgagagttccgctccaccgttggacttgctccgctgtcggcatccagaaattgcgtggcggagcggcagacgtgagccggcacggcaggcggcctcctcctcctctcacggcaccggcagctacgggggattcctttcccaccgctccttcgctttcccttcctcgcccgccgtaataaatagacaccccctccacaccctctttccccaacctcgtgttgttcggagcgcacacacacacaaccagatctcccccaaatccacccgtcggcacctccgcttcaaggtacgccgctcgtcctcccccccccccctctctaccttctctagatcggcgttccggtccatgcatggttagggcccggtagttctacttctgttcatgtttgtgttagatccgtgtttgtgttagatccgtgctgctagcgttcgtacacggatgcgacctgtacgtcagacacgttctgattgctaacttgccagtgtttctctttggggaatcctgggatggctctagccgttccgcagacgggatcgatttcatgattttttttgtttcgttgcatagggtttggtttgcccttttcctttatttcaatatatgccgtgcacttgtttgtcgggtcatcttttcatgcttttttttgtcttggttgtgatgatgtggtctggttgggcggtcgttctagatcggagtagaattctgtttcaaactacctggtggatttattaattttggatctgtatgtgtgtgccatacatattcatagttacgaattgaagatgatggatggaaatatcgatctaggataggtatacatgttgatgcgggttttactgatgcatatacagagatgctttttgttcgcttggttgtgatgatgtggtgtggttgggcggtcgttcattcgttctagatcggagtagaatactgtttcaaactacctggtgtatttattaattttggaactgtatgtgtgtgtcatacatcttcatagttacgagtttaagatggatggaaatatcgatctaggataggtatacatgttgatgtgggttttactgatgcatatacatgatggcatatgcagcatctattcatatgctctaaccttgagtacctatctattataataaacaagtatgttttataattattttgatcttgatatacttggatgatggcatatgcagcagctatatgtggatttttttagccctgccttcatacgctatttatttgcttggtactgtttcttttgtcgatgctcaccctgttgtttggtgttacttctgcaggtcgactttaacttagcctaggatccatggagaggttgggcgtcggcgtcggcgtcggcgagctgccgccggggttccgcttccacccgacggacgaggagctgatcacctactacctcctctgcaaggccgtggacggcggcttctgcggcggccgcgccatcgcggagatcgacctgaacaagtgcgagccatgggagctcccggacaaggcgaagatgggggagaaggagtggtacttctactgcctccgcgaccgcaagtacccgacgggcctgcgcaccaaccgcgccacggcggccggctactggaaggccaccggcaaggaccgcgaggtccgcagcggccgcagcggcgcgctggtgggcatgaagaagacgctcgtcttctaccggggccgcgcccccaggggccagaagacgcgctgggtcatgcacgagtaccgcctcgacggcacctacgcctaccatttccttcccggctctacgagggacgagtgggtgatcgcgagggtgttccagaagccaggcgaggtcccatgcggccgcaagcaccgcctgggcggccccagcgccgccgccggcgagtcctgcttctcggactccaccacctcggcctccatcggcggcggcggcggaggaggagcgtccgcgtcgtctcgcccgctgctcaccgtcacggacacttcctcgccgtcgctgttcgtggccaacgcgaacgccgccgccagcaacaacaacggcaacccggtcaccgggcgagagctcgtgccctgcttctccactaccgccagtcccctggaagccgcggcgctcggcgtcgtcgggcacccgtacaacgcggccccgctgcgtctgggcttggacttcgaggcgccgtccccgggcttcgtcgtcccgaacctgcgttccctgcaagtgcaggacgacggcggcctgccgctgttcctctcggcagcagcaggcggcggcatgtcgtccgcgacgctgggaataatggggtcgctgggcgggtctctccactgcccgccccacgccggcatggatgtcgtcaaggtcgagggccgcgccgcgccgccgcagatggctgtcggccccggcctcctcgatggcgccttcgcctggggcttctagggtaccgttaacagatctactaactatctatactgtaataatgttgtatagccgccggatagctagctagtttagtcattcagcggcgatgggtaataataaagtgtcatccatccatcaccatgcgtggcaacgtgagcaatgacctgattgaacaaattgaaatgaaaagaagaaatatgttatatgtcaacgagatttcctcataatgccactgacgacgtgtgtccaagaaatgtatcagtgatacgtatattcacaatttttttatgacttatactcacaatttgtttttttactacttatactcacaatttgttgtgcgtaccataacaatttcgatcgaatatatatcagaaagttgacgaaagtaagctcactcaaaaagttaaatgggctgcggaagctgcgtcaggcccaagttttggctattctatccggtatccacgattttgatggctgagggacatatgttcgcttaagcttcggtccgggcctagaaggccgatctcccgggcacccagctttcttgtacaaagtggccgttaacggatcggccagaatggcccggaccgggttaccgaattcgagctcggtaccctggttcacaaactcaatacaacacacagtggagtagggtattacgctccggcggcccgaaccactctaaatccttgtgtcctcgtgtgctcttccaccattaatgactgtaattgcagggacacgaagagttgtagcgcttttgccaacaagatccgctatatgctagtagagtggaacctgcacagcaacaagcatccaataatctgagaataagaattatgtgtggtgatggttctcatctctgcaactcgccattttcgcgagagaaccaaatccaagttggtgaagatcatgatttgggctcatgggctggcatagtagctattacctttgcaattgtggttcgaatctatccgatattctccttttcagggagagctaatgcttatgcttattgggtattttggtttgacactgcttcacgcccaaaaaaaggcaactatgtctgagttggatatggcccaaaaaaaggcagctatgtctgagttggatatggaagtcttctttcgtttagggtgaagtaagaccaagctcatgagcttattatcttaggtcggaacaaattagttgataggcatggcacatttatcaaattataatgattttaacagaaaagcaacacctctttttcagcagcaccagctttgcaagctgcaattgacactccaagcatagtatttgctccaaactcagcctgcatttcgcacaatatcatatctatttccatttggataaaatatattttccagaaatatgggaacagaatcaagatacagaaaaaagttgtggtagtagtggtaagtggaaacacaagtacagtgaaaagatagcattatttctgaacagtcaaattaaccgaaataagtagtatcacatactgcccctaaattgactacacccaatgtaaagaattgcttgagcatattgagccatcagttgtttgtttgtgtaacggatttgacaatgcagagttcaggagcaaaaaaccgcaaaggagagaaagagggaaaggatctcctagtatcccaccttgtggcgcgccctgtcaagtgcatgatggcctggtcgatctgcgtctgctgctgcggttccatcccaacgagtgcctccgacaccttgtcgttgatcacccgcaccgcgtaggcgacccccctggcgaggaacttccgcctctcggaggccccggccgcgtcggcggcggcgccctcgagcgcgcccacgctagccgtagatgctcggtgcacggccttgttggtgtgcaactcgacctcaacggccggtgcgctacgcccgtcaaggatctggcgcgcccgcaccctcgtgatcacggtgggcgcctcccgcctcatgtggccgacgatgaaaagcgccgggttaggggccttggcgcgcaccgccgtattcagggcctcctcgctcttgcgcgagagcaggtgcttccccaggtactcctgcactgacaaggctgccacagcggtggaatttgtcctcacgacttcgccacgtcgtcctcacctccctggcttcccacgactccgccgtatcgaggtgctcggtgggtcgtcttaatccgaagtccgaactaggaagacgagacagagaggtctgaggaatgggcctcgtttgatgttgagctgaattatttttccagcataagcccaggtcttggtccatgaacaaaattactagaaacccagcccagtactacgatctaaaagagggactgccactggatagctctctctagcattctccacgctccaatacagcggcgtcgtgtctatccgggtctatccgcgaacacgtgagaactctccagaaactgctttctcctccacttcatctctctcgctttccctctataaaaagaccccttctaggaattgagggagacagcaagcaccaagcagcgatccgaagctcaatcaattcactcaaacctcttccccaaatcttcgattagatcttcgttgacaagaagactagaaccgaacctgacatgtccaacctgctcacggttcaccagaaccttccggctcttccagtggacgcgacgtccgatgaagtcaggaagaacctcatggacatgttccgcgacaggcaagcgttcagcgagcacacctggaagatgctgctctccgtctgccgctcctgggctgcatggtgcaagctgaacaacaggaagtggttccccgctgagcccgaggacgtgagggattaccttctgtacctgcaagcgcgaggtttgtttctgcttctacctttgatatatatataataattatcattaattagtagtaatataatatttcaaatatttttttcaaaataaaagaatgtagtatatagcaattgcttttctgtagtttataagtgtgtatattttaatttataacttttctaatatatgaccaaaacatggtgatgcctaggtctggcagtgaagaccatccagcaacaccttggacaactgaacatgcttcacaggcgctccggcctcccgcgccccagcgactcgaacgccgtgagcctcgtcatgcgccgcatcaggaaggaaaacgtcgatgccggcgaaagggcaaagcaggccctcgcgttcgagaggaccgatttcgaccaggtccgcagcctgatggagaacagcgacaggtgccaggacattaggaacctggcgttcctcggaattgcatacaacacgctcctcaggatcgcggaaattgcccgcattcgcgtgaaggacattagccgcaccgacggcggcaggatgcttatccacattggcaggaccaagacgctcgtttccaccgcaggcgtcgaaaaggccctcagcctcggagtgaccaagctcgtcgaacgctggatctccgtgtccggcgtcgcggacgacccaaacaactacctcttctgccgcgtccgcaagaacggggtggctgcccctagcgccaccagccaactcagcacgagggccttggaaggtattttcgaggccacccaccgcctgatctacggcgcgaaggatgacagcggtcaacgctacctcgcatggtccgggcactccgcccgcgttggagctgctagggacatggcccgcgccggtgtttccatccccgaaatcatgcaggcgggtggatggacgaacgtgaacattgtcatgaactacattcgcaaccttgacagcgagacgggcgcaatggttcgcctcctggaagatggtgactgaggtacccaacctagacttgtccatcttctggattggccaacttaattaatgtatgaaataaaaggatgcacacatagtgacatgctaatcactataatgtgggcatcaaagttgtgtgttatgtgtaattactagttatctgaataaaagagaaagagatcatccatatttcttatcctaaatgaatgtcacgtgtctttataattctttgatgaaccagatgcatttcattaaccaaatccatatacatataaatattaatcatatataattaatatcaattgggttagcaaaacaaatctagtctaggtgtgttttgcgatccgatatcgaattggccacggtaccagctgctgctgttctagggttcacaagtctgcctatttgtcttccccaatggagctatggttgtctggtctggtccttggtcgtgtcccgtttcattgtgtactatttacctgtaatgtgtatccttaagtctggtttgatggtgtctgaaacgttttgctgtggtagagcagcatggaagaactataatgaataagtgatccctaatcattgtgtccaaattttgcttctgctatacccttttgtgctgtttcttatgttttgcttaaaaatttgatctgacaaacaaatttgtctaaattatgctcttgttctgactgtgtactgtacacatttgtattgctaccggtttggcacatagttttctctttgattgcagatcaaacccttctgattgcagattgcttggctatggctgatgtgctcactgttcttctttagcttgtatattgctgatggtggcttggctacggctgaaaaagttgctgctgcgccgacttggcaactgttgctccagtaatgctttgtcctctcttcctagccgccgacttggcacttggcagctgttgctcctgtaatgcgttgttatctcttatctcttgagatgtactatgattttgaggctgtttgacttgtgccagattgccagtgctgatgctatattatctcaggtttttatgctagtatatgttttactgtgtgctgcctgtgtcgagttacgtaatctattgaaccgctatgcgtgttgatgccctgttgttgcttgccagattgatgcccctgttgcttgcagcttgcaagctgtagtgaaatcctaaaattccaaaccaaatctattctgaacttttgaagatctgtgatgtccggaagaaaagattcaaacagataaacgggactctccagaatctataaaataaatgatcgacaaacgctttgctttggtaggcttcaagcttggtcacccggtccgggcctagaaggccagcttcggccgccccgggcaactttattatacaaagttgatagataaatcagatatctggttcctaaggacccggcggaccgattaaactgattcggtccgacgcgttacctaataacttcgtatagcatacattatacgaagttattagctaactaactagtaagcttaagccatgggtcgacggatccgttaactagcgtggcatttggcaccgccgcacactatgcgagctaggagtgctagtttacagatgaaactatgaaaccaagaaaacacaattgtccgtagctagcgcgtggcgtcgtgtcaagcttcacacagtatcttcgttcttcactataaatcgcgcctgttgttcgtgagacccaccaccgtggataacagtcccctaataataagcgatcaacagcactgctgatggctgaacaccgaggcgccgccgcgcgtaaccatccgccggagcagcccgtcgtgccggcgaacgacgccttccccgaccgcgcccagcagctctgcctcgacgccgggcgcgcgctcgcgatgtgcggcgtgctcgtcgccgtccctcccgcattttacgcgtcgacgtcgcggacgacaccgcacttgccttcgtcggcttcgtcctctggatcatcggtgcgtggctgtgcctcctggcgctcacgcccttggctccacgggcggtgagggcgggcggggccgccgccagcaccttgctgatcaggtgcctgtccctttcatgaactactagcgcccgcgcccgcggccgccgggcacaagagaacacatcgatgttcgctgcgtacgtcagcaataaggcactctttgtcagtagtcgagtgcatatgttgggtgtttgccctgggagatttcaagtgttgtggccattatcccgcaggataaaaaatcggcggcttttggattgatacggaaaataacgatgtttcatgctcgtgttgtgtgtgtgacatcttgtcagccaagtttttaaccgttgctactccccctctgtgggctcagtgtgtggaccggaatacgtcgtacataggccgtagcctaagcccaatatgccgtttttcaggttggcctgtgtgacgacaagcgggtctcaaaagcccatcacgcaactggcctgcaattattggaggagagcgcgtcgagttggttccagaggctgcgtggtggggccggactctgcgacgacctctcgttcgcgtccgatttggttgccgtgagccgtgacgtaacgcctccttccgttcctccctatataagttccacccccgggtccggtttccccaagccccagtgacccccgatcccgatcgcgaaatctccgcacccgccggcaagggaccgaagcaagcctctctcccgaccgtcgcatcaaggtacgcgtccgctcgatctgtcctcttccttctcgatttgacttgctgtggtgcccgatcacgggatcagaatcgcaccagtgtagatttcgcatgttctaagatgtgttagtttccaggctaatccagttctcttgacgcccgatccgatcgagctccgtgtttatttcagcctaatcgtagtattcccctaaaatttcctcattagggggttcgcaagattgttggtcgacaggttcacttatgctcgatcgcttacttttagtcgattcatgctgcgtactattgttgccccccgtggttttatcttttctcgtgtgaaatccagtagatatagtagatatcgtagcattaggttttaattcaatcgattgattattgtatcatcaaaattgagaagttcgaatcatgcctatcatgctgcctcaaccgaaatcctgtatattgaagtttcaattcaattgattgatcattcattagattcaaccaaaatctagaaggttagatgacgcatgtcatgctgcctgcgtagtttacctttgatctgtttatgattaccttatcagtaggatatttgtgattttgggaagtagcactaactgattcatgctgacatgatgttccctttcagattatactgttgagtcctatctaattgatgctttgtatgctatatgaatacgtcatggtaaattagcagttaattagcatattagcaattgggcgtacctcatcaggattgctcttgtagatgtgtgtggtgatgtttcttgttcaattcatgttctgctttaaaagtatgtgttctctgtttgttaattaagattcatggttataatgatttggacctaattaatcagggttgcccttttagatgcgtggttacttgttgagttcatttttttcctgctatagttgtatgcgtttgttcattcatggttagatttgatttgtttcttctctattccatgccttccatatacttcaattgtagcttaacatgagatttctgtatatgcaggtcgaccgccggggatccacacgacaccatggcccagtccaagcacggcctgaccaaggagatgaccatgaagtaccgcatggagggctgcgtggacggccacaagttcgtgatcaccggcgagggcatcggctaccccttcaagggcaagcaggccatcaacctgtgcgtggtggagggcggccccttgcccttcgccgaggacatcttgtccgccgccttcatgtacggcaaccgcgtgttcaccgagtacccccaggacatcgtcgactacttcaagaactcctgccccgccggctacacctgggaccgctccttcctgttcgaggacggcgccgtgtgcatctgcaacgccgacatcaccgtgagcgtggaggagaactgcatgtaccacgagtccaagttctacggcgtgaacttccccgccgacggccccgtgatgaagaagatgaccgacaactgggagccctcctgcgagaagatcatccccgtgcccaagcagggcatcttgaagggcgacgtgagcatgtacctgctgctgaaggacggtggccgcttgcgctgccagttcgacaccgtgtacaaggccaagtccgtgccccgcaagatgcccgactggcacttcatccagcacaagctgacccgcgaggaccgcagcgacgccaagaaccagaagtggcacctgaccgagcacgccatcgcctccggctccgccttgccctccggactcagatctcgatagagtcaacctagacttgtccatcttctggattggccaacttaattaatgtatgaaataaaaggatgcacacatagtgacatgctaatcactataatgtgggcatcaaagttgtgtgttatgtgtaattactagttatctgaataaaagagaaagagatcatccatatttcttatcctaaatgaatgtcacgtgtctttataattctttgatgaaccagatgcatttcattaaccaaatccatatacatataaatattaatcatatataattaatatcaattgggttagcaaaacaaatctagtctaggtgtgttttgcgaattgcggcgcccttactttaacgcctctaaccaacacccctttatctttataaggaacaataaacagaatttgccccactgttctaaatcacctaataatatccccagctaaaaacaataaaggtttcctagaattaagacaagcatgactgttcctccaggagggtttggaacattgttgcagtcttgcagatacgggcgaagggtgagaaacagagcggagggctggaggtgacctcggtagtcgacgccggagttgagcttgacaacgacggggcggcccctgatggacttgaggaagtccgatggcgtcttcaccgtcccgccggcgcccgaggcgggcctgtcgctgccgccgccgccgctgctcatcttgcgcgctgtgcccccggcggtgtccctgtgttgcggatcgcgggtgggccaggtggatgcgagggcgacccgtttggactccggccggagccgccggatccctggtcggtgtcagtgccgtttactctgggccccacgtgtcagtaccgtctgtagatgacaacaacccgtcgtccacagtcatgtccaaaatatcctttcttcttttttttcgattcggatatctatcttccttttttttttccaaaaatcttcttgacgcaccagcgcgcacgtttgtggtaaacgccgacacgtcggtcccacgtcgatagaccccacccaccagtgagtagcgtgtacgtattcgggggtgacggacgtgtcgccgtcgtcttgctagtcccattcccatctgagccacacatctctgaacaaaaaaaaggagggaggcctccacgcacatccccctccgtgccacccgccccaaaccctcgcgccgcctccgagacagccgccgcaaccatggccaccgccgccgccgcgtctaccgcgctcactggcgccactaccgctgcgcccaaggcgaggcgccgggcgcacctcctggccacccgccgcgccctcgccgcgcccatcaggtgctcagcggcgtcacccgccatgccgatggctcccccggccaccccgctccggccgtggggccccaccgagccccgcaagggtgctgacatcctcgtcgagtccctcgagcgctgcggcgtccgcgacgtcttcgcctaccccggcggcgcgtccatggagatccaccaggcactcacccgctcccccgtcatcgccaaccacctcttccgccacgagcaaggggaggcctttgccgcctccggctacgcgcgctcctcgggccgcgtcggcgtctgcatcgccacctccggccccggcgccaccaacctagtctccgcgctcgccgacgcgctgctcgattccgtccccatggtcgccatcacgggacaggtggcgcgacgcatgattggcaccgacgccttccaggagacgcccatcgtcgaggtcacccgctccatcaccaagcacaactacctggtcctcgacgtcgacgacatcccccgcgtcgtgcaggaggctttcttcctcgcctcctctggtcgaccagggccggtgcttgtcgacatccccaaggacatccagcagcagatggcggtgcctgtctgggacaagcccatgagtctgcctgggtacattgcgcgccttcccaagccccctgcgactgagttgcttgagcaggtgctgcgtcttgttggtgaatcgcggcgccctgttctttatgtgggcggtggctgcgcagcatctggtgaggagttgcgacgctttgtggagctgactggaatcccggtcacaactactcttatgggcctcggcaacttccccagcgacgacccactgtctctgcgcatgctaggtatgcatgggacggtgtatgcaaattatgcagtggataaggccgatctgttgcttgcacttggtgtgcggtttgatgatcgcgtgacagggaagattgaggcttttgcaagcagggctaagattgtgcacgttgatattgatccggctgagattggcaagaacaagcagccacatgtgtccatctgtgcagatgttaagcttgctttgcagggcatgaatgctcttcttgaaggaagcacatcaaagaagagctttgactttggctcatggaacgatgagttggatcagcagaagagggaattcccccttgggtataaaacatctaatgaggagatccagccacaatatgctattcaggttcttgatgagctgacgaaaggcgaggccatcatcggcacaggtgttgggcagcaccagatgtgggcggcacagtactacacttacaagcggccaaggcagtggttgtcttcagctggtcttggggctatgggatttggtttgccggctgctgctggtgcttctgtggcaaacccaggtgtcactgttgttgacatcgatggagatggtagctttctcatgaacgttcaggagctagctatgatccgaattgagaacctcccagtgaaggtctttgtgctaaacaaccagcacctggggatggtggtgcagttggaggacaggttctataaggccaacagagcgcacacatacttgggaaacccagagaatgaaagtgagatatatccagatttcgtgacgatcgccaaagggttcaacattccagcggtccgtgtgacaaagaagaacgaagtccgcgcagcgataaagaagatgctcgagactccagggccgtacctcttggatataatcgtcccacaccaggagcatgtgttgcctatgatccctagtggtggggctttcaaggatatgatcctggatggtgatggcaggactgtgtactgactagctagtcagttaacagatctgccagatcctcggtgtacaaataacccgtcttatcctatgagacgggccggcgtcagtgtgttctggaggaatttttatgtcagagcctttttctttgtgtgcttgatgtagatgccaagggaagcttattggctgttgaagcttgatgcaaaataaattatggaactctgttttttgtttatctaataataactagcaaatatgcttccattgcattgaaactaacagccttttgtgtttccaagttttattttgtgacaatgtcatctatttcaattagttgtggaatcggaaacttgcaggactaacttggaaactccaatccctcagcatcctggactttttcctggtgtaatccatgtagatattattttaatcatcattttagttctggaggtttttccatctccggttttgctcccctttcttcaaaaaaaaaaaaaaaatgccgtaggcgccgcaacgcccacctgttgttcaaactcatgggcacgagtggctcgaagattttatacaacaattgctgtagtttcaccgttgctggtgaagaagcatttttttaaaaaaatatagtggtattcattttaattagtttagttgtgcagcgagcaaaatttggacatgctctgctcggaatctgatcgacctagacacagattagcagcagtagctttgtcatctgttccaagagttgcgatctgatagaagaaaaaaaaaccttcccttcaatgtaaaaccgaaactaacaagaaagaagcacagtgccgtttaggcaagtatggagtacgtattaagcatgtagaaggccatgcatgaaccactaacaagaaagaagcgcagtgccattcaggcaagcataagcatgtagattggcatgcatgaacaactaacagtagatcgtctctggtctgattagaagttttttgggaagccaagaaatcatgtacaactggttccatctcaaattccgtggcaaaaagaggcctaagcaacatacctcgagtagatcacattcaagcttggtcacccggtccgtcaatattctgattccgatgacttcgtaggttcctagctcaagccgctcgtgtccaagcgtcacttacgattagctaatgattacggcatctaggaccgactagtggcgcgccgactagctagctaaggtaccgagctcgaattcattccgattaatcgtggcctcttgctcttcaggatgaagagctatgtttaaacgtgcaagcgctactagacaattcagtacattaaaaacgtccgcaatgtgttattaagttgtctaagcgtcaatttgtttacaccacaatatatcctgcca

SEQ ID NO: 38 - DNA, 20558 bp, Artificial sequence
  PHP95068
gtttacccgccaatatatcctgtcaaacactgatagtttaaactgaaggcgggaaacgacaatctgatcatgagcggagaattaagggagtcacgttatgacccccgccgatgacgcgggacaagccgttttacgtttggaactgacagaaccgcaacgttgaaggagccactcagcaagctggtacgattgtaatacgactcactatagggcgaattgagcgctgtttaaacgctcttcaactggaagagcggttacgctgtttaaacgctcttcaactggaagagcggttactaccggttcactagctagctgctaatcgagctagttaccctatgaggtgacatgaagcgctcacggttactatgacggttagcttcacgactgttggtggcagtagcgtacgacttagctatagttccggacttacccttaagcgatttaaatctgcggttaccgaattcgagctcggtacctagtacccttgtacttttggtttcacctgcatagagaaaacccacaagaatatgacagtctgatttgtcagtctcattctcaagcaacatttctctatccgttactttcatggtgaataacacaatccatcatcaatactttgtgttactcagaaactgaaagttattccgagtcttgcatatctttggacctactcgtttttctaccattattgctgattgttaagctctcgctacttgaatcggcattgttggagtgggaaggttcaaaaaattggagttatgactagttgtctctttctatgtacgatggagaaaatgaataaacaactgagaaaatggctcttgtttagttgatgatgctcttaagctttccactggttgccatatatgatttgggcatttcactttgatcttaatgggccttgtaaagcccaagactcatgattatctttagttgatgctcttaattaggtgtgggcaaataattcaaactgtatgtacccgaccaaaaccaaagcaaaaataatcgaaccaaaccgaaaatttaaaaataaccgaatgaaaactaaatcctataactgaaagaactgaaaccgaatcaaaatatttaatgtaaccaaaaatatccgaaatataattatattgtcaaaaatattaataatttctagattaaataattaaaaatacttaaaaatttatataaaatagtaaaaatactcgaaaataaccacaaatattcaaaaacaaccgaaatatcccaaaatattcaaagcaaaataaccgaatggataccaaattttaaaaccgaaaaaactggaacaaaaccaaaatcgaaccaaaatttcaaaaatcgaataaatactaaactttagaacaaaaaaaaacgataaccgaatgtatacgaaccaaagccgaattagataaccgaacgtccaggactactcttaatctttccgccacttatgatttgggctattactttgtttataatgagccttttcaagctcaagttcatgattgtccgtgagatgagaaactgacttgttggattcgaaaccctagctagtattggttaatacttaatacataaatgacctgcattgacatcatcatccaagaaaataaaaattgtatgcttgagatatttagttttcctagctaggttttctttattttagtaccgaatctttaggtgtgccacgttaatttagacccattttttcatacttaccaactgagtctagtttaatcatgactataatcgtataaaatgattcagtcgacgtcattgcgaacgtatataaaatcatccaaattgacgtcattccaaagaggtaagcatgcttatctaagagtccgagcatactaaacaagacgacattttatttgcactccaaatcaaattttgtattgcctaaagaaaaacaatcaaactcaagtttcttaaaattaatttcattcaaactaatcactttcaatatctcacatattattcatgccatttctatttgtctaaacatgatttaaaaaaaaaagtaaaatacaaagattactatgcaaaaactctataaaaaaaaattcaaatttcttatttatttgtgacatcaaattttcaaaataatttttttaattatcggttgatccggtcagtcgataaaaacataaactttcagcgaccgttaaaactttcctactaccgatttagagaaaatcttagcttgaaacgtaattgtaacctgccttcatgcaagtcgcaagatatgtcatcctaagttgtatatgttttctcaaaagatgtatttacttgagaaaatacgtttcaacgttgatggacaaccaattaagaatcaagcacctttcgtaatcaatttaggcttatcgtctaaggtatactgatttacgacagttgactagacttataaggaacaaaataatagaatagtttctaaacacttcacctaatcatagagactaagatggtaattcgtaaacgacaaagcctagtgacactgtccattgtaaaattccacatcatattagtattaaacatatacatgtagtttcctgaacacatgtagtatcaaacacacttcgtggcttcttcctcgaaacctgcggccgcgctatagttccggacttacccttaagataacttcgtatagcatacattatacgaagttatgggcccacgcgtgaagagcggttaccagagctggtcacctttgtccaccaagatggaactgtcttcggccagaatggccatctggattcagcaggcctagaaggccatttatcgctatcaactttgtatagaaaagttgggccgaattcgagctcggtacggccagaatggcccggaccgaagcttgcggccgcacactgatagtttaaactgaaggcgggaaacgacaatctgatcatgagcggagaattaagggagtcacgttatgacccccgccgatgacgcgggacaagccgttttacgtttggaactgacagaaccgcaacgttgaaggagccactcagccgcgggtttctggagtttaatgagctaagcacatacgtcagaaaccattattgcgcgttcaaaagtcgcctaaggtcactatcagctagcaaatatttcttgtcaaaaatgctccactgacgttccataaattcccctcggtatccaattagagtctcatattcactctcccgggggatctcgactctagaggatcgctcaggaaggccgctgagatagaggcatggcggccaatgcgggcggcggtggagcgggaggaggcagcggcagcggcagcgtggctgcgccggcggtgtgccgccccagcggctcgcggtggacgccgacgccggagcagatcaggatgctgaaggagctctactacggctgcggcatccggtcgcccagctcggagcagatccagcgcatcaccgccatgctgcggcagcacggcaagatcgagggcaagaacgtcttctactggttccagaaccacaaggcccgcgagcgccagaagcgccgcctcaccagcctcgacgtcaacgtgcccgccgccggcgcggccgacgccaccaccagccaactcggcgtcctctcgctgtcgtcgccgccgccttcaggcgcggcgcctccctcgcccaccctcggcttctacgccgccggcaatggcggcggatcggctgtgctgctggacacgagttccgactggggcagcagcggcgctgccatggccaccgagacatgcttcctgcaggactacatgggcgtgacggacacgggcagctcgtcgcagtggccacgcttctcgtcgtcggacacgataatggcggcggccgcggcgcgggcggcgacgacgcgggcgcccgagacgctccctctcttcccgacctgcggcgacgacggcggcagcggtagcagcagctacttgccgttctggggtgccgcgtccacaactgccggcgccacttcttccgttgcgatccagcagcaacaccagctgcaggagcagtacagcttttacagcaacagcaacagcacccagctggccggcaccggcaaccaagacgtatcggcaacagcagcagcagccgccgccctggagctgagcctcagctcatggtgctccccttaccctgctgcagggagtatgtgagagcaacgcgagctgccactgctcttcactgatgtctctggaatggaaggaggaggaagtgagcatagcgttggtgcgttgctgtcaagggcgaattcacatggttaacctagacttgtccatcttctggattggccaacttaattaatgtatgaaataaaaggatgcacacatagtgacatgctaatcactataatgtgggcatcaaagttgtgtgttatgtgtaattactagttatctgaataaaagagaaagagatcatccatatttcttatcctaaatgaatgtcacgtgtctttataattctttgatgaaccagatgcatttcattaaccaaatccatatacatataaatattaatcatatataattaatatcaattgggttagcaaaacaaatctagtctaggtgtgttttgcgaatgcggccgccaccgcggtggagctcgaattccggtccgggcctagaaggccagcttcaagtttgtacaaaaaagcaggctccggccagagttacccggaccgaagcttgcatgcctgcagtgcagcgtgacccggtcgtgcccctctctagagataatgagcattgcatgtctaagttataaaaaattaccacatattttttttgtcacacttgtttgaagtgcagtttatctatctttatacatatatttaaactttactctacgaataatataatctatagtactacaataatatcagtgttttagagaatcatataaatgaacagttagacatggtctaaaggacaattgagtattttgacaacaggactctacagttttatctttttagtgtgcatgtgttctcctttttttttgcaaatagcttcacctatataatacttcatccattttattagtacatccatttagggtttagggttaatggtttttatagactaatttttttagtacatctattttattctattttagcctctaaattaagaaaactaaaactctattttagtttttttatttaataatttagatataaaatagaataaaataaagtgactaaaaattaaacaaataccctttaagaaattaaaaaaactaaggaaacatttttcttgtttcgagtagataatgccagcctgttaaacgccgtcgacgagtctaacggacaccaaccagcgaaccagcagcgtcgcgtcgggccaagcgaagcagacggcacggcatctctgtcgctgcctctggacccctctcgagagttccgctccaccgttggacttgctccgctgtcggcatccagaaattgcgtggcggagcggcagacgtgagccggcacggcaggcggcctcctcctcctctcacggcaccggcagctacgggggattcctttcccaccgctccttcgctttcccttcctcgcccgccgtaataaatagacaccccctccacaccctctttccccaacctcgtgttgttcggagcgcacacacacacaaccagatctcccccaaatccacccgtcggcacctccgcttcaaggtacgccgctcgtcctcccccccccccctctctaccttctctagatcggcgttccggtccatgcatggttagggcccggtagttctacttctgttcatgtttgtgttagatccgtgtttgtgttagatccgtgctgctagcgttcgtacacggatgcgacctgtacgtcagacacgttctgattgctaacttgccagtgtttctctttggggaatcctgggatggctctagccgttccgcagacgggatcgatttcatgattttttttgtttcgttgcatagggtttggtttgcccttttcctttatttcaatatatgccgtgcacttgtttgtcgggtcatcttttcatgcttttttttgtcttggttgtgatgatgtggtctggttgggcggtcgttctagatcggagtagaattctgtttcaaactacctggtggatttattaattttggatctgtatgtgtgtgccatacatattcatagttacgaattgaagatgatggatggaaatatcgatctaggataggtatacatgttgatgcgggttttactgatgcatatacagagatgctttttgttcgcttggttgtgatgatgtggtgtggttgggcggtcgttcattcgttctagatcggagtagaatactgtttcaaactacctggtgtatttattaattttggaactgtatgtgtgtgtcatacatcttcatagttacgagtttaagatggatggaaatatcgatctaggataggtatacatgttgatgtgggttttactgatgcatatacatgatggcatatgcagcatctattcatatgctctaaccttgagtacctatctattataataaacaagtatgttttataattattttgatcttgatatacttggatgatggcatatgcagcagctatatgtggatttttttagccctgccttcatacgctatttatttgcttggtactgtttcttttgtcgatgctcaccctgttgtttggtgttacttctgcaggtcgactttaacttagcctaggatccatggagcggttcggcctggacggcggcggtggcggtggcgagctgccgccggggttccggttccacccgacggacgaggagctcatcacctactacctcctccgcaaggccgtggacggcagcttctgcggccgcgccatcgcggagatcgacctgaacaagtgcgagccatgggagctcccggacaaggcgaagatgggggagaaggagtggtacttctacagcctccgcgaccgcaagtacccgacgggcctgcgcaccaaccgcgccacggtggccggctactggaaggccaccggcaaggaccgcgagatccgcagcggccgcaccggcgcgctggtgggcatgaagaagacgctcgtcttctaccgcggccgcgcccccaagggacagaagacgcactgggtcatgcacgagtaccgcctcgagggcgcctacgcctaccatttcctccccagctccacaaggcaggacgagtgggtgatcgcgagggtgttccagaagcccggcgaggtcccacctgcagcccgcaagcaccgcctcggcgcccttagcagcactaccggcaccgccgcgggcgattcctgcttctcggactctacctcggcctccatcggcggcgcgtcgtcgtcatccacgcctggcccgctgttcgcgtcggcggccgccgccgtggccaatgccggcgccgccgacggcgacaccagctcctactgcggcggcgctgccaaccatggcaacctggtcaccggccgtgagctcgtgccctgcttctccactgccaccattaacggccccctagttgccgccgcgctcggcatcgggcagccgtacaacgcagccccgctgccgttcgagcagcagccgccgcctccggccttcctgccgagcctgcgttcccttcaggacaacctccagcttccaccgttcctctcagcaggcggtctgggcggcggcggggctctccactggctccccgccggcggcatggaggtcaaggtcgagggccgctcggcgccaccgcagatggctgtcggccccggccagctcgatggcgctttcggctggagcttctagggtaccgttaacagatctactaactatctatactgtaataatgttgtatagccgccggatagctagctagtttagtcattcagcggcgatgggtaataataaagtgtcatccatccatcaccatgcgtggcaacgtgagcaatgacctgattgaacaaattgaaatgaaaagaagaaatatgttatatgtcaacgagatttcctcataatgccactgacgacgtgtgtccaagaaatgtatcagtgatacgtatattcacaatttttttatgacttatactcacaatttgtttttttactacttatactcacaatttgttgtgcgtaccataacaatttcgatcgaatatatatcagaaagttgacgaaagtaagctcactcaaaaagttaaatgggctgcggaagctgcgtcaggcccaagttttggctattctatccggtatccacgattttgatggctgagggacatatgttcgcttaagcttcggtccgggcctagaaggccgatctcccgggcacccagctttcttgtacaaagtggccgttaacggatcggccagaatggcccggaccgggttaccgaattcgagctcggtaccctggttcacaaactcaatacaacacacagtggagtagggtattacgctccggcggcccgaaccactctaaatccttgtgtcctcgtgtgctcttccaccattaatgactgtaattgcagggacacgaagagttgtagcgcttttgccaacaagatccgctatatgctagtagagtggaacctgcacagcaacaagcatccaataatctgagaataagaattatgtgtggtgatggttctcatctctgcaactcgccattttcgcgagagaaccaaatccaagttggtgaagatcatgatttgggctcatgggctggcatagtagctattacctttgcaattgtggttcgaatctatccgatattctccttttcagggagagctaatgcttatgcttattgggtattttggtttgacactgcttcacgcccaaaaaaaggcaactatgtctgagttggatatggcccaaaaaaaggcagctatgtctgagttggatatggaagtcttctttcgtttagggtgaagtaagaccaagctcatgagcttattatcttaggtcggaacaaattagttgataggcatggcacatttatcaaattataatgattttaacagaaaagcaacacctctttttcagcagcaccagctttgcaagctgcaattgacactccaagcatagtatttgctccaaactcagcctgcatttcgcacaatatcatatctatttccatttggataaaatatattttccagaaatatgggaacagaatcaagatacagaaaaaagttgtggtagtagtggtaagtggaaacacaagtacagtgaaaagatagcattatttctgaacagtcaaattaaccgaaataagtagtatcacatactgcccctaaattgactacacccaatgtaaagaattgcttgagcatattgagccatcagttgtttgtttgtgtaacggatttgacaatgcagagttcaggagcaaaaaaccgcaaaggagagaaagagggaaaggatctcctagtatcccaccttgtggcgcgccctgtcaagtgcatgatggcctggtcgatctgcgtctgctgctgcggttccatcccaacgagtgcctccgacaccttgtcgttgatcacccgcaccgcgtaggcgacccccctggcgaggaacttccgcctctcggaggccccggccgcgtcggcggcggcgccctcgagcgcgcccacgctagccgtagatgctcggtgcacggccttgttggtgtgcaactcgacctcaacggccggtgcgctacgcccgtcaaggatctggcgcgcccgcaccctcgtgatcacggtgggcgcctcccgcctcatgtggccgacgatgaaaagcgccgggttaggggccttggcgcgcaccgccgtattcagggcctcctcgctcttgcgcgagagcaggtgcttccccaggtactcctgcactgacaaggctgccacagcggtggaatttgtcctcacgacttcgccacgtcgtcctcacctccctggcttcccacgactccgccgtatcgaggtgctcggtgggtcgtcttaatccgaagtccgaactaggaagacgagacagagaggtctgaggaatgggcctcgtttgatgttgagctgaattatttttccagcataagcccaggtcttggtccatgaacaaaattactagaaacccagcccagtactacgatctaaaagagggactgccactggatagctctctctagcattctccacgctccaatacagcggcgtcgtgtctatccgggtctatccgcgaacacgtgagaactctccagaaactgctttctcctccacttcatctctctcgctttccctctataaaaagaccccttctaggaattgagggagacagcaagcaccaagcagcgatccgaagctcaatcaattcactcaaacctcttccccaaatcttcgattagatcttcgttgacaagaagactagaaccgaacctgacatgtccaacctgctcacggttcaccagaaccttccggctcttccagtggacgcgacgtccgatgaagtcaggaagaacctcatggacatgttccgcgacaggcaagcgttcagcgagcacacctggaagatgctgctctccgtctgccgctcctgggctgcatggtgcaagctgaacaacaggaagtggttccccgctgagcccgaggacgtgagggattaccttctgtacctgcaagcgcgaggtttgtttctgcttctacctttgatatatatataataattatcattaattagtagtaatataatatttcaaatatttttttcaaaataaaagaatgtagtatatagcaattgcttttctgtagtttataagtgtgtatattttaatttataacttttctaatatatgaccaaaacatggtgatgcctaggtctggcagtgaagaccatccagcaacaccttggacaactgaacatgcttcacaggcgctccggcctcccgcgccccagcgactcgaacgccgtgagcctcgtcatgcgccgcatcaggaaggaaaacgtcgatgccggcgaaagggcaaagcaggccctcgcgttcgagaggaccgatttcgaccaggtccgcagcctgatggagaacagcgacaggtgccaggacattaggaacctggcgttcctcggaattgcatacaacacgctcctcaggatcgcggaaattgcccgcattcgcgtgaaggacattagccgcaccgacggcggcaggatgcttatccacattggcaggaccaagacgctcgtttccaccgcaggcgtcgaaaaggccctcagcctcggagtgaccaagctcgtcgaacgctggatctccgtgtccggcgtcgcggacgacccaaacaactacctcttctgccgcgtccgcaagaacggggtggctgcccctagcgccaccagccaactcagcacgagggccttggaaggtattttcgaggccacccaccgcctgatctacggcgcgaaggatgacagcggtcaacgctacctcgcatggtccgggcactccgcccgcgttggagctgctagggacatggcccgcgccggtgtttccatccccgaaatcatgcaggcgggtggatggacgaacgtgaacattgtcatgaactacattcgcaaccttgacagcgagacgggcgcaatggttcgcctcctggaagatggtgactgaggtacccaacctagacttgtccatcttctggattggccaacttaattaatgtatgaaataaaaggatgcacacatagtgacatgctaatcactataatgtgggcatcaaagttgtgtgttatgtgtaattactagttatctgaataaaagagaaagagatcatccatatttcttatcctaaatgaatgtcacgtgtctttataattctttgatgaaccagatgcatttcattaaccaaatccatatacatataaatattaatcatatataattaatatcaattgggttagcaaaacaaatctagtctaggtgtgttttgcgatccgatatcgaattggccacggtaccagctgctgctgttctagggttcacaagtctgcctatttgtcttccccaatggagctatggttgtctggtctggtccttggtcgtgtcccgtttcattgtgtactatttacctgtaatgtgtatccttaagtctggtttgatggtgtctgaaacgttttgctgtggtagagcagcatggaagaactataatgaataagtgatccctaatcattgtgtccaaattttgcttctgctatacccttttgtgctgtttcttatgttttgcttaaaaatttgatctgacaaacaaatttgtctaaattatgctcttgttctgactgtgtactgtacacatttgtattgctaccggtttggcacatagttttctctttgattgcagatcaaacccttctgattgcagattgcttggctatggctgatgtgctcactgttcttctttagcttgtatattgctgatggtggcttggctacggctgaaaaagttgctgctgcgccgacttggcaactgttgctccagtaatgctttgtcctctcttcctagccgccgacttggcacttggcagctgttgctcctgtaatgcgttgttatctcttatctcttgagatgtactatgattttgaggctgtttgacttgtgccagattgccagtgctgatgctatattatctcaggtttttatgctagtatatgttttactgtgtgctgcctgtgtcgagttacgtaatctattgaaccgctatgcgtgttgatgccctgttgttgcttgccagattgatgcccctgttgcttgcagcttgcaagctgtagtgaaatcctaaaattccaaaccaaatctattctgaacttttgaagatctgtgatgtccggaagaaaagattcaaacagataaacgggactctccagaatctataaaataaatgatcgacaaacgctttgctttggtaggcttcaagcttggtcacccggtccgggcctagaaggccagcttcggccgccccgggcaactttattatacaaagttgatagataaatcagatatctggttcctaaggacccggcggaccgattaaactgattcggtccgacgcgttacctaataacttcgtatagcatacattatacgaagttattagctaactaactagtaagcttaagccatgggtcgacggatccgttaactagcgtggcatttggcaccgccgcacactatgcgagctaggagtgctagtttacagatgaaactatgaaaccaagaaaacacaattgtccgtagctagcgcgtggcgtcgtgtcaagcttcacacagtatcttcgttcttcactataaatcgcgcctgttgttcgtgagacccaccaccgtggataacagtcccctaataataagcgatcaacagcactgctgatggctgaacaccgaggcgccgccgcgcgtaaccatccgccggagcagcccgtcgtgccggcgaacgacgccttccccgaccgcgcccagcagctctgcctcgacgccgggcgcgcgctcgcgatgtgcggcgtgctcgtcgccgtccctcccgcattttacgcgtcgacgtcgcggacgacaccgcacttgccttcgtcggcttcgtcctctggatcatcggtgcgtggctgtgcctcctggcgctcacgcccttggctccacgggcggtgagggcgggcggggccgccgccagcaccttgctgatcaggtgcctgtccctttcatgaactactagcgcccgcgcccgcggccgccgggcacaagagaacacatcgatgttcgctgcgtacgtcagcaataaggcactctttgtcagtagtcgagtgcatatgttgggtgtttgccctgggagatttcaagtgttgtggccattatcccgcaggataaaaaatcggcggcttttggattgatacggaaaataacgatgtttcatgctcgtgttgtgtgtgtgacatcttgtcagccaagtttttaaccgttgctactccccctctgtgggctcagtgtgtggaccggaatacgtcgtacataggccgtagcctaagcccaatatgccgtttttcaggttggcctgtgtgacgacaagcgggtctcaaaagcccatcacgcaactggcctgcaattattggaggagagcgcgtcgagttggttccagaggctgcgtggtggggccggactctgcgacgacctctcgttcgcgtccgatttggttgccgtgagccgtgacgtaacgcctccttccgttcctccctatataagttccacccccgggtccggtttccccaagccccagtgacccccgatcccgatcgcgaaatctccgcacccgccggcaagggaccgaagcaagcctctctcccgaccgtcgcatcaaggtacgcgtccgctcgatctgtcctcttccttctcgatttgacttgctgtggtgcccgatcacgggatcagaatcgcaccagtgtagatttcgcatgttctaagatgtgttagtttccaggctaatccagttctcttgacgcccgatccgatcgagctccgtgtttatttcagcctaatcgtagtattcccctaaaatttcctcattagggggttcgcaagattgttggtcgacaggttcacttatgctcgatcgcttacttttagtcgattcatgctgcgtactattgttgccccccgtggttttatcttttctcgtgtgaaatccagtagatatagtagatatcgtagcattaggttttaattcaatcgattgattattgtatcatcaaaattgagaagttcgaatcatgcctatcatgctgcctcaaccgaaatcctgtatattgaagtttcaattcaattgattgatcattcattagattcaaccaaaatctagaaggttagatgacgcatgtcatgctgcctgcgtagtttacctttgatctgtttatgattaccttatcagtaggatatttgtgattttgggaagtagcactaactgattcatgctgacatgatgttccctttcagattatactgttgagtcctatctaattgatgctttgtatgctatatgaatacgtcatggtaaattagcagttaattagcatattagcaattgggcgtacctcatcaggattgctcttgtagatgtgtgtggtgatgtttcttgttcaattcatgttctgctttaaaagtatgtgttctctgtttgttaattaagattcatggttataatgatttggacctaattaatcagggttgcccttttagatgcgtggttacttgttgagttcatttttttcctgctatagttgtatgcgtttgttcattcatggttagatttgatttgtttcttctctattccatgccttccatatacttcaattgtagcttaacatgagatttctgtatatgcaggtcgaccgccggggatccacacgacaccatggcccagtccaagcacggcctgaccaaggagatgaccatgaagtaccgcatggagggctgcgtggacggccacaagttcgtgatcaccggcgagggcatcggctaccccttcaagggcaagcaggccatcaacctgtgcgtggtggagggcggccccttgcccttcgccgaggacatcttgtccgccgccttcatgtacggcaaccgcgtgttcaccgagtacccccaggacatcgtcgactacttcaagaactcctgccccgccggctacacctgggaccgctccttcctgttcgaggacggcgccgtgtgcatctgcaacgccgacatcaccgtgagcgtggaggagaactgcatgtaccacgagtccaagttctacggcgtgaacttccccgccgacggccccgtgatgaagaagatgaccgacaactgggagccctcctgcgagaagatcatccccgtgcccaagcagggcatcttgaagggcgacgtgagcatgtacctgctgctgaaggacggtggccgcttgcgctgccagttcgacaccgtgtacaaggccaagtccgtgccccgcaagatgcccgactggcacttcatccagcacaagctgacccgcgaggaccgcagcgacgccaagaaccagaagtggcacctgaccgagcacgccatcgcctccggctccgccttgccctccggactcagatctcgatagagtcaacctagacttgtccatcttctggattggccaacttaattaatgtatgaaataaaaggatgcacacatagtgacatgctaatcactataatgtgggcatcaaagttgtgtgttatgtgtaattactagttatctgaataaaagagaaagagatcatccatatttcttatcctaaatgaatgtcacgtgtctttataattctttgatgaaccagatgcatttcattaaccaaatccatatacatataaatattaatcatatataattaatatcaattgggttagcaaaacaaatctagtctaggtgtgttttgcgaattgcggcgcccttactttaacgcctctaaccaacacccctttatctttataaggaacaataaacagaatttgccccactgttctaaatcacctaataatatccccagctaaaaacaataaaggtttcctagaattaagacaagcatgactgttcctccaggagggtttggaacattgttgcagtcttgcagatacgggcgaagggtgagaaacagagcggagggctggaggtgacctcggtagtcgacgccggagttgagcttgacaacgacggggcggcccctgatggacttgaggaagtccgatggcgtcttcaccgtcccgccggcgcccgaggcgggcctgtcgctgccgccgccgccgctgctcatcttgcgcgctgtgcccccggcggtgtccctgtgttgcggatcgcgggtgggccaggtggatgcgagggcgacccgtttggactccggccggagccgccggatccctggtcggtgtcagtgccgtttactctgggccccacgtgtcagtaccgtctgtagatgacaacaacccgtcgtccacagtcatgtccaaaatatcctttcttcttttttttcgattcggatatctatcttccttttttttttccaaaaatcttcttgacgcaccagcgcgcacgtttgtggtaaacgccgacacgtcggtcccacgtcgatagaccccacccaccagtgagtagcgtgtacgtattcgggggtgacggacgtgtcgccgtcgtcttgctagtcccattcccatctgagccacacatctctgaacaaaaaaaaggagggaggcctccacgcacatccccctccgtgccacccgccccaaaccctcgcgccgcctccgagacagccgccgcaaccatggccaccgccgccgccgcgtctaccgcgctcactggcgccactaccgctgcgcccaaggcgaggcgccgggcgcacctcctggccacccgccgcgccctcgccgcgcccatcaggtgctcagcggcgtcacccgccatgccgatggctcccccggccaccccgctccggccgtggggccccaccgagccccgcaagggtgctgacatcctcgtcgagtccctcgagcgctgcggcgtccgcgacgtcttcgcctaccccggcggcgcgtccatggagatccaccaggcactcacccgctcccccgtcatcgccaaccacctcttccgccacgagcaaggggaggcctttgccgcctccggctacgcgcgctcctcgggccgcgtcggcgtctgcatcgccacctccggccccggcgccaccaacctagtctccgcgctcgccgacgcgctgctcgattccgtccccatggtcgccatcacgggacaggtggcgcgacgcatgattggcaccgacgccttccaggagacgcccatcgtcgaggtcacccgctccatcaccaagcacaactacctggtcctcgacgtcgacgacatcccccgcgtcgtgcaggaggctttcttcctcgcctcctctggtcgaccagggccggtgcttgtcgacatccccaaggacatccagcagcagatggcggtgcctgtctgggacaagcccatgagtctgcctgggtacattgcgcgccttcccaagccccctgcgactgagttgcttgagcaggtgctgcgtcttgttggtgaatcgcggcgccctgttctttatgtgggcggtggctgcgcagcatctggtgaggagttgcgacgctttgtggagctgactggaatcccggtcacaactactcttatgggcctcggcaacttccccagcgacgacccactgtctctgcgcatgctaggtatgcatgggacggtgtatgcaaattatgcagtggataaggccgatctgttgcttgcacttggtgtgcggtttgatgatcgcgtgacagggaagattgaggcttttgcaagcagggctaagattgtgcacgttgatattgatccggctgagattggcaagaacaagcagccacatgtgtccatctgtgcagatgttaagcttgctttgcagggcatgaatgctcttcttgaaggaagcacatcaaagaagagctttgactttggctcatggaacgatgagttggatcagcagaagagggaattcccccttgggtataaaacatctaatgaggagatccagccacaatatgctattcaggttcttgatgagctgacgaaaggcgaggccatcatcggcacaggtgttgggcagcaccagatgtgggcggcacagtactacacttacaagcggccaaggcagtggttgtcttcagctggtcttggggctatgggatttggtttgccggctgctgctggtgcttctgtggcaaacccaggtgtcactgttgttgacatcgatggagatggtagctttctcatgaacgttcaggagctagctatgatccgaattgagaacctcccagtgaaggtctttgtgctaaacaaccagcacctggggatggtggtgcagttggaggacaggttctataaggccaacagagcgcacacatacttgggaaacccagagaatgaaagtgagatatatccagatttcgtgacgatcgccaaagggttcaacattccagcggtccgtgtgacaaagaagaacgaagtccgcgcagcgataaagaagatgctcgagactccagggccgtacctcttggatataatcgtcccacaccaggagcatgtgttgcctatgatccctagtggtggggctttcaaggatatgatcctggatggtgatggcaggactgtgtactgactagctagtcagttaacagatctgccagatcctcggtgtacaaataacccgtcttatcctatgagacgggccggcgtcagtgtgttctggaggaatttttatgtcagagcctttttctttgtgtgcttgatgtagatgccaagggaagcttattggctgttgaagcttgatgcaaaataaattatggaactctgttttttgtttatctaataataactagcaaatatgcttccattgcattgaaactaacagccttttgtgtttccaagttttattttgtgacaatgtcatctatttcaattagttgtggaatcggaaacttgcaggactaacttggaaactccaatccctcagcatcctggactttttcctggtgtaatccatgtagatattattttaatcatcattttagttctggaggtttttccatctccggttttgctcccctttcttcaaaaaaaaaaaaaaaatgccgtaggcgccgcaacgcccacctgttgttcaaactcatgggcacgagtggctcgaagattttatacaacaattgctgtagtttcaccgttgctggtgaagaagcatttttttaaaaaaatatagtggtattcattttaattagtttagttgtgcagcgagcaaaatttggacatgctctgctcggaatctgatcgacctagacacagattagcagcagtagctttgtcatctgttccaagagttgcgatctgatagaagaaaaaaaaaccttcccttcaatgtaaaaccgaaactaacaagaaagaagcacagtgccgtttaggcaagtatggagtacgtattaagcatgtagaaggccatgcatgaaccactaacaagaaagaagcgcagtgccattcaggcaagcataagcatgtagattggcatgcatgaacaactaacagtagatcgtctctggtctgattagaagttttttgggaagccaagaaatcatgtacaactggttccatctcaaattccgtggcaaaaagaggcctaagcaacatacctcgagtagatcacattcaagcttggtcacccggtccgtcaatattctgattccgatgacttcgtaggttcctagctcaagccgctcgtgtccaagcgtcacttacgattagctaatgattacggcatctaggaccgactagtggcgcgccgactagctagctaaggtaccgagctcgaattcattccgattaatcgtggcctcttgctcttcaggatgaagagctatgtttaaacgtgcaagcgctactagacaattcagtacattaaaaacgtccgcaatgtgttattaagttgtctaagcgtcaatttgtttacaccacaatatatcctgcca

SEQ ID NO: 39 - DNA, 20746 bp, Artificial sequence
  PHP95069
gtttacccgccaatatatcctgtcaaacactgatagtttaaactgaaggcgggaaacgacaatctgatcatgagcggagaattaagggagtcacgttatgacccccgccgatgacgcgggacaagccgttttacgtttggaactgacagaaccgcaacgttgaaggagccactcagcaagctggtacgattgtaatacgactcactatagggcgaattgagcgctgtttaaacgctcttcaactggaagagcggttacgctgtttaaacgctcttcaactggaagagcggttactaccggttcactagctagctgctaatcgagctagttaccctatgaggtgacatgaagcgctcacggttactatgacggttagcttcacgactgttggtggcagtagcgtacgacttagctatagttccggacttacccttaagcgatttaaatctgcggttaccgaattcgagctcggtacctagtacccttgtacttttggtttcacctgcatagagaaaacccacaagaatatgacagtctgatttgtcagtctcattctcaagcaacatttctctatccgttactttcatggtgaataacacaatccatcatcaatactttgtgttactcagaaactgaaagttattccgagtcttgcatatctttggacctactcgtttttctaccattattgctgattgttaagctctcgctacttgaatcggcattgttggagtgggaaggttcaaaaaattggagttatgactagttgtctctttctatgtacgatggagaaaatgaataaacaactgagaaaatggctcttgtttagttgatgatgctcttaagctttccactggttgccatatatgatttgggcatttcactttgatcttaatgggccttgtaaagcccaagactcatgattatctttagttgatgctcttaattaggtgtgggcaaataattcaaactgtatgtacccgaccaaaaccaaagcaaaaataatcgaaccaaaccgaaaatttaaaaataaccgaatgaaaactaaatcctataactgaaagaactgaaaccgaatcaaaatatttaatgtaaccaaaaatatccgaaatataattatattgtcaaaaatattaataatttctagattaaataattaaaaatacttaaaaatttatataaaatagtaaaaatactcgaaaataaccacaaatattcaaaaacaaccgaaatatcccaaaatattcaaagcaaaataaccgaatggataccaaattttaaaaccgaaaaaactggaacaaaaccaaaatcgaaccaaaatttcaaaaatcgaataaatactaaactttagaacaaaaaaaaacgataaccgaatgtatacgaaccaaagccgaattagataaccgaacgtccaggactactcttaatctttccgccacttatgatttgggctattactttgtttataatgagccttttcaagctcaagttcatgattgtccgtgagatgagaaactgacttgttggattcgaaaccctagctagtattggttaatacttaatacataaatgacctgcattgacatcatcatccaagaaaataaaaattgtatgcttgagatatttagttttcctagctaggttttctttattttagtaccgaatctttaggtgtgccacgttaatttagacccattttttcatacttaccaactgagtctagtttaatcatgactataatcgtataaaatgattcagtcgacgtcattgcgaacgtatataaaatcatccaaattgacgtcattccaaagaggtaagcatgcttatctaagagtccgagcatactaaacaagacgacattttatttgcactccaaatcaaattttgtattgcctaaagaaaaacaatcaaactcaagtttcttaaaattaatttcattcaaactaatcactttcaatatctcacatattattcatgccatttctatttgtctaaacatgatttaaaaaaaaaagtaaaatacaaagattactatgcaaaaactctataaaaaaaaattcaaatttcttatttatttgtgacatcaaattttcaaaataatttttttaattatcggttgatccggtcagtcgataaaaacataaactttcagcgaccgttaaaactttcctactaccgatttagagaaaatcttagcttgaaacgtaattgtaacctgccttcatgcaagtcgcaagatatgtcatcctaagttgtatatgttttctcaaaagatgtatttacttgagaaaatacgtttcaacgttgatggacaaccaattaagaatcaagcacctttcgtaatcaatttaggcttatcgtctaaggtatactgatttacgacagttgactagacttataaggaacaaaataatagaatagtttctaaacacttcacctaatcatagagactaagatggtaattcgtaaacgacaaagcctagtgacactgtccattgtaaaattccacatcatattagtattaaacatatacatgtagtttcctgaacacatgtagtatcaaacacacttcgtggcttcttcctcgaaacctgcggccgcgctatagttccggacttacccttaagataacttcgtatagcatacattatacgaagttatgggcccacgcgtgaagagcggttaccagagctggtcacctttgtccaccaagatggaactgtcttcggccagaatggccatctggattcagcaggcctagaaggccatttatcgctatcaactttgtatagaaaagttgggccgaattcgagctcggtacggccagaatggcccggaccgaagcttgcggccgcacactgatagtttaaactgaaggcgggaaacgacaatctgatcatgagcggagaattaagggagtcacgttatgacccccgccgatgacgcgggacaagccgttttacgtttggaactgacagaaccgcaacgttgaaggagccactcagccgcgggtttctggagtttaatgagctaagcacatacgtcagaaaccattattgcgcgttcaaaagtcgcctaaggtcactatcagctagcaaatatttcttgtcaaaaatgctccactgacgttccataaattcccctcggtatccaattagagtctcatattcactctcccgggggatctcgactctagaggatcgctcaggaaggccgctgagatagaggcatggcggccaatgcgggcggcggtggagcgggaggaggcagcggcagcggcagcgtggctgcgccggcggtgtgccgccccagcggctcgcggtggacgccgacgccggagcagatcaggatgctgaaggagctctactacggctgcggcatccggtcgcccagctcggagcagatccagcgcatcaccgccatgctgcggcagcacggcaagatcgagggcaagaacgtcttctactggttccagaaccacaaggcccgcgagcgccagaagcgccgcctcaccagcctcgacgtcaacgtgcccgccgccggcgcggccgacgccaccaccagccaactcggcgtcctctcgctgtcgtcgccgccgccttcaggcgcggcgcctccctcgcccaccctcggcttctacgccgccggcaatggcggcggatcggctgtgctgctggacacgagttccgactggggcagcagcggcgctgccatggccaccgagacatgcttcctgcaggactacatgggcgtgacggacacgggcagctcgtcgcagtggccacgcttctcgtcgtcggacacgataatggcggcggccgcggcgcgggcggcgacgacgcgggcgcccgagacgctccctctcttcccgacctgcggcgacgacggcggcagcggtagcagcagctacttgccgttctggggtgccgcgtccacaactgccggcgccacttcttccgttgcgatccagcagcaacaccagctgcaggagcagtacagcttttacagcaacagcaacagcacccagctggccggcaccggcaaccaagacgtatcggcaacagcagcagcagccgccgccctggagctgagcctcagctcatggtgctccccttaccctgctgcagggagtatgtgagagcaacgcgagctgccactgctcttcactgatgtctctggaatggaaggaggaggaagtgagcatagcgttggtgcgttgctgtcaagggcgaattcacatggttaacctagacttgtccatcttctggattggccaacttaattaatgtatgaaataaaaggatgcacacatagtgacatgctaatcactataatgtgggcatcaaagttgtgtgttatgtgtaattactagttatctgaataaaagagaaagagatcatccatatttcttatcctaaatgaatgtcacgtgtctttataattctttgatgaaccagatgcatttcattaaccaaatccatatacatataaatattaatcatatataattaatatcaattgggttagcaaaacaaatctagtctaggtgtgttttgcgaatgcggccgccaccgcggtggagctcgaattccggtccgggcctagaaggccagcttcaagtttgtacaaaaaagcaggctccggccagagttacccggaccgaagcttgcatgcctgcagtgcagcgtgacccggtcgtgcccctctctagagataatgagcattgcatgtctaagttataaaaaattaccacatattttttttgtcacacttgtttgaagtgcagtttatctatctttatacatatatttaaactttactctacgaataatataatctatagtactacaataatatcagtgttttagagaatcatataaatgaacagttagacatggtctaaaggacaattgagtattttgacaacaggactctacagttttatctttttagtgtgcatgtgttctcctttttttttgcaaatagcttcacctatataatacttcatccattttattagtacatccatttagggtttagggttaatggtttttatagactaatttttttagtacatctattttattctattttagcctctaaattaagaaaactaaaactctattttagtttttttatttaataatttagatataaaatagaataaaataaagtgactaaaaattaaacaaataccctttaagaaattaaaaaaactaaggaaacatttttcttgtttcgagtagataatgccagcctgttaaacgccgtcgacgagtctaacggacaccaaccagcgaaccagcagcgtcgcgtcgggccaagcgaagcagacggcacggcatctctgtcgctgcctctggacccctctcgagagttccgctccaccgttggacttgctccgctgtcggcatccagaaattgcgtggcggagcggcagacgtgagccggcacggcaggcggcctcctcctcctctcacggcaccggcagctacgggggattcctttcccaccgctccttcgctttcccttcctcgcccgccgtaataaatagacaccccctccacaccctctttccccaacctcgtgttgttcggagcgcacacacacacaaccagatctcccccaaatccacccgtcggcacctccgcttcaaggtacgccgctcgtcctcccccccccccctctctaccttctctagatcggcgttccggtccatgcatggttagggcccggtagttctacttctgttcatgtttgtgttagatccgtgtttgtgttagatccgtgctgctagcgttcgtacacggatgcgacctgtacgtcagacacgttctgattgctaacttgccagtgtttctctttggggaatcctgggatggctctagccgttccgcagacgggatcgatttcatgattttttttgtttcgttgcatagggtttggtttgcccttttcctttatttcaatatatgccgtgcacttgtttgtcgggtcatcttttcatgcttttttttgtcttggttgtgatgatgtggtctggttgggcggtcgttctagatcggagtagaattctgtttcaaactacctggtggatttattaattttggatctgtatgtgtgtgccatacatattcatagttacgaattgaagatgatggatggaaatatcgatctaggataggtatacatgttgatgcgggttttactgatgcatatacagagatgctttttgttcgcttggttgtgatgatgtggtgtggttgggcggtcgttcattcgttctagatcggagtagaatactgtttcaaactacctggtgtatttattaattttggaactgtatgtgtgtgtcatacatcttcatagttacgagtttaagatggatggaaatatcgatctaggataggtatacatgttgatgtgggttttactgatgcatatacatgatggcatatgcagcatctattcatatgctctaaccttgagtacctatctattataataaacaagtatgttttataattattttgatcttgatatacttggatgatggcatatgcagcagctatatgtggatttttttagccctgccttcatacgctatttatttgcttggtactgtttcttttgtcgatgctcaccctgttgtttggtgttacttctgcaggtcgactttaacttagcctaggatggtcttatggaggacaggaggagcatggtggtgctacctagcaagagctccccactataaagcgcccccacacaccataccacagctcagagcttcttctcatcatctggtagaaagaaagagtgagagtgaggttggcaagggtatagggttcttggtcgatcaaatacctttcccctcttggattctcatcttcctgcttcgttctcaccagatcgatctcaccacgtgcctgcgtagcaagccactctgtatgcaccatcaccaccaggaccaggccatgggcgacgcgctgtgggacctgctcggggaggagatggcagcggcgggcggggagcacgggctgcccccggggtttcggttccaccccaccgacgaggagctggtcaccttctacctcgccgccaaggtgttcaacggcgcctgctgcggcatcgacatcgccgaggtggacctcaaccggtgcgagccgtgggagctccccgacgcggcgcgcatgggggagcgcgagtggtacttcttcagcctccgcgaccgcaagtaccccacgggcctccgtaccaaccgcgccaccggcgccggatactggaaggccaccgggaaggaccgcgaggtgctcaacgccgccaccggcgcgctcctcggcatgaagaagacgctcgtcttctacaagggccgggcgccgcgcggcgagaagaccaagtgggtcctgcacgagtaccgcctcgacggcgacttcgccgccgctcgccgcccctgcaaggaggaatgggtcatctgcaggatactgcacaaggcaggcgaccagtatagcaagctgatgatggtgaagagcccctactacctgcccatggcgatggacccttccagcttctgcttccaggaggacccaaccgggcatcccctcccgaaccctagcggctgcacccccttccaccacggccacccccaccatagcatgcagccgccgcctccattgccgccgagcaaccatgctggcaaggccgtcttcaccggagcagcagcagcctgctgcatgcaacaagagccggcagacggcagcaacagcgccgtgctgcccatgccgccgttccctcccttcacccccatcgtcgccggcaagccggcggccccggcgccgccgccccaggttgtcaacgccggtccacaggagccaccgccacctacctggctggaggcctacctgcagcacactggtgggatcctttatgagatgggtccaactgcagcgcccaggggcgcgtgaggtaccgttaacagatctactaactatctatactgtaataatgttgtatagccgccggatagctagctagtttagtcattcagcggcgatgggtaataataaagtgtcatccatccatcaccatgcgtggcaacgtgagcaatgacctgattgaacaaattgaaatgaaaagaagaaatatgttatatgtcaacgagatttcctcataatgccactgacgacgtgtgtccaagaaatgtatcagtgatacgtatattcacaatttttttatgacttatactcacaatttgtttttttactacttatactcacaatttgttgtgcgtaccataacaatttcgatcgaatatatatcagaaagttgacgaaagtaagctcactcaaaaagttaaatgggctgcggaagctgcgtcaggcccaagttttggctattctatccggtatccacgattttgatggctgagggacatatgttcgcttaagcttcggtccgggcctagaaggccgatctcccgggcacccagctttcttgtacaaagtggccgttaacggatcggccagaatggcccggaccgggttaccgaattcgagctcggtaccctggttcacaaactcaatacaacacacagtggagtagggtattacgctccggcggcccgaaccactctaaatccttgtgtcctcgtgtgctcttccaccattaatgactgtaattgcagggacacgaagagttgtagcgcttttgccaacaagatccgctatatgctagtagagtggaacctgcacagcaacaagcatccaataatctgagaataagaattatgtgtggtgatggttctcatctctgcaactcgccattttcgcgagagaaccaaatccaagttggtgaagatcatgatttgggctcatgggctggcatagtagctattacctttgcaattgtggttcgaatctatccgatattctccttttcagggagagctaatgcttatgcttattgggtattttggtttgacactgcttcacgcccaaaaaaaggcaactatgtctgagttggatatggcccaaaaaaaggcagctatgtctgagttggatatggaagtcttctttcgtttagggtgaagtaagaccaagctcatgagcttattatcttaggtcggaacaaattagttgataggcatggcacatttatcaaattataatgattttaacagaaaagcaacacctctttttcagcagcaccagctttgcaagctgcaattgacactccaagcatagtatttgctccaaactcagcctgcatttcgcacaatatcatatctatttccatttggataaaatatattttccagaaatatgggaacagaatcaagatacagaaaaaagttgtggtagtagtggtaagtggaaacacaagtacagtgaaaagatagcattatttctgaacagtcaaattaaccgaaataagtagtatcacatactgcccctaaattgactacacccaatgtaaagaattgcttgagcatattgagccatcagttgtttgtttgtgtaacggatttgacaatgcagagttcaggagcaaaaaaccgcaaaggagagaaagagggaaaggatctcctagtatcccaccttgtggcgcgccctgtcaagtgcatgatggcctggtcgatctgcgtctgctgctgcggttccatcccaacgagtgcctccgacaccttgtcgttgatcacccgcaccgcgtaggcgacccccctggcgaggaacttccgcctctcggaggccccggccgcgtcggcggcggcgccctcgagcgcgcccacgctagccgtagatgctcggtgcacggccttgttggtgtgcaactcgacctcaacggccggtgcgctacgcccgtcaaggatctggcgcgcccgcaccctcgtgatcacggtgggcgcctcccgcctcatgtggccgacgatgaaaagcgccgggttaggggccttggcgcgcaccgccgtattcagggcctcctcgctcttgcgcgagagcaggtgcttccccaggtactcctgcactgacaaggctgccacagcggtggaatttgtcctcacgacttcgccacgtcgtcctcacctccctggcttcccacgactccgccgtatcgaggtgctcggtgggtcgtcttaatccgaagtccgaactaggaagacgagacagagaggtctgaggaatgggcctcgtttgatgttgagctgaattatttttccagcataagcccaggtcttggtccatgaacaaaattactagaaacccagcccagtactacgatctaaaagagggactgccactggatagctctctctagcattctccacgctccaatacagcggcgtcgtgtctatccgggtctatccgcgaacacgtgagaactctccagaaactgctttctcctccacttcatctctctcgctttccctctataaaaagaccccttctaggaattgagggagacagcaagcaccaagcagcgatccgaagctcaatcaattcactcaaacctcttccccaaatcttcgattagatcttcgttgacaagaagactagaaccgaacctgacatgtccaacctgctcacggttcaccagaaccttccggctcttccagtggacgcgacgtccgatgaagtcaggaagaacctcatggacatgttccgcgacaggcaagcgttcagcgagcacacctggaagatgctgctctccgtctgccgctcctgggctgcatggtgcaagctgaacaacaggaagtggttccccgctgagcccgaggacgtgagggattaccttctgtacctgcaagcgcgaggtttgtttctgcttctacctttgatatatatataataattatcattaattagtagtaatataatatttcaaatatttttttcaaaataaaagaatgtagtatatagcaattgcttttctgtagtttataagtgtgtatattttaatttataacttttctaatatatgaccaaaacatggtgatgcctaggtctggcagtgaagaccatccagcaacaccttggacaactgaacatgcttcacaggcgctccggcctcccgcgccccagcgactcgaacgccgtgagcctcgtcatgcgccgcatcaggaaggaaaacgtcgatgccggcgaaagggcaaagcaggccctcgcgttcgagaggaccgatttcgaccaggtccgcagcctgatggagaacagcgacaggtgccaggacattaggaacctggcgttcctcggaattgcatacaacacgctcctcaggatcgcggaaattgcccgcattcgcgtgaaggacattagccgcaccgacggcggcaggatgcttatccacattggcaggaccaagacgctcgtttccaccgcaggcgtcgaaaaggccctcagcctcggagtgaccaagctcgtcgaacgctggatctccgtgtccggcgtcgcggacgacccaaacaactacctcttctgccgcgtccgcaagaacggggtggctgcccctagcgccaccagccaactcagcacgagggccttggaaggtattttcgaggccacccaccgcctgatctacggcgcgaaggatgacagcggtcaacgctacctcgcatggtccgggcactccgcccgcgttggagctgctagggacatggcccgcgccggtgtttccatccccgaaatcatgcaggcgggtggatggacgaacgtgaacattgtcatgaactacattcgcaaccttgacagcgagacgggcgcaatggttcgcctcctggaagatggtgactgaggtacccaacctagacttgtccatcttctggattggccaacttaattaatgtatgaaataaaaggatgcacacatagtgacatgctaatcactataatgtgggcatcaaagttgtgtgttatgtgtaattactagttatctgaataaaagagaaagagatcatccatatttcttatcctaaatgaatgtcacgtgtctttataattctttgatgaaccagatgcatttcattaaccaaatccatatacatataaatattaatcatatataattaatatcaattgggttagcaaaacaaatctagtctaggtgtgttttgcgatccgatatcgaattggccacggtaccagctgctgctgttctagggttcacaagtctgcctatttgtcttccccaatggagctatggttgtctggtctggtccttggtcgtgtcccgtttcattgtgtactatttacctgtaatgtgtatccttaagtctggtttgatggtgtctgaaacgttttgctgtggtagagcagcatggaagaactataatgaataagtgatccctaatcattgtgtccaaattttgcttctgctatacccttttgtgctgtttcttatgttttgcttaaaaatttgatctgacaaacaaatttgtctaaattatgctcttgttctgactgtgtactgtacacatttgtattgctaccggtttggcacatagttttctctttgattgcagatcaaacccttctgattgcagattgcttggctatggctgatgtgctcactgttcttctttagcttgtatattgctgatggtggcttggctacggctgaaaaagttgctgctgcgccgacttggcaactgttgctccagtaatgctttgtcctctcttcctagccgccgacttggcacttggcagctgttgctcctgtaatgcgttgttatctcttatctcttgagatgtactatgattttgaggctgtttgacttgtgccagattgccagtgctgatgctatattatctcaggtttttatgctagtatatgttttactgtgtgctgcctgtgtcgagttacgtaatctattgaaccgctatgcgtgttgatgccctgttgttgcttgccagattgatgcccctgttgcttgcagcttgcaagctgtagtgaaatcctaaaattccaaaccaaatctattctgaacttttgaagatctgtgatgtccggaagaaaagattcaaacagataaacgggactctccagaatctataaaataaatgatcgacaaacgctttgctttggtaggcttcaagcttggtcacccggtccgggcctagaaggccagcttcggccgccccgggcaactttattatacaaagttgatagataaatcagatatctggttcctaaggacccggcggaccgattaaactgattcggtccgacgcgttacctaataacttcgtatagcatacattatacgaagttattagctaactaactagtaagcttaagccatgggtcgacggatccgttaactagcgtggcatttggcaccgccgcacactatgcgagctaggagtgctagtttacagatgaaactatgaaaccaagaaaacacaattgtccgtagctagcgcgtggcgtcgtgtcaagcttcacacagtatcttcgttcttcactataaatcgcgcctgttgttcgtgagacccaccaccgtggataacagtcccctaataataagcgatcaacagcactgctgatggctgaacaccgaggcgccgccgcgcgtaaccatccgccggagcagcccgtcgtgccggcgaacgacgccttccccgaccgcgcccagcagctctgcctcgacgccgggcgcgcgctcgcgatgtgcggcgtgctcgtcgccgtccctcccgcattttacgcgtcgacgtcgcggacgacaccgcacttgccttcgtcggcttcgtcctctggatcatcggtgcgtggctgtgcctcctggcgctcacgcccttggctccacgggcggtgagggcgggcggggccgccgccagcaccttgctgatcaggtgcctgtccctttcatgaactactagcgcccgcgcccgcggccgccgggcacaagagaacacatcgatgttcgctgcgtacgtcagcaataaggcactctttgtcagtagtcgagtgcatatgttgggtgtttgccctgggagatttcaagtgttgtggccattatcccgcaggataaaaaatcggcggcttttggattgatacggaaaataacgatgtttcatgctcgtgttgtgtgtgtgacatcttgtcagccaagtttttaaccgttgctactccccctctgtgggctcagtgtgtggaccggaatacgtcgtacataggccgtagcctaagcccaatatgccgtttttcaggttggcctgtgtgacgacaagcgggtctcaaaagcccatcacgcaactggcctgcaattattggaggagagcgcgtcgagttggttccagaggctgcgtggtggggccggactctgcgacgacctctcgttcgcgtccgatttggttgccgtgagccgtgacgtaacgcctccttccgttcctccctatataagttccacccccgggtccggtttccccaagccccagtgacccccgatcccgatcgcgaaatctccgcacccgccggcaagggaccgaagcaagcctctctcccgaccgtcgcatcaaggtacgcgtccgctcgatctgtcctcttccttctcgatttgacttgctgtggtgcccgatcacgggatcagaatcgcaccagtgtagatttcgcatgttctaagatgtgttagtttccaggctaatccagttctcttgacgcccgatccgatcgagctccgtgtttatttcagcctaatcgtagtattcccctaaaatttcctcattagggggttcgcaagattgttggtcgacaggttcacttatgctcgatcgcttacttttagtcgattcatgctgcgtactattgttgccccccgtggttttatcttttctcgtgtgaaatccagtagatatagtagatatcgtagcattaggttttaattcaatcgattgattattgtatcatcaaaattgagaagttcgaatcatgcctatcatgctgcctcaaccgaaatcctgtatattgaagtttcaattcaattgattgatcattcattagattcaaccaaaatctagaaggttagatgacgcatgtcatgctgcctgcgtagtttacctttgatctgtttatgattaccttatcagtaggatatttgtgattttgggaagtagcactaactgattcatgctgacatgatgttccctttcagattatactgttgagtcctatctaattgatgctttgtatgctatatgaatacgtcatggtaaattagcagttaattagcatattagcaattgggcgtacctcatcaggattgctcttgtagatgtgtgtggtgatgtttcttgttcaattcatgttctgctttaaaagtatgtgttctctgtttgttaattaagattcatggttataatgatttggacctaattaatcagggttgcccttttagatgcgtggttacttgttgagttcatttttttcctgctatagttgtatgcgtttgttcattcatggttagatttgatttgtttcttctctattccatgccttccatatacttcaattgtagcttaacatgagatttctgtatatgcaggtcgaccgccggggatccacacgacaccatggcccagtccaagcacggcctgaccaaggagatgaccatgaagtaccgcatggagggctgcgtggacggccacaagttcgtgatcaccggcgagggcatcggctaccccttcaagggcaagcaggccatcaacctgtgcgtggtggagggcggccccttgcccttcgccgaggacatcttgtccgccgccttcatgtacggcaaccgcgtgttcaccgagtacccccaggacatcgtcgactacttcaagaactcctgccccgccggctacacctgggaccgctccttcctgttcgaggacggcgccgtgtgcatctgcaacgccgacatcaccgtgagcgtggaggagaactgcatgtaccacgagtccaagttctacggcgtgaacttccccgccgacggccccgtgatgaagaagatgaccgacaactgggagccctcctgcgagaagatcatccccgtgcccaagcagggcatcttgaagggcgacgtgagcatgtacctgctgctgaaggacggtggccgcttgcgctgccagttcgacaccgtgtacaaggccaagtccgtgccccgcaagatgcccgactggcacttcatccagcacaagctgacccgcgaggaccgcagcgacgccaagaaccagaagtggcacctgaccgagcacgccatcgcctccggctccgccttgccctccggactcagatctcgatagagtcaacctagacttgtccatcttctggattggccaacttaattaatgtatgaaataaaaggatgcacacatagtgacatgctaatcactataatgtgggcatcaaagttgtgtgttatgtgtaattactagttatctgaataaaagagaaagagatcatccatatttcttatcctaaatgaatgtcacgtgtctttataattctttgatgaaccagatgcatttcattaaccaaatccatatacatataaatattaatcatatataattaatatcaattgggttagcaaaacaaatctagtctaggtgtgttttgcgaattgcggcgcccttactttaacgcctctaaccaacacccctttatctttataaggaacaataaacagaatttgccccactgttctaaatcacctaataatatccccagctaaaaacaataaaggtttcctagaattaagacaagcatgactgttcctccaggagggtttggaacattgttgcagtcttgcagatacgggcgaagggtgagaaacagagcggagggctggaggtgacctcggtagtcgacgccggagttgagcttgacaacgacggggcggcccctgatggacttgaggaagtccgatggcgtcttcaccgtcccgccggcgcccgaggcgggcctgtcgctgccgccgccgccgctgctcatcttgcgcgctgtgcccccggcggtgtccctgtgttgcggatcgcgggtgggccaggtggatgcgagggcgacccgtttggactccggccggagccgccggatccctggtcggtgtcagtgccgtttactctgggccccacgtgtcagtaccgtctgtagatgacaacaacccgtcgtccacagtcatgtccaaaatatcctttcttcttttttttcgattcggatatctatcttccttttttttttccaaaaatcttcttgacgcaccagcgcgcacgtttgtggtaaacgccgacacgtcggtcccacgtcgatagaccccacccaccagtgagtagcgtgtacgtattcgggggtgacggacgtgtcgccgtcgtcttgctagtcccattcccatctgagccacacatctctgaacaaaaaaaaggagggaggcctccacgcacatccccctccgtgccacccgccccaaaccctcgcgccgcctccgagacagccgccgcaaccatggccaccgccgccgccgcgtctaccgcgctcactggcgccactaccgctgcgcccaaggcgaggcgccgggcgcacctcctggccacccgccgcgccctcgccgcgcccatcaggtgctcagcggcgtcacccgccatgccgatggctcccccggccaccccgctccggccgtggggccccaccgagccccgcaagggtgctgacatcctcgtcgagtccctcgagcgctgcggcgtccgcgacgtcttcgcctaccccggcggcgcgtccatggagatccaccaggcactcacccgctcccccgtcatcgccaaccacctcttccgccacgagcaaggggaggcctttgccgcctccggctacgcgcgctcctcgggccgcgtcggcgtctgcatcgccacctccggccccggcgccaccaacctagtctccgcgctcgccgacgcgctgctcgattccgtccccatggtcgccatcacgggacaggtggcgcgacgcatgattggcaccgacgccttccaggagacgcccatcgtcgaggtcacccgctccatcaccaagcacaactacctggtcctcgacgtcgacgacatcccccgcgtcgtgcaggaggctttcttcctcgcctcctctggtcgaccagggccggtgcttgtcgacatccccaaggacatccagcagcagatggcggtgcctgtctgggacaagcccatgagtctgcctgggtacattgcgcgccttcccaagccccctgcgactgagttgcttgagcaggtgctgcgtcttgttggtgaatcgcggcgccctgttctttatgtgggcggtggctgcgcagcatctggtgaggagttgcgacgctttgtggagctgactggaatcccggtcacaactactcttatgggcctcggcaacttccccagcgacgacccactgtctctgcgcatgctaggtatgcatgggacggtgtatgcaaattatgcagtggataaggccgatctgttgcttgcacttggtgtgcggtttgatgatcgcgtgacagggaagattgaggcttttgcaagcagggctaagattgtgcacgttgatattgatccggctgagattggcaagaacaagcagccacatgtgtccatctgtgcagatgttaagcttgctttgcagggcatgaatgctcttcttgaaggaagcacatcaaagaagagctttgactttggctcatggaacgatgagttggatcagcagaagagggaattcccccttgggtataaaacatctaatgaggagatccagccacaatatgctattcaggttcttgatgagctgacgaaaggcgaggccatcatcggcacaggtgttgggcagcaccagatgtgggcggcacagtactacacttacaagcggccaaggcagtggttgtcttcagctggtcttggggctatgggatttggtttgccggctgctgctggtgcttctgtggcaaacccaggtgtcactgttgttgacatcgatggagatggtagctttctcatgaacgttcaggagctagctatgatccgaattgagaacctcccagtgaaggtctttgtgctaaacaaccagcacctggggatggtggtgcagttggaggacaggttctataaggccaacagagcgcacacatacttgggaaacccagagaatgaaagtgagatatatccagatttcgtgacgatcgccaaagggttcaacattccagcggtccgtgtgacaaagaagaacgaagtccgcgcagcgataaagaagatgctcgagactccagggccgtacctcttggatataatcgtcccacaccaggagcatgtgttgcctatgatccctagtggtggggctttcaaggatatgatcctggatggtgatggcaggactgtgtactgactagctagtcagttaacagatctgccagatcctcggtgtacaaataacccgtcttatcctatgagacgggccggcgtcagtgtgttctggaggaatttttatgtcagagcctttttctttgtgtgcttgatgtagatgccaagggaagcttattggctgttgaagcttgatgcaaaataaattatggaactctgttttttgtttatctaataataactagcaaatatgcttccattgcattgaaactaacagccttttgtgtttccaagttttattttgtgacaatgtcatctatttcaattagttgtggaatcggaaacttgcaggactaacttggaaactccaatccctcagcatcctggactttttcctggtgtaatccatgtagatattattttaatcatcattttagttctggaggtttttccatctccggttttgctcccctttcttcaaaaaaaaaaaaaaaatgccgtaggcgccgcaacgcccacctgttgttcaaactcatgggcacgagtggctcgaagattttatacaacaattgctgtagtttcaccgttgctggtgaagaagcatttttttaaaaaaatatagtggtattcattttaattagtttagttgtgcagcgagcaaaatttggacatgctctgctcggaatctgatcgacctagacacagattagcagcagtagctttgtcatctgttccaagagttgcgatctgatagaagaaaaaaaaaccttcccttcaatgtaaaaccgaaactaacaagaaagaagcacagtgccgtttaggcaagtatggagtacgtattaagcatgtagaaggccatgcatgaaccactaacaagaaagaagcgcagtgccattcaggcaagcataagcatgtagattggcatgcatgaacaactaacagtagatcgtctctggtctgattagaagttttttgggaagccaagaaatcatgtacaactggttccatctcaaattccgtggcaaaaagaggcctaagcaacatacctcgagtagatcacattcaagcttggtcacccggtccgtcaatattctgattccgatgacttcgtaggttcctagctcaagccgctcgtgtccaagcgtcacttacgattagctaatgattacggcatctaggaccgactagtggcgcgccgactagctagctaaggtaccgagctcgaattcattccgattaatcgtggcctcttgctcttcaggatgaagagctatgtttaaacgtgcaagcgctactagacaattcagtacattaaaaacgtccgcaatgtgttattaagttgtctaagcgtcaatttgtttacaccacaatatatcctgcca

SEQ ID NO: 40 - DNA, 20714 bp, Artificial sequence
  PHP95070
gtttacccgccaatatatcctgtcaaacactgatagtttaaactgaaggcgggaaacgacaatctgatcatgagcggagaattaagggagtcacgttatgacccccgccgatgacgcgggacaagccgttttacgtttggaactgacagaaccgcaacgttgaaggagccactcagcaagctggtacgattgtaatacgactcactatagggcgaattgagcgctgtttaaacgctcttcaactggaagagcggttacgctgtttaaacgctcttcaactggaagagcggttactaccggttcactagctagctgctaatcgagctagttaccctatgaggtgacatgaagcgctcacggttactatgacggttagcttcacgactgttggtggcagtagcgtacgacttagctatagttccggacttacccttaagcgatttaaatctgcggttaccgaattcgagctcggtacctagtacccttgtacttttggtttcacctgcatagagaaaacccacaagaatatgacagtctgatttgtcagtctcattctcaagcaacatttctctatccgttactttcatggtgaataacacaatccatcatcaatactttgtgttactcagaaactgaaagttattccgagtcttgcatatctttggacctactcgtttttctaccattattgctgattgttaagctctcgctacttgaatcggcattgttggagtgggaaggttcaaaaaattggagttatgactagttgtctctttctatgtacgatggagaaaatgaataaacaactgagaaaatggctcttgtttagttgatgatgctcttaagctttccactggttgccatatatgatttgggcatttcactttgatcttaatgggccttgtaaagcccaagactcatgattatctttagttgatgctcttaattaggtgtgggcaaataattcaaactgtatgtacccgaccaaaaccaaagcaaaaataatcgaaccaaaccgaaaatttaaaaataaccgaatgaaaactaaatcctataactgaaagaactgaaaccgaatcaaaatatttaatgtaaccaaaaatatccgaaatataattatattgtcaaaaatattaataatttctagattaaataattaaaaatacttaaaaatttatataaaatagtaaaaatactcgaaaataaccacaaatattcaaaaacaaccgaaatatcccaaaatattcaaagcaaaataaccgaatggataccaaattttaaaaccgaaaaaactggaacaaaaccaaaatcgaaccaaaatttcaaaaatcgaataaatactaaactttagaacaaaaaaaaacgataaccgaatgtatacgaaccaaagccgaattagataaccgaacgtccaggactactcttaatctttccgccacttatgatttgggctattactttgtttataatgagccttttcaagctcaagttcatgattgtccgtgagatgagaaactgacttgttggattcgaaaccctagctagtattggttaatacttaatacataaatgacctgcattgacatcatcatccaagaaaataaaaattgtatgcttgagatatttagttttcctagctaggttttctttattttagtaccgaatctttaggtgtgccacgttaatttagacccattttttcatacttaccaactgagtctagtttaatcatgactataatcgtataaaatgattcagtcgacgtcattgcgaacgtatataaaatcatccaaattgacgtcattccaaagaggtaagcatgcttatctaagagtccgagcatactaaacaagacgacattttatttgcactccaaatcaaattttgtattgcctaaagaaaaacaatcaaactcaagtttcttaaaattaatttcattcaaactaatcactttcaatatctcacatattattcatgccatttctatttgtctaaacatgatttaaaaaaaaaagtaaaatacaaagattactatgcaaaaactctataaaaaaaaattcaaatttcttatttatttgtgacatcaaattttcaaaataatttttttaattatcggttgatccggtcagtcgataaaaacataaactttcagcgaccgttaaaactttcctactaccgatttagagaaaatcttagcttgaaacgtaattgtaacctgccttcatgcaagtcgcaagatatgtcatcctaagttgtatatgttttctcaaaagatgtatttacttgagaaaatacgtttcaacgttgatggacaaccaattaagaatcaagcacctttcgtaatcaatttaggcttatcgtctaaggtatactgatttacgacagttgactagacttataaggaacaaaataatagaatagtttctaaacacttcacctaatcatagagactaagatggtaattcgtaaacgacaaagcctagtgacactgtccattgtaaaattccacatcatattagtattaaacatatacatgtagtttcctgaacacatgtagtatcaaacacacttcgtggcttcttcctcgaaacctgcggccgcgctatagttccggacttacccttaagataacttcgtatagcatacattatacgaagttatgggcccacgcgtgaagagcggttaccagagctggtcacctttgtccaccaagatggaactgtcttcggccagaatggccatctggattcagcaggcctagaaggccatttatcgctatcaactttgtatagaaaagttgggccgaattcgagctcggtacggccagaatggcccggaccgaagcttgcggccgcacactgatagtttaaactgaaggcgggaaacgacaatctgatcatgagcggagaattaagggagtcacgttatgacccccgccgatgacgcgggacaagccgttttacgtttggaactgacagaaccgcaacgttgaaggagccactcagccgcgggtttctggagtttaatgagctaagcacatacgtcagaaaccattattgcgcgttcaaaagtcgcctaaggtcactatcagctagcaaatatttcttgtcaaaaatgctccactgacgttccataaattcccctcggtatccaattagagtctcatattcactctcccgggggatctcgactctagaggatcgctcaggaaggccgctgagatagaggcatggcggccaatgcgggcggcggtggagcgggaggaggcagcggcagcggcagcgtggctgcgccggcggtgtgccgccccagcggctcgcggtggacgccgacgccggagcagatcaggatgctgaaggagctctactacggctgcggcatccggtcgcccagctcggagcagatccagcgcatcaccgccatgctgcggcagcacggcaagatcgagggcaagaacgtcttctactggttccagaaccacaaggcccgcgagcgccagaagcgccgcctcaccagcctcgacgtcaacgtgcccgccgccggcgcggccgacgccaccaccagccaactcggcgtcctctcgctgtcgtcgccgccgccttcaggcgcggcgcctccctcgcccaccctcggcttctacgccgccggcaatggcggcggatcggctgtgctgctggacacgagttccgactggggcagcagcggcgctgccatggccaccgagacatgcttcctgcaggactacatgggcgtgacggacacgggcagctcgtcgcagtggccacgcttctcgtcgtcggacacgataatggcggcggccgcggcgcgggcggcgacgacgcgggcgcccgagacgctccctctcttcccgacctgcggcgacgacggcggcagcggtagcagcagctacttgccgttctggggtgccgcgtccacaactgccggcgccacttcttccgttgcgatccagcagcaacaccagctgcaggagcagtacagcttttacagcaacagcaacagcacccagctggccggcaccggcaaccaagacgtatcggcaacagcagcagcagccgccgccctggagctgagcctcagctcatggtgctccccttaccctgctgcagggagtatgtgagagcaacgcgagctgccactgctcttcactgatgtctctggaatggaaggaggaggaagtgagcatagcgttggtgcgttgctgtcaagggcgaattcacatggttaacctagacttgtccatcttctggattggccaacttaattaatgtatgaaataaaaggatgcacacatagtgacatgctaatcactataatgtgggcatcaaagttgtgtgttatgtgtaattactagttatctgaataaaagagaaagagatcatccatatttcttatcctaaatgaatgtcacgtgtctttataattctttgatgaaccagatgcatttcattaaccaaatccatatacatataaatattaatcatatataattaatatcaattgggttagcaaaacaaatctagtctaggtgtgttttgcgaatgcggccgccaccgcggtggagctcgaattccggtccgggcctagaaggccagcttcaagtttgtacaaaaaagcaggctccggccagagttacccggaccgaagcttgcatgcctgcagtgcagcgtgacccggtcgtgcccctctctagagataatgagcattgcatgtctaagttataaaaaattaccacatattttttttgtcacacttgtttgaagtgcagtttatctatctttatacatatatttaaactttactctacgaataatataatctatagtactacaataatatcagtgttttagagaatcatataaatgaacagttagacatggtctaaaggacaattgagtattttgacaacaggactctacagttttatctttttagtgtgcatgtgttctcctttttttttgcaaatagcttcacctatataatacttcatccattttattagtacatccatttagggtttagggttaatggtttttatagactaatttttttagtacatctattttattctattttagcctctaaattaagaaaactaaaactctattttagtttttttatttaataatttagatataaaatagaataaaataaagtgactaaaaattaaacaaataccctttaagaaattaaaaaaactaaggaaacatttttcttgtttcgagtagataatgccagcctgttaaacgccgtcgacgagtctaacggacaccaaccagcgaaccagcagcgtcgcgtcgggccaagcgaagcagacggcacggcatctctgtcgctgcctctggacccctctcgagagttccgctccaccgttggacttgctccgctgtcggcatccagaaattgcgtggcggagcggcagacgtgagccggcacggcaggcggcctcctcctcctctcacggcaccggcagctacgggggattcctttcccaccgctccttcgctttcccttcctcgcccgccgtaataaatagacaccccctccacaccctctttccccaacctcgtgttgttcggagcgcacacacacacaaccagatctcccccaaatccacccgtcggcacctccgcttcaaggtacgccgctcgtcctcccccccccccctctctaccttctctagatcggcgttccggtccatgcatggttagggcccggtagttctacttctgttcatgtttgtgttagatccgtgtttgtgttagatccgtgctgctagcgttcgtacacggatgcgacctgtacgtcagacacgttctgattgctaacttgccagtgtttctctttggggaatcctgggatggctctagccgttccgcagacgggatcgatttcatgattttttttgtttcgttgcatagggtttggtttgcccttttcctttatttcaatatatgccgtgcacttgtttgtcgggtcatcttttcatgcttttttttgtcttggttgtgatgatgtggtctggttgggcggtcgttctagatcggagtagaattctgtttcaaactacctggtggatttattaattttggatctgtatgtgtgtgccatacatattcatagttacgaattgaagatgatggatggaaatatcgatctaggataggtatacatgttgatgcgggttttactgatgcatatacagagatgctttttgttcgcttggttgtgatgatgtggtgtggttgggcggtcgttcattcgttctagatcggagtagaatactgtttcaaactacctggtgtatttattaattttggaactgtatgtgtgtgtcatacatcttcatagttacgagtttaagatggatggaaatatcgatctaggataggtatacatgttgatgtgggttttactgatgcatatacatgatggcatatgcagcatctattcatatgctctaaccttgagtacctatctattataataaacaagtatgttttataattattttgatcttgatatacttggatgatggcatatgcagcagctatatgtggatttttttagccctgccttcatacgctatttatttgcttggtactgtttcttttgtcgatgctcaccctgttgtttggtgttacttctgcaggtcgactttaacttagcctaggatccatgaggtccatggagagcacggactcgtcgtccggtgagctaccaccaccgcagaagcagccgagctcggcgccggatctcccgccgggcttccggttccaccccacggacgaggagctggtcgtccactacctcaagaagaaggccgcgtccgtgccactccccgtcgccatcatcgcggaggtcgacctctacaagttcgatccgtgggagctacctgataaggcgacattcggcgagcaggagtggtacttcttcagcccgagggaccgcaagtaccccaacggagcgcggccgaacagggcggcgacgtccggctactggaaggcgactggcacagacaagcccatcatggcgtccggcggcaaccgcgagaaggtcggcgtcaagaaggctctcgtgttctaccgcgggaagccgccaaagggcctcaagaccaactggatcatgcacgagtaccgcctcgcggatgcggcgagctcaaccaccagccggccgccgccgccttgcaacgccggaggcaaggccacgtctctcaggctcgacgactgggtgttatgccgcatctacaagaagatcgacaaacttggagtcggcgatccgccgcggatcatggagtgcggcgaggactccgtggagaatgcggtggcagcctacccgacgcatgccgcggctgctgccatggccgtcgcagtcgcaggcggaggaggggcttaccataccggcaattacacttcgctgatccaccaccatcacgaggacagcttcctggtggatgggctgctcacagcagaggacgcgggcggcagctccctgagccagctagccgcggcagccagggcagctgctccaacagacaccaccaagcagctcctcgtcccgtcctccaccaccccgttcaactggctcgacgcgtcggcactcacgattcttccgccggcaaagaggttccatgggtacaacagagacaccactgacggcggcggcacgtccctcccgtcgccgtccgagaggaataacctgcaggcggctgtcggcgccgtcgatagtggcgccagcggtggcactagtgccgtcattccatcatttctcaatccgctcggcgtgcaaggtgcgacaagctatcaccaccacgccattttcggcacaccggtgacgccggaagccgccgcggccgccgcatgcagtttccagcacccctaccagctgtccggcgtgaactggaacccgtaaggtaccgttaacagatctactaactatctatactgtaataatgttgtatagccgccggatagctagctagtttagtcattcagcggcgatgggtaataataaagtgtcatccatccatcaccatgcgtggcaacgtgagcaatgacctgattgaacaaattgaaatgaaaagaagaaatatgttatatgtcaacgagatttcctcataatgccactgacgacgtgtgtccaagaaatgtatcagtgatacgtatattcacaatttttttatgacttatactcacaatttgtttttttactacttatactcacaatttgttgtgcgtaccataacaatttcgatcgaatatatatcagaaagttgacgaaagtaagctcactcaaaaagttaaatgggctgcggaagctgcgtcaggcccaagttttggctattctatccggtatccacgattttgatggctgagggacatatgttcgcttaagcttcggtccgggcctagaaggccgatctcccgggcacccagctttcttgtacaaagtggccgttaacggatcggccagaatggcccggaccgggttaccgaattcgagctcggtaccctggttcacaaactcaatacaacacacagtggagtagggtattacgctccggcggcccgaaccactctaaatccttgtgtcctcgtgtgctcttccaccattaatgactgtaattgcagggacacgaagagttgtagcgcttttgccaacaagatccgctatatgctagtagagtggaacctgcacagcaacaagcatccaataatctgagaataagaattatgtgtggtgatggttctcatctctgcaactcgccattttcgcgagagaaccaaatccaagttggtgaagatcatgatttgggctcatgggctggcatagtagctattacctttgcaattgtggttcgaatctatccgatattctccttttcagggagagctaatgcttatgcttattgggtattttggtttgacactgcttcacgcccaaaaaaaggcaactatgtctgagttggatatggcccaaaaaaaggcagctatgtctgagttggatatggaagtcttctttcgtttagggtgaagtaagaccaagctcatgagcttattatcttaggtcggaacaaattagttgataggcatggcacatttatcaaattataatgattttaacagaaaagcaacacctctttttcagcagcaccagctttgcaagctgcaattgacactccaagcatagtatttgctccaaactcagcctgcatttcgcacaatatcatatctatttccatttggataaaatatattttccagaaatatgggaacagaatcaagatacagaaaaaagttgtggtagtagtggtaagtggaaacacaagtacagtgaaaagatagcattatttctgaacagtcaaattaaccgaaataagtagtatcacatactgcccctaaattgactacacccaatgtaaagaattgcttgagcatattgagccatcagttgtttgtttgtgtaacggatttgacaatgcagagttcaggagcaaaaaaccgcaaaggagagaaagagggaaaggatctcctagtatcccaccttgtggcgcgccctgtcaagtgcatgatggcctggtcgatctgcgtctgctgctgcggttccatcccaacgagtgcctccgacaccttgtcgttgatcacccgcaccgcgtaggcgacccccctggcgaggaacttccgcctctcggaggccccggccgcgtcggcggcggcgccctcgagcgcgcccacgctagccgtagatgctcggtgcacggccttgttggtgtgcaactcgacctcaacggccggtgcgctacgcccgtcaaggatctggcgcgcccgcaccctcgtgatcacggtgggcgcctcccgcctcatgtggccgacgatgaaaagcgccgggttaggggccttggcgcgcaccgccgtattcagggcctcctcgctcttgcgcgagagcaggtgcttccccaggtactcctgcactgacaaggctgccacagcggtggaatttgtcctcacgacttcgccacgtcgtcctcacctccctggcttcccacgactccgccgtatcgaggtgctcggtgggtcgtcttaatccgaagtccgaactaggaagacgagacagagaggtctgaggaatgggcctcgtttgatgttgagctgaattatttttccagcataagcccaggtcttggtccatgaacaaaattactagaaacccagcccagtactacgatctaaaagagggactgccactggatagctctctctagcattctccacgctccaatacagcggcgtcgtgtctatccgggtctatccgcgaacacgtgagaactctccagaaactgctttctcctccacttcatctctctcgctttccctctataaaaagaccccttctaggaattgagggagacagcaagcaccaagcagcgatccgaagctcaatcaattcactcaaacctcttccccaaatcttcgattagatcttcgttgacaagaagactagaaccgaacctgacatgtccaacctgctcacggttcaccagaaccttccggctcttccagtggacgcgacgtccgatgaagtcaggaagaacctcatggacatgttccgcgacaggcaagcgttcagcgagcacacctggaagatgctgctctccgtctgccgctcctgggctgcatggtgcaagctgaacaacaggaagtggttccccgctgagcccgaggacgtgagggattaccttctgtacctgcaagcgcgaggtttgtttctgcttctacctttgatatatatataataattatcattaattagtagtaatataatatttcaaatatttttttcaaaataaaagaatgtagtatatagcaattgcttttctgtagtttataagtgtgtatattttaatttataacttttctaatatatgaccaaaacatggtgatgcctaggtctggcagtgaagaccatccagcaacaccttggacaactgaacatgcttcacaggcgctccggcctcccgcgccccagcgactcgaacgccgtgagcctcgtcatgcgccgcatcaggaaggaaaacgtcgatgccggcgaaagggcaaagcaggccctcgcgttcgagaggaccgatttcgaccaggtccgcagcctgatggagaacagcgacaggtgccaggacattaggaacctggcgttcctcggaattgcatacaacacgctcctcaggatcgcggaaattgcccgcattcgcgtgaaggacattagccgcaccgacggcggcaggatgcttatccacattggcaggaccaagacgctcgtttccaccgcaggcgtcgaaaaggccctcagcctcggagtgaccaagctcgtcgaacgctggatctccgtgtccggcgtcgcggacgacccaaacaactacctcttctgccgcgtccgcaagaacggggtggctgcccctagcgccaccagccaactcagcacgagggccttggaaggtattttcgaggccacccaccgcctgatctacggcgcgaaggatgacagcggtcaacgctacctcgcatggtccgggcactccgcccgcgttggagctgctagggacatggcccgcgccggtgtttccatccccgaaatcatgcaggcgggtggatggacgaacgtgaacattgtcatgaactacattcgcaaccttgacagcgagacgggcgcaatggttcgcctcctggaagatggtgactgaggtacccaacctagacttgtccatcttctggattggccaacttaattaatgtatgaaataaaaggatgcacacatagtgacatgctaatcactataatgtgggcatcaaagttgtgtgttatgtgtaattactagttatctgaataaaagagaaagagatcatccatatttcttatcctaaatgaatgtcacgtgtctttataattctttgatgaaccagatgcatttcattaaccaaatccatatacatataaatattaatcatatataattaatatcaattgggttagcaaaacaaatctagtctaggtgtgttttgcgatccgatatcgaattggccacggtaccagctgctgctgttctagggttcacaagtctgcctatttgtcttccccaatggagctatggttgtctggtctggtccttggtcgtgtcccgtttcattgtgtactatttacctgtaatgtgtatccttaagtctggtttgatggtgtctgaaacgttttgctgtggtagagcagcatggaagaactataatgaataagtgatccctaatcattgtgtccaaattttgcttctgctatacccttttgtgctgtttcttatgttttgcttaaaaatttgatctgacaaacaaatttgtctaaattatgctcttgttctgactgtgtactgtacacatttgtattgctaccggtttggcacatagttttctctttgattgcagatcaaacccttctgattgcagattgcttggctatggctgatgtgctcactgttcttctttagcttgtatattgctgatggtggcttggctacggctgaaaaagttgctgctgcgccgacttggcaactgttgctccagtaatgctttgtcctctcttcctagccgccgacttggcacttggcagctgttgctcctgtaatgcgttgttatctcttatctcttgagatgtactatgattttgaggctgtttgacttgtgccagattgccagtgctgatgctatattatctcaggtttttatgctagtatatgttttactgtgtgctgcctgtgtcgagttacgtaatctattgaaccgctatgcgtgttgatgccctgttgttgcttgccagattgatgcccctgttgcttgcagcttgcaagctgtagtgaaatcctaaaattccaaaccaaatctattctgaacttttgaagatctgtgatgtccggaagaaaagattcaaacagataaacgggactctccagaatctataaaataaatgatcgacaaacgctttgctttggtaggcttcaagcttggtcacccggtccgggcctagaaggccagcttcggccgccccgggcaactttattatacaaagttgatagataaatcagatatctggttcctaaggacccggcggaccgattaaactgattcggtccgacgcgttacctaataacttcgtatagcatacattatacgaagttattagctaactaactagtaagcttaagccatgggtcgacggatccgttaactagcgtggcatttggcaccgccgcacactatgcgagctaggagtgctagtttacagatgaaactatgaaaccaagaaaacacaattgtccgtagctagcgcgtggcgtcgtgtcaagcttcacacagtatcttcgttcttcactataaatcgcgcctgttgttcgtgagacccaccaccgtggataacagtcccctaataataagcgatcaacagcactgctgatggctgaacaccgaggcgccgccgcgcgtaaccatccgccggagcagcccgtcgtgccggcgaacgacgccttccccgaccgcgcccagcagctctgcctcgacgccgggcgcgcgctcgcgatgtgcggcgtgctcgtcgccgtccctcccgcattttacgcgtcgacgtcgcggacgacaccgcacttgccttcgtcggcttcgtcctctggatcatcggtgcgtggctgtgcctcctggcgctcacgcccttggctccacgggcggtgagggcgggcggggccgccgccagcaccttgctgatcaggtgcctgtccctttcatgaactactagcgcccgcgcccgcggccgccgggcacaagagaacacatcgatgttcgctgcgtacgtcagcaataaggcactctttgtcagtagtcgagtgcatatgttgggtgtttgccctgggagatttcaagtgttgtggccattatcccgcaggataaaaaatcggcggcttttggattgatacggaaaataacgatgtttcatgctcgtgttgtgtgtgtgacatcttgtcagccaagtttttaaccgttgctactccccctctgtgggctcagtgtgtggaccggaatacgtcgtacataggccgtagcctaagcccaatatgccgtttttcaggttggcctgtgtgacgacaagcgggtctcaaaagcccatcacgcaactggcctgcaattattggaggagagcgcgtcgagttggttccagaggctgcgtggtggggccggactctgcgacgacctctcgttcgcgtccgatttggttgccgtgagccgtgacgtaacgcctccttccgttcctccctatataagttccacccccgggtccggtttccccaagccccagtgacccccgatcccgatcgcgaaatctccgcacccgccggcaagggaccgaagcaagcctctctcccgaccgtcgcatcaaggtacgcgtccgctcgatctgtcctcttccttctcgatttgacttgctgtggtgcccgatcacgggatcagaatcgcaccagtgtagatttcgcatgttctaagatgtgttagtttccaggctaatccagttctcttgacgcccgatccgatcgagctccgtgtttatttcagcctaatcgtagtattcccctaaaatttcctcattagggggttcgcaagattgttggtcgacaggttcacttatgctcgatcgcttacttttagtcgattcatgctgcgtactattgttgccccccgtggttttatcttttctcgtgtgaaatccagtagatatagtagatatcgtagcattaggttttaattcaatcgattgattattgtatcatcaaaattgagaagttcgaatcatgcctatcatgctgcctcaaccgaaatcctgtatattgaagtttcaattcaattgattgatcattcattagattcaaccaaaatctagaaggttagatgacgcatgtcatgctgcctgcgtagtttacctttgatctgtttatgattaccttatcagtaggatatttgtgattttgggaagtagcactaactgattcatgctgacatgatgttccctttcagattatactgttgagtcctatctaattgatgctttgtatgctatatgaatacgtcatggtaaattagcagttaattagcatattagcaattgggcgtacctcatcaggattgctcttgtagatgtgtgtggtgatgtttcttgttcaattcatgttctgctttaaaagtatgtgttctctgtttgttaattaagattcatggttataatgatttggacctaattaatcagggttgcccttttagatgcgtggttacttgttgagttcatttttttcctgctatagttgtatgcgtttgttcattcatggttagatttgatttgtttcttctctattccatgccttccatatacttcaattgtagcttaacatgagatttctgtatatgcaggtcgaccgccggggatccacacgacaccatggcccagtccaagcacggcctgaccaaggagatgaccatgaagtaccgcatggagggctgcgtggacggccacaagttcgtgatcaccggcgagggcatcggctaccccttcaagggcaagcaggccatcaacctgtgcgtggtggagggcggccccttgcccttcgccgaggacatcttgtccgccgccttcatgtacggcaaccgcgtgttcaccgagtacccccaggacatcgtcgactacttcaagaactcctgccccgccggctacacctgggaccgctccttcctgttcgaggacggcgccgtgtgcatctgcaacgccgacatcaccgtgagcgtggaggagaactgcatgtaccacgagtccaagttctacggcgtgaacttccccgccgacggccccgtgatgaagaagatgaccgacaactgggagccctcctgcgagaagatcatccccgtgcccaagcagggcatcttgaagggcgacgtgagcatgtacctgctgctgaaggacggtggccgcttgcgctgccagttcgacaccgtgtacaaggccaagtccgtgccccgcaagatgcccgactggcacttcatccagcacaagctgacccgcgaggaccgcagcgacgccaagaaccagaagtggcacctgaccgagcacgccatcgcctccggctccgccttgccctccggactcagatctcgatagagtcaacctagacttgtccatcttctggattggccaacttaattaatgtatgaaataaaaggatgcacacatagtgacatgctaatcactataatgtgggcatcaaagttgtgtgttatgtgtaattactagttatctgaataaaagagaaagagatcatccatatttcttatcctaaatgaatgtcacgtgtctttataattctttgatgaaccagatgcatttcattaaccaaatccatatacatataaatattaatcatatataattaatatcaattgggttagcaaaacaaatctagtctaggtgtgttttgcgaattgcggcgcccttactttaacgcctctaaccaacacccctttatctttataaggaacaataaacagaatttgccccactgttctaaatcacctaataatatccccagctaaaaacaataaaggtttcctagaattaagacaagcatgactgttcctccaggagggtttggaacattgttgcagtcttgcagatacgggcgaagggtgagaaacagagcggagggctggaggtgacctcggtagtcgacgccggagttgagcttgacaacgacggggcggcccctgatggacttgaggaagtccgatggcgtcttcaccgtcccgccggcgcccgaggcgggcctgtcgctgccgccgccgccgctgctcatcttgcgcgctgtgcccccggcggtgtccctgtgttgcggatcgcgggtgggccaggtggatgcgagggcgacccgtttggactccggccggagccgccggatccctggtcggtgtcagtgccgtttactctgggccccacgtgtcagtaccgtctgtagatgacaacaacccgtcgtccacagtcatgtccaaaatatcctttcttcttttttttcgattcggatatctatcttccttttttttttccaaaaatcttcttgacgcaccagcgcgcacgtttgtggtaaacgccgacacgtcggtcccacgtcgatagaccccacccaccagtgagtagcgtgtacgtattcgggggtgacggacgtgtcgccgtcgtcttgctagtcccattcccatctgagccacacatctctgaacaaaaaaaaggagggaggcctccacgcacatccccctccgtgccacccgccccaaaccctcgcgccgcctccgagacagccgccgcaaccatggccaccgccgccgccgcgtctaccgcgctcactggcgccactaccgctgcgcccaaggcgaggcgccgggcgcacctcctggccacccgccgcgccctcgccgcgcccatcaggtgctcagcggcgtcacccgccatgccgatggctcccccggccaccccgctccggccgtggggccccaccgagccccgcaagggtgctgacatcctcgtcgagtccctcgagcgctgcggcgtccgcgacgtcttcgcctaccccggcggcgcgtccatggagatccaccaggcactcacccgctcccccgtcatcgccaaccacctcttccgccacgagcaaggggaggcctttgccgcctccggctacgcgcgctcctcgggccgcgtcggcgtctgcatcgccacctccggccccggcgccaccaacctagtctccgcgctcgccgacgcgctgctcgattccgtccccatggtcgccatcacgggacaggtggcgcgacgcatgattggcaccgacgccttccaggagacgcccatcgtcgaggtcacccgctccatcaccaagcacaactacctggtcctcgacgtcgacgacatcccccgcgtcgtgcaggaggctttcttcctcgcctcctctggtcgaccagggccggtgcttgtcgacatccccaaggacatccagcagcagatggcggtgcctgtctgggacaagcccatgagtctgcctgggtacattgcgcgccttcccaagccccctgcgactgagttgcttgagcaggtgctgcgtcttgttggtgaatcgcggcgccctgttctttatgtgggcggtggctgcgcagcatctggtgaggagttgcgacgctttgtggagctgactggaatcccggtcacaactactcttatgggcctcggcaacttccccagcgacgacccactgtctctgcgcatgctaggtatgcatgggacggtgtatgcaaattatgcagtggataaggccgatctgttgcttgcacttggtgtgcggtttgatgatcgcgtgacagggaagattgaggcttttgcaagcagggctaagattgtgcacgttgatattgatccggctgagattggcaagaacaagcagccacatgtgtccatctgtgcagatgttaagcttgctttgcagggcatgaatgctcttcttgaaggaagcacatcaaagaagagctttgactttggctcatggaacgatgagttggatcagcagaagagggaattcccccttgggtataaaacatctaatgaggagatccagccacaatatgctattcaggttcttgatgagctgacgaaaggcgaggccatcatcggcacaggtgttgggcagcaccagatgtgggcggcacagtactacacttacaagcggccaaggcagtggttgtcttcagctggtcttggggctatgggatttggtttgccggctgctgctggtgcttctgtggcaaacccaggtgtcactgttgttgacatcgatggagatggtagctttctcatgaacgttcaggagctagctatgatccgaattgagaacctcccagtgaaggtctttgtgctaaacaaccagcacctggggatggtggtgcagttggaggacaggttctataaggccaacagagcgcacacatacttgggaaacccagagaatgaaagtgagatatatccagatttcgtgacgatcgccaaagggttcaacattccagcggtccgtgtgacaaagaagaacgaagtccgcgcagcgataaagaagatgctcgagactccagggccgtacctcttggatataatcgtcccacaccaggagcatgtgttgcctatgatccctagtggtggggctttcaaggatatgatcctggatggtgatggcaggactgtgtactgactagctagtcagttaacagatctgccagatcctcggtgtacaaataacccgtcttatcctatgagacgggccggcgtcagtgtgttctggaggaatttttatgtcagagcctttttctttgtgtgcttgatgtagatgccaagggaagcttattggctgttgaagcttgatgcaaaataaattatggaactctgttttttgtttatctaataataactagcaaatatgcttccattgcattgaaactaacagccttttgtgtttccaagttttattttgtgacaatgtcatctatttcaattagttgtggaatcggaaacttgcaggactaacttggaaactccaatccctcagcatcctggactttttcctggtgtaatccatgtagatattattttaatcatcattttagttctggaggtttttccatctccggttttgctcccctttcttcaaaaaaaaaaaaaaaatgccgtaggcgccgcaacgcccacctgttgttcaaactcatgggcacgagtggctcgaagattttatacaacaattgctgtagtttcaccgttgctggtgaagaagcatttttttaaaaaaatatagtggtattcattttaattagtttagttgtgcagcgagcaaaatttggacatgctctgctcggaatctgatcgacctagacacagattagcagcagtagctttgtcatctgttccaagagttgcgatctgatagaagaaaaaaaaaccttcccttcaatgtaaaaccgaaactaacaagaaagaagcacagtgccgtttaggcaagtatggagtacgtattaagcatgtagaaggccatgcatgaaccactaacaagaaagaagcgcagtgccattcaggcaagcataagcatgtagattggcatgcatgaacaactaacagtagatcgtctctggtctgattagaagttttttgggaagccaagaaatcatgtacaactggttccatctcaaattccgtggcaaaaagaggcctaagcaacatacctcgagtagatcacattcaagcttggtcacccggtccgtcaatattctgattccgatgacttcgtaggttcctagctcaagccgctcgtgtccaagcgtcacttacgattagctaatgattacggcatctaggaccgactagtggcgcgccgactagctagctaaggtaccgagctcgaattcattccgattaatcgtggcctcttgctcttcaggatgaagagctatgtttaaacgtgcaagcgctactagacaattcagtacattaaaaacgtccgcaatgtgttattaagttgtctaagcgtcaatttgtttacaccacaatatatcctgcca

SEQ ID NO: 41 - DNA, 20252 bp, Artificial sequence
  PHP95071
gtttacccgccaatatatcctgtcaaacactgatagtttaaactgaaggcgggaaacgacaatctgatcatgagcggagaattaagggagtcacgttatgacccccgccgatgacgcgggacaagccgttttacgtttggaactgacagaaccgcaacgttgaaggagccactcagcaagctggtacgattgtaatacgactcactatagggcgaattgagcgctgtttaaacgctcttcaactggaagagcggttacgctgtttaaacgctcttcaactggaagagcggttactaccggttcactagctagctgctaatcgagctagttaccctatgaggtgacatgaagcgctcacggttactatgacggttagcttcacgactgttggtggcagtagcgtacgacttagctatagttccggacttacccttaagcgatttaaatctgcggttaccgaattcgagctcggtacctagtacccttgtacttttggtttcacctgcatagagaaaacccacaagaatatgacagtctgatttgtcagtctcattctcaagcaacatttctctatccgttactttcatggtgaataacacaatccatcatcaatactttgtgttactcagaaactgaaagttattccgagtcttgcatatctttggacctactcgtttttctaccattattgctgattgttaagctctcgctacttgaatcggcattgttggagtgggaaggttcaaaaaattggagttatgactagttgtctctttctatgtacgatggagaaaatgaataaacaactgagaaaatggctcttgtttagttgatgatgctcttaagctttccactggttgccatatatgatttgggcatttcactttgatcttaatgggccttgtaaagcccaagactcatgattatctttagttgatgctcttaattaggtgtgggcaaataattcaaactgtatgtacccgaccaaaaccaaagcaaaaataatcgaaccaaaccgaaaatttaaaaataaccgaatgaaaactaaatcctataactgaaagaactgaaaccgaatcaaaatatttaatgtaaccaaaaatatccgaaatataattatattgtcaaaaatattaataatttctagattaaataattaaaaatacttaaaaatttatataaaatagtaaaaatactcgaaaataaccacaaatattcaaaaacaaccgaaatatcccaaaatattcaaagcaaaataaccgaatggataccaaattttaaaaccgaaaaaactggaacaaaaccaaaatcgaaccaaaatttcaaaaatcgaataaatactaaactttagaacaaaaaaaaacgataaccgaatgtatacgaaccaaagccgaattagataaccgaacgtccaggactactcttaatctttccgccacttatgatttgggctattactttgtttataatgagccttttcaagctcaagttcatgattgtccgtgagatgagaaactgacttgttggattcgaaaccctagctagtattggttaatacttaatacataaatgacctgcattgacatcatcatccaagaaaataaaaattgtatgcttgagatatttagttttcctagctaggttttctttattttagtaccgaatctttaggtgtgccacgttaatttagacccattttttcatacttaccaactgagtctagtttaatcatgactataatcgtataaaatgattcagtcgacgtcattgcgaacgtatataaaatcatccaaattgacgtcattccaaagaggtaagcatgcttatctaagagtccgagcatactaaacaagacgacattttatttgcactccaaatcaaattttgtattgcctaaagaaaaacaatcaaactcaagtttcttaaaattaatttcattcaaactaatcactttcaatatctcacatattattcatgccatttctatttgtctaaacatgatttaaaaaaaaaagtaaaatacaaagattactatgcaaaaactctataaaaaaaaattcaaatttcttatttatttgtgacatcaaattttcaaaataatttttttaattatcggttgatccggtcagtcgataaaaacataaactttcagcgaccgttaaaactttcctactaccgatttagagaaaatcttagcttgaaacgtaattgtaacctgccttcatgcaagtcgcaagatatgtcatcctaagttgtatatgttttctcaaaagatgtatttacttgagaaaatacgtttcaacgttgatggacaaccaattaagaatcaagcacctttcgtaatcaatttaggcttatcgtctaaggtatactgatttacgacagttgactagacttataaggaacaaaataatagaatagtttctaaacacttcacctaatcatagagactaagatggtaattcgtaaacgacaaagcctagtgacactgtccattgtaaaattccacatcatattagtattaaacatatacatgtagtttcctgaacacatgtagtatcaaacacacttcgtggcttcttcctcgaaacctgcggccgcgctatagttccggacttacccttaagataacttcgtatagcatacattatacgaagttatgggcccacgcgtgaagagcggttaccagagctggtcacctttgtccaccaagatggaactgtcttcggccagaatggccatctggattcagcaggcctagaaggccatttatcgctatcaactttgtatagaaaagttgggccgaattcgagctcggtacggccagaatggcccggaccgaagcttgcggccgcacactgatagtttaaactgaaggcgggaaacgacaatctgatcatgagcggagaattaagggagtcacgttatgacccccgccgatgacgcgggacaagccgttttacgtttggaactgacagaaccgcaacgttgaaggagccactcagccgcgggtttctggagtttaatgagctaagcacatacgtcagaaaccattattgcgcgttcaaaagtcgcctaaggtcactatcagctagcaaatatttcttgtcaaaaatgctccactgacgttccataaattcccctcggtatccaattagagtctcatattcactctcccgggggatctcgactctagaggatcgctcaggaaggccgctgagatagaggcatggcggccaatgcgggcggcggtggagcgggaggaggcagcggcagcggcagcgtggctgcgccggcggtgtgccgccccagcggctcgcggtggacgccgacgccggagcagatcaggatgctgaaggagctctactacggctgcggcatccggtcgcccagctcggagcagatccagcgcatcaccgccatgctgcggcagcacggcaagatcgagggcaagaacgtcttctactggttccagaaccacaaggcccgcgagcgccagaagcgccgcctcaccagcctcgacgtcaacgtgcccgccgccggcgcggccgacgccaccaccagccaactcggcgtcctctcgctgtcgtcgccgccgccttcaggcgcggcgcctccctcgcccaccctcggcttctacgccgccggcaatggcggcggatcggctgtgctgctggacacgagttccgactggggcagcagcggcgctgccatggccaccgagacatgcttcctgcaggactacatgggcgtgacggacacgggcagctcgtcgcagtggccacgcttctcgtcgtcggacacgataatggcggcggccgcggcgcgggcggcgacgacgcgggcgcccgagacgctccctctcttcccgacctgcggcgacgacggcggcagcggtagcagcagctacttgccgttctggggtgccgcgtccacaactgccggcgccacttcttccgttgcgatccagcagcaacaccagctgcaggagcagtacagcttttacagcaacagcaacagcacccagctggccggcaccggcaaccaagacgtatcggcaacagcagcagcagccgccgccctggagctgagcctcagctcatggtgctccccttaccctgctgcagggagtatgtgagagcaacgcgagctgccactgctcttcactgatgtctctggaatggaaggaggaggaagtgagcatagcgttggtgcgttgctgtcaagggcgaattcacatggttaacctagacttgtccatcttctggattggccaacttaattaatgtatgaaataaaaggatgcacacatagtgacatgctaatcactataatgtgggcatcaaagttgtgtgttatgtgtaattactagttatctgaataaaagagaaagagatcatccatatttcttatcctaaatgaatgtcacgtgtctttataattctttgatgaaccagatgcatttcattaaccaaatccatatacatataaatattaatcatatataattaatatcaattgggttagcaaaacaaatctagtctaggtgtgttttgcgaatgcggccgccaccgcggtggagctcgaattccggtccgggcctagaaggccagcttcaagtttgtacaaaaaagcaggctccggccagagttacccggaccgaagcttgcatgcctgcagtgcagcgtgacccggtcgtgcccctctctagagataatgagcattgcatgtctaagttataaaaaattaccacatattttttttgtcacacttgtttgaagtgcagtttatctatctttatacatatatttaaactttactctacgaataatataatctatagtactacaataatatcagtgttttagagaatcatataaatgaacagttagacatggtctaaaggacaattgagtattttgacaacaggactctacagttttatctttttagtgtgcatgtgttctcctttttttttgcaaatagcttcacctatataatacttcatccattttattagtacatccatttagggtttagggttaatggtttttatagactaatttttttagtacatctattttattctattttagcctctaaattaagaaaactaaaactctattttagtttttttatttaataatttagatataaaatagaataaaataaagtgactaaaaattaaacaaataccctttaagaaattaaaaaaactaaggaaacatttttcttgtttcgagtagataatgccagcctgttaaacgccgtcgacgagtctaacggacaccaaccagcgaaccagcagcgtcgcgtcgggccaagcgaagcagacggcacggcatctctgtcgctgcctctggacccctctcgagagttccgctccaccgttggacttgctccgctgtcggcatccagaaattgcgtggcggagcggcagacgtgagccggcacggcaggcggcctcctcctcctctcacggcaccggcagctacgggggattcctttcccaccgctccttcgctttcccttcctcgcccgccgtaataaatagacaccccctccacaccctctttccccaacctcgtgttgttcggagcgcacacacacacaaccagatctcccccaaatccacccgtcggcacctccgcttcaaggtacgccgctcgtcctcccccccccccctctctaccttctctagatcggcgttccggtccatgcatggttagggcccggtagttctacttctgttcatgtttgtgttagatccgtgtttgtgttagatccgtgctgctagcgttcgtacacggatgcgacctgtacgtcagacacgttctgattgctaacttgccagtgtttctctttggggaatcctgggatggctctagccgttccgcagacgggatcgatttcatgattttttttgtttcgttgcatagggtttggtttgcccttttcctttatttcaatatatgccgtgcacttgtttgtcgggtcatcttttcatgcttttttttgtcttggttgtgatgatgtggtctggttgggcggtcgttctagatcggagtagaattctgtttcaaactacctggtggatttattaattttggatctgtatgtgtgtgccatacatattcatagttacgaattgaagatgatggatggaaatatcgatctaggataggtatacatgttgatgcgggttttactgatgcatatacagagatgctttttgttcgcttggttgtgatgatgtggtgtggttgggcggtcgttcattcgttctagatcggagtagaatactgtttcaaactacctggtgtatttattaattttggaactgtatgtgtgtgtcatacatcttcatagttacgagtttaagatggatggaaatatcgatctaggataggtatacatgttgatgtgggttttactgatgcatatacatgatggcatatgcagcatctattcatatgctctaaccttgagtacctatctattataataaacaagtatgttttataattattttgatcttgatatacttggatgatggcatatgcagcagctatatgtggatttttttagccctgccttcatacgctatttatttgcttggtactgtttcttttgtcgatgctcaccctgttgtttggtgttacttctgcaggtcgactttaacttagcctaggatccatgagcagcagcaagcacagcagcgtgttcaactacagcgccctgttcctgagcctgttcctgcagcagatggaccagaacagcctgcaccacctggacagcccgaagatcgagaacgagtacgagccggacagcctgtacgacatgctggacaagctgccgccgctggacagcctgctggacatggaggacctgaagccgaacgccggcctgcacttccagttccactacaacagcttcgaggacttcttcgagaacatcgaggtggacaacaccatcccgagcgacatccacctgctgacccaggagccgtacttcagcagcgacagcagcagcagcagcccgctggccatccagaacgacggcctgatcagcaacgtgaaggtggagaaggtgaccgtgaagaagaagaggaacctgaagaagaagaggcaggacaagctggagatgagcgagatcaagcagttcttcgacaggccgatcatgaaggccgccaaggagctgaacgtgggcctgaccgtgctgaagaagaggtgcagggagctgggcatctacaggtggccgcacaggaagctgaagagcctgaacagcctgatcaagaacctgaagaacgtgggcatggaggaggaggtgaagaacctggaggagcacaggttcctgatcgagcaggagccggacgccgagctgagcgacggcaccaagaagctgaggcaggcctgcttcaaggccaactacaagaggaggaagagcctgggcgacgactactactaaggtaccgttaacagatctactaactatctatactgtaataatgttgtatagccgccggatagctagctagtttagtcattcagcggcgatgggtaataataaagtgtcatccatccatcaccatgcgtggcaacgtgagcaatgacctgattgaacaaattgaaatgaaaagaagaaatatgttatatgtcaacgagatttcctcataatgccactgacgacgtgtgtccaagaaatgtatcagtgatacgtatattcacaatttttttatgacttatactcacaatttgtttttttactacttatactcacaatttgttgtgcgtaccataacaatttcgatcgaatatatatcagaaagttgacgaaagtaagctcactcaaaaagttaaatgggctgcggaagctgcgtcaggcccaagttttggctattctatccggtatccacgattttgatggctgagggacatatgttcgcttaagcttcggtccgggcctagaaggccgatctcccgggcacccagctttcttgtacaaagtggccgttaacggatcggccagaatggcccggaccgggttaccgaattcgagctcggtaccctggttcacaaactcaatacaacacacagtggagtagggtattacgctccggcggcccgaaccactctaaatccttgtgtcctcgtgtgctcttccaccattaatgactgtaattgcagggacacgaagagttgtagcgcttttgccaacaagatccgctatatgctagtagagtggaacctgcacagcaacaagcatccaataatctgagaataagaattatgtgtggtgatggttctcatctctgcaactcgccattttcgcgagagaaccaaatccaagttggtgaagatcatgatttgggctcatgggctggcatagtagctattacctttgcaattgtggttcgaatctatccgatattctccttttcagggagagctaatgcttatgcttattgggtattttggtttgacactgcttcacgcccaaaaaaaggcaactatgtctgagttggatatggcccaaaaaaaggcagctatgtctgagttggatatggaagtcttctttcgtttagggtgaagtaagaccaagctcatgagcttattatcttaggtcggaacaaattagttgataggcatggcacatttatcaaattataatgattttaacagaaaagcaacacctctttttcagcagcaccagctttgcaagctgcaattgacactccaagcatagtatttgctccaaactcagcctgcatttcgcacaatatcatatctatttccatttggataaaatatattttccagaaatatgggaacagaatcaagatacagaaaaaagttgtggtagtagtggtaagtggaaacacaagtacagtgaaaagatagcattatttctgaacagtcaaattaaccgaaataagtagtatcacatactgcccctaaattgactacacccaatgtaaagaattgcttgagcatattgagccatcagttgtttgtttgtgtaacggatttgacaatgcagagttcaggagcaaaaaaccgcaaaggagagaaagagggaaaggatctcctagtatcccaccttgtggcgcgccctgtcaagtgcatgatggcctggtcgatctgcgtctgctgctgcggttccatcccaacgagtgcctccgacaccttgtcgttgatcacccgcaccgcgtaggcgacccccctggcgaggaacttccgcctctcggaggccccggccgcgtcggcggcggcgccctcgagcgcgcccacgctagccgtagatgctcggtgcacggccttgttggtgtgcaactcgacctcaacggccggtgcgctacgcccgtcaaggatctggcgcgcccgcaccctcgtgatcacggtgggcgcctcccgcctcatgtggccgacgatgaaaagcgccgggttaggggccttggcgcgcaccgccgtattcagggcctcctcgctcttgcgcgagagcaggtgcttccccaggtactcctgcactgacaaggctgccacagcggtggaatttgtcctcacgacttcgccacgtcgtcctcacctccctggcttcccacgactccgccgtatcgaggtgctcggtgggtcgtcttaatccgaagtccgaactaggaagacgagacagagaggtctgaggaatgggcctcgtttgatgttgagctgaattatttttccagcataagcccaggtcttggtccatgaacaaaattactagaaacccagcccagtactacgatctaaaagagggactgccactggatagctctctctagcattctccacgctccaatacagcggcgtcgtgtctatccgggtctatccgcgaacacgtgagaactctccagaaactgctttctcctccacttcatctctctcgctttccctctataaaaagaccccttctaggaattgagggagacagcaagcaccaagcagcgatccgaagctcaatcaattcactcaaacctcttccccaaatcttcgattagatcttcgttgacaagaagactagaaccgaacctgacatgtccaacctgctcacggttcaccagaaccttccggctcttccagtggacgcgacgtccgatgaagtcaggaagaacctcatggacatgttccgcgacaggcaagcgttcagcgagcacacctggaagatgctgctctccgtctgccgctcctgggctgcatggtgcaagctgaacaacaggaagtggttccccgctgagcccgaggacgtgagggattaccttctgtacctgcaagcgcgaggtttgtttctgcttctacctttgatatatatataataattatcattaattagtagtaatataatatttcaaatatttttttcaaaataaaagaatgtagtatatagcaattgcttttctgtagtttataagtgtgtatattttaatttataacttttctaatatatgaccaaaacatggtgatgcctaggtctggcagtgaagaccatccagcaacaccttggacaactgaacatgcttcacaggcgctccggcctcccgcgccccagcgactcgaacgccgtgagcctcgtcatgcgccgcatcaggaaggaaaacgtcgatgccggcgaaagggcaaagcaggccctcgcgttcgagaggaccgatttcgaccaggtccgcagcctgatggagaacagcgacaggtgccaggacattaggaacctggcgttcctcggaattgcatacaacacgctcctcaggatcgcggaaattgcccgcattcgcgtgaaggacattagccgcaccgacggcggcaggatgcttatccacattggcaggaccaagacgctcgtttccaccgcaggcgtcgaaaaggccctcagcctcggagtgaccaagctcgtcgaacgctggatctccgtgtccggcgtcgcggacgacccaaacaactacctcttctgccgcgtccgcaagaacggggtggctgcccctagcgccaccagccaactcagcacgagggccttggaaggtattttcgaggccacccaccgcctgatctacggcgcgaaggatgacagcggtcaacgctacctcgcatggtccgggcactccgcccgcgttggagctgctagggacatggcccgcgccggtgtttccatccccgaaatcatgcaggcgggtggatggacgaacgtgaacattgtcatgaactacattcgcaaccttgacagcgagacgggcgcaatggttcgcctcctggaagatggtgactgaggtacccaacctagacttgtccatcttctggattggccaacttaattaatgtatgaaataaaaggatgcacacatagtgacatgctaatcactataatgtgggcatcaaagttgtgtgttatgtgtaattactagttatctgaataaaagagaaagagatcatccatatttcttatcctaaatgaatgtcacgtgtctttataattctttgatgaaccagatgcatttcattaaccaaatccatatacatataaatattaatcatatataattaatatcaattgggttagcaaaacaaatctagtctaggtgtgttttgcgatccgatatcgaattggccacggtaccagctgctgctgttctagggttcacaagtctgcctatttgtcttccccaatggagctatggttgtctggtctggtccttggtcgtgtcccgtttcattgtgtactatttacctgtaatgtgtatccttaagtctggtttgatggtgtctgaaacgttttgctgtggtagagcagcatggaagaactataatgaataagtgatccctaatcattgtgtccaaattttgcttctgctatacccttttgtgctgtttcttatgttttgcttaaaaatttgatctgacaaacaaatttgtctaaattatgctcttgttctgactgtgtactgtacacatttgtattgctaccggtttggcacatagttttctctttgattgcagatcaaacccttctgattgcagattgcttggctatggctgatgtgctcactgttcttctttagcttgtatattgctgatggtggcttggctacggctgaaaaagttgctgctgcgccgacttggcaactgttgctccagtaatgctttgtcctctcttcctagccgccgacttggcacttggcagctgttgctcctgtaatgcgttgttatctcttatctcttgagatgtactatgattttgaggctgtttgacttgtgccagattgccagtgctgatgctatattatctcaggtttttatgctagtatatgttttactgtgtgctgcctgtgtcgagttacgtaatctattgaaccgctatgcgtgttgatgccctgttgttgcttgccagattgatgcccctgttgcttgcagcttgcaagctgtagtgaaatcctaaaattccaaaccaaatctattctgaacttttgaagatctgtgatgtccggaagaaaagattcaaacagataaacgggactctccagaatctataaaataaatgatcgacaaacgctttgctttggtaggcttcaagcttggtcacccggtccgggcctagaaggccagcttcggccgccccgggcaactttattatacaaagttgatagataaatcagatatctggttcctaaggacccggcggaccgattaaactgattcggtccgacgcgttacctaataacttcgtatagcatacattatacgaagttattagctaactaactagtaagcttaagccatgggtcgacggatccgttaactagcgtggcatttggcaccgccgcacactatgcgagctaggagtgctagtttacagatgaaactatgaaaccaagaaaacacaattgtccgtagctagcgcgtggcgtcgtgtcaagcttcacacagtatcttcgttcttcactataaatcgcgcctgttgttcgtgagacccaccaccgtggataacagtcccctaataataagcgatcaacagcactgctgatggctgaacaccgaggcgccgccgcgcgtaaccatccgccggagcagcccgtcgtgccggcgaacgacgccttccccgaccgcgcccagcagctctgcctcgacgccgggcgcgcgctcgcgatgtgcggcgtgctcgtcgccgtccctcccgcattttacgcgtcgacgtcgcggacgacaccgcacttgccttcgtcggcttcgtcctctggatcatcggtgcgtggctgtgcctcctggcgctcacgcccttggctccacgggcggtgagggcgggcggggccgccgccagcaccttgctgatcaggtgcctgtccctttcatgaactactagcgcccgcgcccgcggccgccgggcacaagagaacacatcgatgttcgctgcgtacgtcagcaataaggcactctttgtcagtagtcgagtgcatatgttgggtgtttgccctgggagatttcaagtgttgtggccattatcccgcaggataaaaaatcggcggcttttggattgatacggaaaataacgatgtttcatgctcgtgttgtgtgtgtgacatcttgtcagccaagtttttaaccgttgctactccccctctgtgggctcagtgtgtggaccggaatacgtcgtacataggccgtagcctaagcccaatatgccgtttttcaggttggcctgtgtgacgacaagcgggtctcaaaagcccatcacgcaactggcctgcaattattggaggagagcgcgtcgagttggttccagaggctgcgtggtggggccggactctgcgacgacctctcgttcgcgtccgatttggttgccgtgagccgtgacgtaacgcctccttccgttcctccctatataagttccacccccgggtccggtttccccaagccccagtgacccccgatcccgatcgcgaaatctccgcacccgccggcaagggaccgaagcaagcctctctcccgaccgtcgcatcaaggtacgcgtccgctcgatctgtcctcttccttctcgatttgacttgctgtggtgcccgatcacgggatcagaatcgcaccagtgtagatttcgcatgttctaagatgtgttagtttccaggctaatccagttctcttgacgcccgatccgatcgagctccgtgtttatttcagcctaatcgtagtattcccctaaaatttcctcattagggggttcgcaagattgttggtcgacaggttcacttatgctcgatcgcttacttttagtcgattcatgctgcgtactattgttgccccccgtggttttatcttttctcgtgtgaaatccagtagatatagtagatatcgtagcattaggttttaattcaatcgattgattattgtatcatcaaaattgagaagttcgaatcatgcctatcatgctgcctcaaccgaaatcctgtatattgaagtttcaattcaattgattgatcattcattagattcaaccaaaatctagaaggttagatgacgcatgtcatgctgcctgcgtagtttacctttgatctgtttatgattaccttatcagtaggatatttgtgattttgggaagtagcactaactgattcatgctgacatgatgttccctttcagattatactgttgagtcctatctaattgatgctttgtatgctatatgaatacgtcatggtaaattagcagttaattagcatattagcaattgggcgtacctcatcaggattgctcttgtagatgtgtgtggtgatgtttcttgttcaattcatgttctgctttaaaagtatgtgttctctgtttgttaattaagattcatggttataatgatttggacctaattaatcagggttgcccttttagatgcgtggttacttgttgagttcatttttttcctgctatagttgtatgcgtttgttcattcatggttagatttgatttgtttcttctctattccatgccttccatatacttcaattgtagcttaacatgagatttctgtatatgcaggtcgaccgccggggatccacacgacaccatggcccagtccaagcacggcctgaccaaggagatgaccatgaagtaccgcatggagggctgcgtggacggccacaagttcgtgatcaccggcgagggcatcggctaccccttcaagggcaagcaggccatcaacctgtgcgtggtggagggcggccccttgcccttcgccgaggacatcttgtccgccgccttcatgtacggcaaccgcgtgttcaccgagtacccccaggacatcgtcgactacttcaagaactcctgccccgccggctacacctgggaccgctccttcctgttcgaggacggcgccgtgtgcatctgcaacgccgacatcaccgtgagcgtggaggagaactgcatgtaccacgagtccaagttctacggcgtgaacttccccgccgacggccccgtgatgaagaagatgaccgacaactgggagccctcctgcgagaagatcatccccgtgcccaagcagggcatcttgaagggcgacgtgagcatgtacctgctgctgaaggacggtggccgcttgcgctgccagttcgacaccgtgtacaaggccaagtccgtgccccgcaagatgcccgactggcacttcatccagcacaagctgacccgcgaggaccgcagcgacgccaagaaccagaagtggcacctgaccgagcacgccatcgcctccggctccgccttgccctccggactcagatctcgatagagtcaacctagacttgtccatcttctggattggccaacttaattaatgtatgaaataaaaggatgcacacatagtgacatgctaatcactataatgtgggcatcaaagttgtgtgttatgtgtaattactagttatctgaataaaagagaaagagatcatccatatttcttatcctaaatgaatgtcacgtgtctttataattctttgatgaaccagatgcatttcattaaccaaatccatatacatataaatattaatcatatataattaatatcaattgggttagcaaaacaaatctagtctaggtgtgttttgcgaattgcggcgcccttactttaacgcctctaaccaacacccctttatctttataaggaacaataaacagaatttgccccactgttctaaatcacctaataatatccccagctaaaaacaataaaggtttcctagaattaagacaagcatgactgttcctccaggagggtttggaacattgttgcagtcttgcagatacgggcgaagggtgagaaacagagcggagggctggaggtgacctcggtagtcgacgccggagttgagcttgacaacgacggggcggcccctgatggacttgaggaagtccgatggcgtcttcaccgtcccgccggcgcccgaggcgggcctgtcgctgccgccgccgccgctgctcatcttgcgcgctgtgcccccggcggtgtccctgtgttgcggatcgcgggtgggccaggtggatgcgagggcgacccgtttggactccggccggagccgccggatccctggtcggtgtcagtgccgtttactctgggccccacgtgtcagtaccgtctgtagatgacaacaacccgtcgtccacagtcatgtccaaaatatcctttcttcttttttttcgattcggatatctatcttccttttttttttccaaaaatcttcttgacgcaccagcgcgcacgtttgtggtaaacgccgacacgtcggtcccacgtcgatagaccccacccaccagtgagtagcgtgtacgtattcgggggtgacggacgtgtcgccgtcgtcttgctagtcccattcccatctgagccacacatctctgaacaaaaaaaaggagggaggcctccacgcacatccccctccgtgccacccgccccaaaccctcgcgccgcctccgagacagccgccgcaaccatggccaccgccgccgccgcgtctaccgcgctcactggcgccactaccgctgcgcccaaggcgaggcgccgggcgcacctcctggccacccgccgcgccctcgccgcgcccatcaggtgctcagcggcgtcacccgccatgccgatggctcccccggccaccccgctccggccgtggggccccaccgagccccgcaagggtgctgacatcctcgtcgagtccctcgagcgctgcggcgtccgcgacgtcttcgcctaccccggcggcgcgtccatggagatccaccaggcactcacccgctcccccgtcatcgccaaccacctcttccgccacgagcaaggggaggcctttgccgcctccggctacgcgcgctcctcgggccgcgtcggcgtctgcatcgccacctccggccccggcgccaccaacctagtctccgcgctcgccgacgcgctgctcgattccgtccccatggtcgccatcacgggacaggtggcgcgacgcatgattggcaccgacgccttccaggagacgcccatcgtcgaggtcacccgctccatcaccaagcacaactacctggtcctcgacgtcgacgacatcccccgcgtcgtgcaggaggctttcttcctcgcctcctctggtcgaccagggccggtgcttgtcgacatccccaaggacatccagcagcagatggcggtgcctgtctgggacaagcccatgagtctgcctgggtacattgcgcgccttcccaagccccctgcgactgagttgcttgagcaggtgctgcgtcttgttggtgaatcgcggcgccctgttctttatgtgggcggtggctgcgcagcatctggtgaggagttgcgacgctttgtggagctgactggaatcccggtcacaactactcttatgggcctcggcaacttccccagcgacgacccactgtctctgcgcatgctaggtatgcatgggacggtgtatgcaaattatgcagtggataaggccgatctgttgcttgcacttggtgtgcggtttgatgatcgcgtgacagggaagattgaggcttttgcaagcagggctaagattgtgcacgttgatattgatccggctgagattggcaagaacaagcagccacatgtgtccatctgtgcagatgttaagcttgctttgcagggcatgaatgctcttcttgaaggaagcacatcaaagaagagctttgactttggctcatggaacgatgagttggatcagcagaagagggaattcccccttgggtataaaacatctaatgaggagatccagccacaatatgctattcaggttcttgatgagctgacgaaaggcgaggccatcatcggcacaggtgttgggcagcaccagatgtgggcggcacagtactacacttacaagcggccaaggcagtggttgtcttcagctggtcttggggctatgggatttggtttgccggctgctgctggtgcttctgtggcaaacccaggtgtcactgttgttgacatcgatggagatggtagctttctcatgaacgttcaggagctagctatgatccgaattgagaacctcccagtgaaggtctttgtgctaaacaaccagcacctggggatggtggtgcagttggaggacaggttctataaggccaacagagcgcacacatacttgggaaacccagagaatgaaagtgagatatatccagatttcgtgacgatcgccaaagggttcaacattccagcggtccgtgtgacaaagaagaacgaagtccgcgcagcgataaagaagatgctcgagactccagggccgtacctcttggatataatcgtcccacaccaggagcatgtgttgcctatgatccctagtggtggggctttcaaggatatgatcctggatggtgatggcaggactgtgtactgactagctagtcagttaacagatctgccagatcctcggtgtacaaataacccgtcttatcctatgagacgggccggcgtcagtgtgttctggaggaatttttatgtcagagcctttttctttgtgtgcttgatgtagatgccaagggaagcttattggctgttgaagcttgatgcaaaataaattatggaactctgttttttgtttatctaataataactagcaaatatgcttccattgcattgaaactaacagccttttgtgtttccaagttttattttgtgacaatgtcatctatttcaattagttgtggaatcggaaacttgcaggactaacttggaaactccaatccctcagcatcctggactttttcctggtgtaatccatgtagatattattttaatcatcattttagttctggaggtttttccatctccggttttgctcccctttcttcaaaaaaaaaaaaaaaatgccgtaggcgccgcaacgcccacctgttgttcaaactcatgggcacgagtggctcgaagattttatacaacaattgctgtagtttcaccgttgctggtgaagaagcatttttttaaaaaaatatagtggtattcattttaattagtttagttgtgcagcgagcaaaatttggacatgctctgctcggaatctgatcgacctagacacagattagcagcagtagctttgtcatctgttccaagagttgcgatctgatagaagaaaaaaaaaccttcccttcaatgtaaaaccgaaactaacaagaaagaagcacagtgccgtttaggcaagtatggagtacgtattaagcatgtagaaggccatgcatgaaccactaacaagaaagaagcgcagtgccattcaggcaagcataagcatgtagattggcatgcatgaacaactaacagtagatcgtctctggtctgattagaagttttttgggaagccaagaaatcatgtacaactggttccatctcaaattccgtggcaaaaagaggcctaagcaacatacctcgagtagatcacattcaagcttggtcacccggtccgtcaatattctgattccgatgacttcgtaggttcctagctcaagccgctcgtgtccaagcgtcacttacgattagctaatgattacggcatctaggaccgactagtggcgcgccgactagctagctaaggtaccgagctcgaattcattccgattaatcgtggcctcttgctcttcaggatgaagagctatgtttaaacgtgcaagcgctactagacaattcagtacattaaaaacgtccgcaatgtgttattaagttgtctaagcgtcaatttgtttacaccacaatatatcctgcca

SEQ ID NO: 42 - DNA, 21585 bp, Artificial sequence
  PHP95072
gtttacccgccaatatatcctgtcaaacactgatagtttaaactgaaggcgggaaacgacaatctgatcatgagcggagaattaagggagtcacgttatgacccccgccgatgacgcgggacaagccgttttacgtttggaactgacagaaccgcaacgttgaaggagccactcagcaagctggtacgattgtaatacgactcactatagggcgaattgagcgctgtttaaacgctcttcaactggaagagcggttacgctgtttaaacgctcttcaactggaagagcggttactaccggttcactagctagctgctaatcgagctagttaccctatgaggtgacatgaagcgctcacggttactatgacggttagcttcacgactgttggtggcagtagcgtacgacttagctatagttccggacttacccttaagcgatttaaatctgcggttaccgaattcgagctcggtacctagtacccttgtacttttggtttcacctgcatagagaaaacccacaagaatatgacagtctgatttgtcagtctcattctcaagcaacatttctctatccgttactttcatggtgaataacacaatccatcatcaatactttgtgttactcagaaactgaaagttattccgagtcttgcatatctttggacctactcgtttttctaccattattgctgattgttaagctctcgctacttgaatcggcattgttggagtgggaaggttcaaaaaattggagttatgactagttgtctctttctatgtacgatggagaaaatgaataaacaactgagaaaatggctcttgtttagttgatgatgctcttaagctttccactggttgccatatatgatttgggcatttcactttgatcttaatgggccttgtaaagcccaagactcatgattatctttagttgatgctcttaattaggtgtgggcaaataattcaaactgtatgtacccgaccaaaaccaaagcaaaaataatcgaaccaaaccgaaaatttaaaaataaccgaatgaaaactaaatcctataactgaaagaactgaaaccgaatcaaaatatttaatgtaaccaaaaatatccgaaatataattatattgtcaaaaatattaataatttctagattaaataattaaaaatacttaaaaatttatataaaatagtaaaaatactcgaaaataaccacaaatattcaaaaacaaccgaaatatcccaaaatattcaaagcaaaataaccgaatggataccaaattttaaaaccgaaaaaactggaacaaaaccaaaatcgaaccaaaatttcaaaaatcgaataaatactaaactttagaacaaaaaaaaacgataaccgaatgtatacgaaccaaagccgaattagataaccgaacgtccaggactactcttaatctttccgccacttatgatttgggctattactttgtttataatgagccttttcaagctcaagttcatgattgtccgtgagatgagaaactgacttgttggattcgaaaccctagctagtattggttaatacttaatacataaatgacctgcattgacatcatcatccaagaaaataaaaattgtatgcttgagatatttagttttcctagctaggttttctttattttagtaccgaatctttaggtgtgccacgttaatttagacccattttttcatacttaccaactgagtctagtttaatcatgactataatcgtataaaatgattcagtcgacgtcattgcgaacgtatataaaatcatccaaattgacgtcattccaaagaggtaagcatgcttatctaagagtccgagcatactaaacaagacgacattttatttgcactccaaatcaaattttgtattgcctaaagaaaaacaatcaaactcaagtttcttaaaattaatttcattcaaactaatcactttcaatatctcacatattattcatgccatttctatttgtctaaacatgatttaaaaaaaaaagtaaaatacaaagattactatgcaaaaactctataaaaaaaaattcaaatttcttatttatttgtgacatcaaattttcaaaataatttttttaattatcggttgatccggtcagtcgataaaaacataaactttcagcgaccgttaaaactttcctactaccgatttagagaaaatcttagcttgaaacgtaattgtaacctgccttcatgcaagtcgcaagatatgtcatcctaagttgtatatgttttctcaaaagatgtatttacttgagaaaatacgtttcaacgttgatggacaaccaattaagaatcaagcacctttcgtaatcaatttaggcttatcgtctaaggtatactgatttacgacagttgactagacttataaggaacaaaataatagaatagtttctaaacacttcacctaatcatagagactaagatggtaattcgtaaacgacaaagcctagtgacactgtccattgtaaaattccacatcatattagtattaaacatatacatgtagtttcctgaacacatgtagtatcaaacacacttcgtggcttcttcctcgaaacctgcggccgcgctatagttccggacttacccttaagataacttcgtatagcatacattatacgaagttatgggcccacgcgtgaagagcggttaccagagctggtcacctttgtccaccaagatggaactgtcttcggccagaatggccatctggattcagcaggcctagaaggccatttatcgctatcaactttgtatagaaaagttgggccgaattcgagctcggtacggccagaatggcccggaccgaagcttgtgaatttatgagagctgtacttactcactaaaacaaacaaacactgatagtttaaactgaaggcgggaaacgacaatctgatcatgagcggagaattaagggagtcacgttatgacccccgccgatgacgcgggacaagccgttttacgtttggaactgacagaaccgcaacgattgaaggagccactcagccgcgggtttctggagtttaatgagctaagcacatacgtcagaaaccattattgcgcgttcaaaagtcgcctaaggtcactatcagctagcaaatatttcttgtcaaaaatgctccactgacgttccataaattcccctcggtatccaattagagtctcatattcactccccgggggatctcgactctagaggatcgctcaggaaggccgctgagatagaggcatggcggccaatgcgggcggcggtggagcgggaggaggcagcggcagcggcagcgtggctgcgccggcggtgtgccgccccagcggctcgcggtggacgccgacgccggagcagatcaggatgctgaaggagctctactacggctgcggcatccggtcgcccagctcggagcagatccagcgcatcaccgccatgctgcggcagcacggcaagatcgagggcaagaacgtcttctactggttccagaaccacaaggcccgcgagcgccagaagcgccgcctcaccagcctcgacgtcaacgtgcccgccgccggcgcggccgacgccaccaccagccaactcggcgtcctctcgctgtcgtcgccgccgccttcaggcgcggcgcctccctcgcccaccctcggcttctacgccgccggcaatggcggcggatcggctgtgctgctggacacgagttccgactggggcagcagcggcgctgccatggccaccgagacatgcttcctgcaggactacatgggcgtgacggacacgggcagctcgtcgcagtggccacgcttctcgtcgtcggacacgataatggcggcggccgcggcgcgggcggcgacgacgcgggcgcccgagacgctccctctcttcccgacctgcggcgacgacggcggcagcggtagcagcagctacttgccgttctggggtgccgcgtccacaactgccggcgccacttcttccgttgcgatccagcagcaacaccagctgcaggagcagtacagcttttacagcaacagcaacagcacccagctggccggcaccggcaaccaagacgtatcggcaacagcagcagcagccgccgccctggagctgagcctcagctcatggtgctccccttaccctgctgcagggagtatgtgagagcaacgcgagctgccactgctcttcactgatgtctctggaatggaaggaggaggaagtgagcatagcgttggtgcgttgctgtcaagggcgaattcacatggttaacctagacttgtccatcttctggattggccaacttaattaatgtatgaaataaaaggatgcacacatagtgacatgctaatcactataatgtgggcatcaaagttgtgtgttatgtgtaattactagttatctgaataaaagagaaagagatcatccatatttcttatcctaaatgaatgtcacgtgtctttataattctttgatgaaccagatgcatttcattaaccaaatccatatacatataaatattaatcatatataattaatatcaattgggttagcaaaacaaatctagtctaggtgtgttttgcgaatgcggccgccaccgcggtggagctcgaattccggtccgggcctagaaggccagcttcaagtttgtacaaaaaagcaggctccggccagaatggcccggaccgggttaccgaattcgagctcggtaccatttaaattgcgcccgccacggccgtggaggtcgtattccggtcagcttgcatccctgcagtgcagcgtgacccggtcgtgcccctctctagagataatgagcattgcatgtctaagttataaaaaattaccacatattttttttgtcacacttgtttgaagtgcagtttatctatctttatacatatatttaaactttactctacgaataatataatctatagtactacaataatatcagtgttttagagaatcatataaatgaacagttagacatggtctaaaggacaattgagtattttgacaacaggactctacagttttatctttttagtgtgcatgtgttctcctttttttttgcaaatagcttcacctatataatacttcatccattttattagtacatccatttagggtttagggttaatggtttttatagactaatttttttagtacatctattttattctattttagcctctaaattaagaaaactaaaactctattttagtttttttatttaataatttagatataaaatagaataaaataaagtgactaaaaattaaacaaataccctttaagaaattaaaaaaactaaggaaacatttttcttgtttcgagtagataatgccagcctgttaaacgccgtcgacgagtctaacggacaccaaccagcgaaccagcagcgtcgcgtcgggccaagcgaagcagacggcacggcatctctgtcgctgcctctggacccctctcgagagttccgctccaccgttggacttgctccgctgtcggcatccagaaattgcgtggcggagcggcagacgtgagccggcacggcaggcggcctcctcctcctctcacggcaccggcagctacgggggattcctttcccaccgctccttcgctttcccttcctcgcccgccgtaataaatagacaccccctccacaccctctttccccaacctcgtgttgttcggagcgcacacacacacaaccagatctcccccaaatccacccgtcggcacctccgcttcaaggtacgccgctcgtcctcccccccccccctctctaccttctctagatcggcgttccggtccatgcatggttagggcccggtagttctacttctgttcatgtttgtgttagatccgtgtttgtgttagatccgtgctgctagcgttcgtacacggatgcgacctgtacgtcagacacgttctgattgctaacttgccagtgtttctctttggggaatcctgggatggctctagccgttccgcagacgggatcgatttcatgattttttttgtttcgttgcatagggtttggtttgcccttttcctttatttcaatatatgccgtgcacttgtttgtcgggtcatcttttcatgcttttttttgtcttggttgtgatgatgtggtctggttgggcggtcgttctagatcggagtagaattctgtttcaaactacctggtggatttattaattttggatctgtatgtgtgtgccatacatattcatagttacgaattgaagatgatggatggaaatatcgatctaggataggtatacatgttgatgcgggttttactgatgcatatacagagatgctttttgttcgcttggttgtgatgatgtggtgtggttgggcggtcgttcattcgttctagatcggagtagaatactgtttcaaactacctggtgtatttattaattttggaactgtatgtgtgtgtcatacatcttcatagttacgagtttaagatggatggaaatatcgatctaggataggtatacatgttgatgtgggttttactgatgcatatacatgatggcatatgcagcatctattcatatgctctaaccttgagtacctatctattataataaacaagtatgttttataattattttgatcttgatatacttggatgatggcatatgcagcagctatatgtggatttttttagccctgccttcatacgctatttatttgcttggtactgtttcttttgtcgatgctcaccctgttgtttggtgttacttctgcaggtcgactctagaggatccatggccactgtgaacaactggctcgctttctccctctccccgcaggagctgccgccctcccagacgacggactccacactcatctcggccgccaccgccgaccatgtctccggcgatgtctgcttcaacatcccccaagattggagcatgaggggatcagagctttcggcgctcgtcgcggagccgaagctggaggacttcctcggcggcatctccttctccgagcagcatcacaaggccaactgcaacatgatacccagcactagcagcacagtttgctacgcgagctcaggtgctagcaccggctaccatcaccagctgtaccaccagcccaccagctcagcgctccacttcgcggactccgtaatggtggcttcctcggccggtgtccacgacggcggtgccatgctcagcgcggccgccgctaacggtgtcgctggcgctgccagtgccaacggcggcggcatcgggctgtccatgattaagaactggctgcggagccaaccggcgcccatgcagccgagggtggcggcggctgagggcgcgcaggggctctctttgtccatgaacatggcggggacgacccaaggcgctgctggcatgccacttctcgctggagagcgcgcacgggcgcccgagagtgtatcgacgtcagcacagggtggagccgtcgtcgtcacggcgccgaaggaggatagcggtggcagcggtgttgccggcgctctagtagccgtgagcacggacacgggtggcagcggcggcgcgtcggctgacaacacggcaaggaagacggtggacacgttcgggcagcgcacgtcgatttaccgtggcgtgacaaggcatagatggactgggagatatgaggcacatctttgggataacagttgcagaagggaagggcaaactcgtaagggtcgtcaagtctatttaggtggctatgataaagaggagaaagctgctagggcttatgatcttgctgctctgaagtactggggtgccacaacaacaacaaattttccagtgagtaactacgaaaaggagctcgaggacatgaagcacatgacaaggcaggagtttgtagcgtctctgagaaggaagagcagtggtttctccagaggtgcatccatttacaggggagtgactaggcatcaccaacatggaagatggcaagcacggattggacgagttgcagggaacaaggatctttacttgggcaccttcagcacccaggaggaggcagcggaggcgtacgacatcgcggcgatcaagttccgcggcctcaacgccgtcaccaacttcgacatgagccgctacgacgtgaagagcatcctggacagcagcgccctccccatcggcagcgccgccaagcgcctcaaggaggccgaggccgcagcgtccgcgcagcaccaccacgccggcgtggtgagctacgacgtcggccgcatcgcctcgcagctcggcgacggcggagccctggcggcggcgtacggcgcgcactaccacggcgccgcctggccgaccatcgcgttccagccgggcgccgccagcacaggcctgtaccacccgtacgcgcagcagccaatgcgcggcggcgggtggtgcaagcaggagcaggaccacgcggtgatcgcggccgcgcacagcctgcaggacctccaccacctgaacctgggcgcggccggcgcgcacgactttttctcggcagggcagcaggccgccgccgctgcgatgcacggcctgggtagcatcgacagtgcgtcgctcgagcacagcaccggctccaactccgtcgtctacaacggcggggtcggcgacagcaacggcgccagcgccgtcggcggcagtggcggtggctacatgatgccgatgagcgctgccggagcaaccactacatcggcaatggtgagccacgagcaggtgcatgcacgggcctacgacgaagccaagcaggctgctcagatggggtacgagagctacctggtgaacgcggagaacaatggtggcggaaggatgtctgcatgggggactgtcgtgtctgcagccgcggcggcagcagcaagcagcaacgacaacatggccgccgacgtcgggcatggcggcgcgcagctcttcagtgtctggaacgacacttaagcgtacgtgccggcctggctctccgaaagggcgtattccagcacactggcggccgttactagacccaacctagacttgtccatcttctggattggccaacttaattaatgtatgaaataaaaggatgcacacatagtgacatgctaatcactataatgtgggcatcaaagttgtgtgttatgtgtaattactagttatctgaataaaagagaaagagatcatccatatttcttatcctaaatgaatgtcacgtgtctttataattctttgatgaaccagatgcatttcattaaccaaatccatatacatataaatattaatcatatataattaatatcaattgggttagcaaaacaaatctagtctaggtgtgttttgcgaatgcggcctccgggcacccagctttcttgtacaaagtggccgttaacggatcggccagaatggcccggaccgggttaccgaattcgagctcggtaccctggttcacaaactcaatacaacacacagtggagtagggtattacgctccggcggcccgaaccactctaaatccttgtgtcctcgtgtgctcttccaccattaatgactgtaattgcagggacacgaagagttgtagcgcttttgccaacaagatccgctatatgctagtagagtggaacctgcacagcaacaagcatccaataatctgagaataagaattatgtgtggtgatggttctcatctctgcaactcgccattttcgcgagagaaccaaatccaagttggtgaagatcatgatttgggctcatgggctggcatagtagctattacctttgcaattgtggttcgaatctatccgatattctccttttcagggagagctaatgcttatgcttattgggtattttggtttgacactgcttcacgcccaaaaaaaggcaactatgtctgagttggatatggcccaaaaaaaggcagctatgtctgagttggatatggaagtcttctttcgtttagggtgaagtaagaccaagctcatgagcttattatcttaggtcggaacaaattagttgataggcatggcacatttatcaaattataatgattttaacagaaaagcaacacctctttttcagcagcaccagctttgcaagctgcaattgacactccaagcatagtatttgctccaaactcagcctgcatttcgcacaatatcatatctatttccatttggataaaatatattttccagaaatatgggaacagaatcaagatacagaaaaaagttgtggtagtagtggtaagtggaaacacaagtacagtgaaaagatagcattatttctgaacagtcaaattaaccgaaataagtagtatcacatactgcccctaaattgactacacccaatgtaaagaattgcttgagcatattgagccatcagttgtttgtttgtgtaacggatttgacaatgcagagttcaggagcaaaaaaccgcaaaggagagaaagagggaaaggatctcctagtatcccaccttgtggcgcgccctgtcaagtgcatgatggcctggtcgatctgcgtctgctgctgcggttccatcccaacgagtgcctccgacaccttgtcgttgatcacccgcaccgcgtaggcgacccccctggcgaggaacttccgcctctcggaggccccggccgcgtcggcggcggcgccctcgagcgcgcccacgctagccgtagatgctcggtgcacggccttgttggtgtgcaactcgacctcaacggccggtgcgctacgcccgtcaaggatctggcgcgcccgcaccctcgtgatcacggtgggcgcctcccgcctcatgtggccgacgatgaaaagcgccgggttaggggccttggcgcgcaccgccgtattcagggcctcctcgctcttgcgcgagagcaggtgcttccccaggtactcctgcactgacaaggctgccacagcggtggaatttgtcctcacgacttcgccacgtcgtcctcacctccctggcttcccacgactccgccgtatcgaggtgctcggtgggtcgtcttaatccgaagtccgaactaggaagacgagacagagaggtctgaggaatgggcctcgtttgatgttgagctgaattatttttccagcataagcccaggtcttggtccatgaacaaaattactagaaacccagcccagtactacgatctaaaagagggactgccactggatagctctctctagcattctccacgctccaatacagcggcgtcgtgtctatccgggtctatccgcgaacacgtgagaactctccagaaactgctttctcctccacttcatctctctcgctttccctctataaaaagaccccttctaggaattgagggagacagcaagcaccaagcagcgatccgaagctcaatcaattcactcaaacctcttccccaaatcttcgattagatcttcgttgacaagaagactagaaccgaacctgacatgtccaacctgctcacggttcaccagaaccttccggctcttccagtggacgcgacgtccgatgaagtcaggaagaacctcatggacatgttccgcgacaggcaagcgttcagcgagcacacctggaagatgctgctctccgtctgccgctcctgggctgcatggtgcaagctgaacaacaggaagtggttccccgctgagcccgaggacgtgagggattaccttctgtacctgcaagcgcgaggtttgtttctgcttctacctttgatatatatataataattatcattaattagtagtaatataatatttcaaatatttttttcaaaataaaagaatgtagtatatagcaattgcttttctgtagtttataagtgtgtatattttaatttataacttttctaatatatgaccaaaacatggtgatgcctaggtctggcagtgaagaccatccagcaacaccttggacaactgaacatgcttcacaggcgctccggcctcccgcgccccagcgactcgaacgccgtgagcctcgtcatgcgccgcatcaggaaggaaaacgtcgatgccggcgaaagggcaaagcaggccctcgcgttcgagaggaccgatttcgaccaggtccgcagcctgatggagaacagcgacaggtgccaggacattaggaacctggcgttcctcggaattgcatacaacacgctcctcaggatcgcggaaattgcccgcattcgcgtgaaggacattagccgcaccgacggcggcaggatgcttatccacattggcaggaccaagacgctcgtttccaccgcaggcgtcgaaaaggccctcagcctcggagtgaccaagctcgtcgaacgctggatctccgtgtccggcgtcgcggacgacccaaacaactacctcttctgccgcgtccgcaagaacggggtggctgcccctagcgccaccagccaactcagcacgagggccttggaaggtattttcgaggccacccaccgcctgatctacggcgcgaaggatgacagcggtcaacgctacctcgcatggtccgggcactccgcccgcgttggagctgctagggacatggcccgcgccggtgtttccatccccgaaatcatgcaggcgggtggatggacgaacgtgaacattgtcatgaactacattcgcaaccttgacagcgagacgggcgcaatggttcgcctcctggaagatggtgactgaggtacccaacctagacttgtccatcttctggattggccaacttaattaatgtatgaaataaaaggatgcacacatagtgacatgctaatcactataatgtgggcatcaaagttgtgtgttatgtgtaattactagttatctgaataaaagagaaagagatcatccatatttcttatcctaaatgaatgtcacgtgtctttataattctttgatgaaccagatgcatttcattaaccaaatccatatacatataaatattaatcatatataattaatatcaattgggttagcaaaacaaatctagtctaggtgtgttttgcgatccgatatcgaattggccacggtaccagctgctgctgttctagggttcacaagtctgcctatttgtcttccccaatggagctatggttgtctggtctggtccttggtcgtgtcccgtttcattgtgtactatttacctgtaatgtgtatccttaagtctggtttgatggtgtctgaaacgttttgctgtggtagagcagcatggaagaactataatgaataagtgatccctaatcattgtgtccaaattttgcttctgctatacccttttgtgctgtttcttatgttttgcttaaaaatttgatctgacaaacaaatttgtctaaattatgctcttgttctgactgtgtactgtacacatttgtattgctaccggtttggcacatagttttctctttgattgcagatcaaacccttctgattgcagattgcttggctatggctgatgtgctcactgttcttctttagcttgtatattgctgatggtggcttggctacggctgaaaaagttgctgctgcgccgacttggcaactgttgctccagtaatgctttgtcctctcttcctagccgccgacttggcacttggcagctgttgctcctgtaatgcgttgttatctcttatctcttgagatgtactatgattttgaggctgtttgacttgtgccagattgccagtgctgatgctatattatctcaggtttttatgctagtatatgttttactgtgtgctgcctgtgtcgagttacgtaatctattgaaccgctatgcgtgttgatgccctgttgttgcttgccagattgatgcccctgttgcttgcagcttgcaagctgtagtgaaatcctaaaattccaaaccaaatctattctgaacttttgaagatctgtgatgtccggaagaaaagattcaaacagataaacgggactctccagaatctataaaataaatgatcgacaaacgctttgctttggtaggcttcaagcttggtcacccggtccgggcctagaaggccagcttcggccgccccgggcaactttattatacaaagttgatagataaatcagatatctggttcctaaggacccggcggaccgattaaactgattcggtccgacgcgttacctaataacttcgtatagcatacattatacgaagttattagctaactaactagtaagcttaagccatgggtcgacggatccgttaactagcgtggcatttggcaccgccgcacactatgcgagctaggagtgctagtttacagatgaaactatgaaaccaagaaaacacaattgtccgtagctagcgcgtggcgtcgtgtcaagcttcacacagtatcttcgttcttcactataaatcgcgcctgttgttcgtgagacccaccaccgtggataacagtcccctaataataagcgatcaacagcactgctgatggctgaacaccgaggcgccgccgcgcgtaaccatccgccggagcagcccgtcgtgccggcgaacgacgccttccccgaccgcgcccagcagctctgcctcgacgccgggcgcgcgctcgcgatgtgcggcgtgctcgtcgccgtccctcccgcattttacgcgtcgacgtcgcggacgacaccgcacttgccttcgtcggcttcgtcctctggatcatcggtgcgtggctgtgcctcctggcgctcacgcccttggctccacgggcggtgagggcgggcggggccgccgccagcaccttgctgatcaggtgcctgtccctttcatgaactactagcgcccgcgcccgcggccgccgggcacaagagaacacatcgatgttcgctgcgtacgtcagcaataaggcactctttgtcagtagtcgagtgcatatgttgggtgtttgccctgggagatttcaagtgttgtggccattatcccgcaggataaaaaatcggcggcttttggattgatacggaaaataacgatgtttcatgctcgtgttgtgtgtgtgacatcttgtcagccaagtttttaaccgttgctactccccctctgtgggctcagtgtgtggaccggaatacgtcgtacataggccgtagcctaagcccaatatgccgtttttcaggttggcctgtgtgacgacaagcgggtctcaaaagcccatcacgcaactggcctgcaattattggaggagagcgcgtcgagttggttccagaggctgcgtggtggggccggactctgcgacgacctctcgttcgcgtccgatttggttgccgtgagccgtgacgtaacgcctccttccgttcctccctatataagttccacccccgggtccggtttccccaagccccagtgacccccgatcccgatcgcgaaatctccgcacccgccggcaagggaccgaagcaagcctctctcccgaccgtcgcatcaaggtacgcgtccgctcgatctgtcctcttccttctcgatttgacttgctgtggtgcccgatcacgggatcagaatcgcaccagtgtagatttcgcatgttctaagatgtgttagtttccaggctaatccagttctcttgacgcccgatccgatcgagctccgtgtttatttcagcctaatcgtagtattcccctaaaatttcctcattagggggttcgcaagattgttggtcgacaggttcacttatgctcgatcgcttacttttagtcgattcatgctgcgtactattgttgccccccgtggttttatcttttctcgtgtgaaatccagtagatatagtagatatcgtagcattaggttttaattcaatcgattgattattgtatcatcaaaattgagaagttcgaatcatgcctatcatgctgcctcaaccgaaatcctgtatattgaagtttcaattcaattgattgatcattcattagattcaaccaaaatctagaaggttagatgacgcatgtcatgctgcctgcgtagtttacctttgatctgtttatgattaccttatcagtaggatatttgtgattttgggaagtagcactaactgattcatgctgacatgatgttccctttcagattatactgttgagtcctatctaattgatgctttgtatgctatatgaatacgtcatggtaaattagcagttaattagcatattagcaattgggcgtacctcatcaggattgctcttgtagatgtgtgtggtgatgtttcttgttcaattcatgttctgctttaaaagtatgtgttctctgtttgttaattaagattcatggttataatgatttggacctaattaatcagggttgcccttttagatgcgtggttacttgttgagttcatttttttcctgctatagttgtatgcgtttgttcattcatggttagatttgatttgtttcttctctattccatgccttccatatacttcaattgtagcttaacatgagatttctgtatatgcaggtcgaccgccggggatccacacgacaccatggcccagtccaagcacggcctgaccaaggagatgaccatgaagtaccgcatggagggctgcgtggacggccacaagttcgtgatcaccggcgagggcatcggctaccccttcaagggcaagcaggccatcaacctgtgcgtggtggagggcggccccttgcccttcgccgaggacatcttgtccgccgccttcatgtacggcaaccgcgtgttcaccgagtacccccaggacatcgtcgactacttcaagaactcctgccccgccggctacacctgggaccgctccttcctgttcgaggacggcgccgtgtgcatctgcaacgccgacatcaccgtgagcgtggaggagaactgcatgtaccacgagtccaagttctacggcgtgaacttccccgccgacggccccgtgatgaagaagatgaccgacaactgggagccctcctgcgagaagatcatccccgtgcccaagcagggcatcttgaagggcgacgtgagcatgtacctgctgctgaaggacggtggccgcttgcgctgccagttcgacaccgtgtacaaggccaagtccgtgccccgcaagatgcccgactggcacttcatccagcacaagctgacccgcgaggaccgcagcgacgccaagaaccagaagtggcacctgaccgagcacgccatcgcctccggctccgccttgccctccggactcagatctcgatagagtcaacctagacttgtccatcttctggattggccaacttaattaatgtatgaaataaaaggatgcacacatagtgacatgctaatcactataatgtgggcatcaaagttgtgtgttatgtgtaattactagttatctgaataaaagagaaagagatcatccatatttcttatcctaaatgaatgtcacgtgtctttataattctttgatgaaccagatgcatttcattaaccaaatccatatacatataaatattaatcatatataattaatatcaattgggttagcaaaacaaatctagtctaggtgtgttttgcgaattgcggcgcccttactttaacgcctctaaccaacacccctttatctttataaggaacaataaacagaatttgccccactgttctaaatcacctaataatatccccagctaaaaacaataaaggtttcctagaattaagacaagcatgactgttcctccaggagggtttggaacattgttgcagtcttgcagatacgggcgaagggtgagaaacagagcggagggctggaggtgacctcggtagtcgacgccggagttgagcttgacaacgacggggcggcccctgatggacttgaggaagtccgatggcgtcttcaccgtcccgccggcgcccgaggcgggcctgtcgctgccgccgccgccgctgctcatcttgcgcgctgtgcccccggcggtgtccctgtgttgcggatcgcgggtgggccaggtggatgcgagggcgacccgtttggactccggccggagccgccggatccctggtcggtgtcagtgccgtttactctgggccccacgtgtcagtaccgtctgtagatgacaacaacccgtcgtccacagtcatgtccaaaatatcctttcttcttttttttcgattcggatatctatcttccttttttttttccaaaaatcttcttgacgcaccagcgcgcacgtttgtggtaaacgccgacacgtcggtcccacgtcgatagaccccacccaccagtgagtagcgtgtacgtattcgggggtgacggacgtgtcgccgtcgtcttgctagtcccattcccatctgagccacacatctctgaacaaaaaaaaggagggaggcctccacgcacatccccctccgtgccacccgccccaaaccctcgcgccgcctccgagacagccgccgcaaccatggccaccgccgccgccgcgtctaccgcgctcactggcgccactaccgctgcgcccaaggcgaggcgccgggcgcacctcctggccacccgccgcgccctcgccgcgcccatcaggtgctcagcggcgtcacccgccatgccgatggctcccccggccaccccgctccggccgtggggccccaccgagccccgcaagggtgctgacatcctcgtcgagtccctcgagcgctgcggcgtccgcgacgtcttcgcctaccccggcggcgcgtccatggagatccaccaggcactcacccgctcccccgtcatcgccaaccacctcttccgccacgagcaaggggaggcctttgccgcctccggctacgcgcgctcctcgggccgcgtcggcgtctgcatcgccacctccggccccggcgccaccaacctagtctccgcgctcgccgacgcgctgctcgattccgtccccatggtcgccatcacgggacaggtggcgcgacgcatgattggcaccgacgccttccaggagacgcccatcgtcgaggtcacccgctccatcaccaagcacaactacctggtcctcgacgtcgacgacatcccccgcgtcgtgcaggaggctttcttcctcgcctcctctggtcgaccagggccggtgcttgtcgacatccccaaggacatccagcagcagatggcggtgcctgtctgggacaagcccatgagtctgcctgggtacattgcgcgccttcccaagccccctgcgactgagttgcttgagcaggtgctgcgtcttgttggtgaatcgcggcgccctgttctttatgtgggcggtggctgcgcagcatctggtgaggagttgcgacgctttgtggagctgactggaatcccggtcacaactactcttatgggcctcggcaacttccccagcgacgacccactgtctctgcgcatgctaggtatgcatgggacggtgtatgcaaattatgcagtggataaggccgatctgttgcttgcacttggtgtgcggtttgatgatcgcgtgacagggaagattgaggcttttgcaagcagggctaagattgtgcacgttgatattgatccggctgagattggcaagaacaagcagccacatgtgtccatctgtgcagatgttaagcttgctttgcagggcatgaatgctcttcttgaaggaagcacatcaaagaagagctttgactttggctcatggaacgatgagttggatcagcagaagagggaattcccccttgggtataaaacatctaatgaggagatccagccacaatatgctattcaggttcttgatgagctgacgaaaggcgaggccatcatcggcacaggtgttgggcagcaccagatgtgggcggcacagtactacacttacaagcggccaaggcagtggttgtcttcagctggtcttggggctatgggatttggtttgccggctgctgctggtgcttctgtggcaaacccaggtgtcactgttgttgacatcgatggagatggtagctttctcatgaacgttcaggagctagctatgatccgaattgagaacctcccagtgaaggtctttgtgctaaacaaccagcacctggggatggtggtgcagttggaggacaggttctataaggccaacagagcgcacacatacttgggaaacccagagaatgaaagtgagatatatccagatttcgtgacgatcgccaaagggttcaacattccagcggtccgtgtgacaaagaagaacgaagtccgcgcagcgataaagaagatgctcgagactccagggccgtacctcttggatataatcgtcccacaccaggagcatgtgttgcctatgatccctagtggtggggctttcaaggatatgatcctggatggtgatggcaggactgtgtactgactagctagtcagttaacagatctgccagatcctcggtgtacaaataacccgtcttatcctatgagacgggccggcgtcagtgtgttctggaggaatttttatgtcagagcctttttctttgtgtgcttgatgtagatgccaagggaagcttattggctgttgaagcttgatgcaaaataaattatggaactctgttttttgtttatctaataataactagcaaatatgcttccattgcattgaaactaacagccttttgtgtttccaagttttattttgtgacaatgtcatctatttcaattagttgtggaatcggaaacttgcaggactaacttggaaactccaatccctcagcatcctggactttttcctggtgtaatccatgtagatattattttaatcatcattttagttctggaggtttttccatctccggttttgctcccctttcttcaaaaaaaaaaaaaaaatgccgtaggcgccgcaacgcccacctgttgttcaaactcatgggcacgagtggctcgaagattttatacaacaattgctgtagtttcaccgttgctggtgaagaagcatttttttaaaaaaatatagtggtattcattttaattagtttagttgtgcagcgagcaaaatttggacatgctctgctcggaatctgatcgacctagacacagattagcagcagtagctttgtcatctgttccaagagttgcgatctgatagaagaaaaaaaaaccttcccttcaatgtaaaaccgaaactaacaagaaagaagcacagtgccgtttaggcaagtatggagtacgtattaagcatgtagaaggccatgcatgaaccactaacaagaaagaagcgcagtgccattcaggcaagcataagcatgtagattggcatgcatgaacaactaacagtagatcgtctctggtctgattagaagttttttgggaagccaagaaatcatgtacaactggttccatctcaaattccgtggcaaaaagaggcctaagcaacatacctcgagtagatcacattcaagcttggtcacccggtccgtcaatattctgattccgatgacttcgtaggttcctagctcaagccgctcgtgtccaagcgtcacttacgattagctaatgattacggcatctaggaccgactagtggcgcgccgactagctagctaaggtaccgagctcgaattcattccgattaatcgtggcctcttgctcttcaggatgaagagctatgtttaaacgtgcaagcgctactagacaattcagtacattaaaaacgtccgcaatgtgttattaagttgtctaagcgtcaatttgtttacaccacaatatatcctgcca

SEQ ID NO: 43 - DNA, 23389 bp, Artificial sequence
  PHP95073
gtttacccgccaatatatcctgtcaaacactgatagtttaaactgaaggcgggaaacgacaatctgatcatgagcggagaattaagggagtcacgttatgacccccgccgatgacgcgggacaagccgttttacgtttggaactgacagaaccgcaacgttgaaggagccactcagcaagctggtacgattgtaatacgactcactatagggcgaattgagcgctgtttaaacgctcttcaactggaagagcggttacgctgtttaaacgctcttcaactggaagagcggttactaccggttcactagctagctgctaatcgagctagttaccctatgaggtgacatgaagcgctcacggttactatgacggttagcttcacgactgttggtggcagtagcgtacgacttagctatagttccggacttacccttaagcgatttaaatctgcggttaccgaattcgagctcggtacctagtacccttgtacttttggtttcacctgcatagagaaaacccacaagaatatgacagtctgatttgtcagtctcattctcaagcaacatttctctatccgttactttcatggtgaataacacaatccatcatcaatactttgtgttactcagaaactgaaagttattccgagtcttgcatatctttggacctactcgtttttctaccattattgctgattgttaagctctcgctacttgaatcggcattgttggagtgggaaggttcaaaaaattggagttatgactagttgtctctttctatgtacgatggagaaaatgaataaacaactgagaaaatggctcttgtttagttgatgatgctcttaagctttccactggttgccatatatgatttgggcatttcactttgatcttaatgggccttgtaaagcccaagactcatgattatctttagttgatgctcttaattaggtgtgggcaaataattcaaactgtatgtacccgaccaaaaccaaagcaaaaataatcgaaccaaaccgaaaatttaaaaataaccgaatgaaaactaaatcctataactgaaagaactgaaaccgaatcaaaatatttaatgtaaccaaaaatatccgaaatataattatattgtcaaaaatattaataatttctagattaaataattaaaaatacttaaaaatttatataaaatagtaaaaatactcgaaaataaccacaaatattcaaaaacaaccgaaatatcccaaaatattcaaagcaaaataaccgaatggataccaaattttaaaaccgaaaaaactggaacaaaaccaaaatcgaaccaaaatttcaaaaatcgaataaatactaaactttagaacaaaaaaaaacgataaccgaatgtatacgaaccaaagccgaattagataaccgaacgtccaggactactcttaatctttccgccacttatgatttgggctattactttgtttataatgagccttttcaagctcaagttcatgattgtccgtgagatgagaaactgacttgttggattcgaaaccctagctagtattggttaatacttaatacataaatgacctgcattgacatcatcatccaagaaaataaaaattgtatgcttgagatatttagttttcctagctaggttttctttattttagtaccgaatctttaggtgtgccacgttaatttagacccattttttcatacttaccaactgagtctagtttaatcatgactataatcgtataaaatgattcagtcgacgtcattgcgaacgtatataaaatcatccaaattgacgtcattccaaagaggtaagcatgcttatctaagagtccgagcatactaaacaagacgacattttatttgcactccaaatcaaattttgtattgcctaaagaaaaacaatcaaactcaagtttcttaaaattaatttcattcaaactaatcactttcaatatctcacatattattcatgccatttctatttgtctaaacatgatttaaaaaaaaaagtaaaatacaaagattactatgcaaaaactctataaaaaaaaattcaaatttcttatttatttgtgacatcaaattttcaaaataatttttttaattatcggttgatccggtcagtcgataaaaacataaactttcagcgaccgttaaaactttcctactaccgatttagagaaaatcttagcttgaaacgtaattgtaacctgccttcatgcaagtcgcaagatatgtcatcctaagttgtatatgttttctcaaaagatgtatttacttgagaaaatacgtttcaacgttgatggacaaccaattaagaatcaagcacctttcgtaatcaatttaggcttatcgtctaaggtatactgatttacgacagttgactagacttataaggaacaaaataatagaatagtttctaaacacttcacctaatcatagagactaagatggtaattcgtaaacgacaaagcctagtgacactgtccattgtaaaattccacatcatattagtattaaacatatacatgtagtttcctgaacacatgtagtatcaaacacacttcgtggcttcttcctcgaaacctgcggccgcgctatagttccggacttacccttaagataacttcgtatagcatacattatacgaagttatgggcccacgcgtgaagagcggttaccagagctggtcacctttgtccaccaagatggaactgtcttcggccagaatggccatctggattcagcaggcctagaaggccatttatcgctatcaactttgtatagaaaagttgggccgaattcgagctcggtacggccagaatggcccggaccgaagcttttcgttaccaactgggttgcataggatttcatgattaagagtgtgtttggtttagctgtgagttttctcctatgaaaaaactgttgtgagaaaaaatagttggaagtcgtttagttcaaactgttgtgagttatccactgtaaacaaattgtatattgtttatatacactctgtttaaatatatctcttaatcagtatatataattaaaaaactaatttcacatttgtgttcctaatattttttacaaataaatcattgtttaattccatttgtaataagtttttattaaaattgcttttatttcatttattataaacatttaattgttttaatcctattttagttttaatttattgtatctatttattaatataacgaacttcgataagaaacaaaagcaaggtcaaggtgttttttcaaagtagttgtggaaaagctgaaccccttttattcaacttttagaagcaggaaaacagaaccaaacagaccctaaaaatgtgtgaatttttagcaggttaattattcgcatctctttggtcatgtttaagaggctggaatagatcaactgcaagaacacatagcagagtggatagggggggggggggggagggtcgtcgtctccctatctgacctctcttctgcattggattgcctttttcggtactctatttaaaacttaaaagtacaaatgaggtgccggattgatggagtgatatataagtttgatgtgtttttcacataagtgacaagtattattgaaagagaacatttgcattgctactgtttgcatatgggaaaattgagaattgtatcatgccttggccgatcagttctttacttagctcgatgtaatgcacaatgttgatagtatgtcgaggatctagcgatgtaatggtgttaggacacgtggttagctactaatataaatgtaaggtcattcgatggtttttctattttcaattacctagcattatctcatttctaattgtgataacaaatgcattagaccataattctgtaaatatgtacatttaagcacacagtctatattttaaaattcttctttttgtgtggatatcccaacccaaatccacctctctcttcaatccgtgcatgttcaccgctgccaagtgccaacaacacatcgcatcgtgcatatctttgttggcttgtgcacggtcggcgccaatggaggagacacctgtacggtgcccttggtagaacaacatccttatccctatatgtatggtgcccttcgtagaatgacaccccttatccctacaatagccatgtatgcataccaagaattaaatatactttttcttgaaccacaataatttattatagcggcacttcttgttcaggttgaacacttatttggaacaataaaatgccgagttcctaaccacaggttcacttttttttttccttatcctcctaggaaactaaattttaaaatcataaatttaatttaaatgttaatggaaacaaaaaattatctacaaagacgactcttagccacagccgcctcactgcaccctcaaccacatcctgcaaacagacaccctcgccacatccctccagattcttcactccgatgcagcctacttgctaacagacgccctctccacatcctgcaaagcattcctccaaattcttgcgatcccccgaatccagcattaactgctaagggacgccctctccacatcctgctacccaattagccaacggaataacacaagaaggcaggtgagcagtgacaaagcacgtcaacagcaccgagccaagccaaaaaggagcaaggaggagcaagcccaagccgcagccgcagctctccaggtccccttgcgattgccgccagcagtagcagacacccctctccacatcccctccggccgctaacagcagcaagccaagccaaaaaggagcctcagccgcagccggttccgttgcggttaccgccgatcacatgcccaaggccgcgcctttccgaacgccgagggccgcccgttcccgtgcacagccacacacacacccgcccgccaacgactccccatccctatttgaacccacccgcgcactgcattgatcaccaatcgcatcgcagcagcacgagcagcacgccgtgccgctccaaccatctcgcttccgtgcttagcttccccccgggggatctcgactctagaggatcgctcaggaaggccgctgagatagaggcatggcggccaatgcgggcggcggtggagcgggaggaggcagcggcagcggcagcgtggctgcgccggcggtgtgccgccccagcggctcgcggtggacgccgacgccggagcagatcaggatgctgaaggagctctactacggctgcggcatccggtcgcccagctcggagcagatccagcgcatcaccgccatgctgcggcagcacggcaagatcgagggcaagaacgtcttctactggttccagaaccacaaggcccgcgagcgccagaagcgccgcctcaccagcctcgacgtcaacgtgcccgccgccggcgcggccgacgccaccaccagccaactcggcgtcctctcgctgtcgtcgccgccgccttcaggcgcggcgcctccctcgcccaccctcggcttctacgccgccggcaatggcggcggatcggctgtgctgctggacacgagttccgactggggcagcagcggcgctgccatggccaccgagacatgcttcctgcaggactacatgggcgtgacggacacgggcagctcgtcgcagtggccacgcttctcgtcgtcggacacgataatggcggcggccgcggcgcgggcggcgacgacgcgggcgcccgagacgctccctctcttcccgacctgcggcgacgacggcggcagcggtagcagcagctacttgccgttctggggtgccgcgtccacaactgccggcgccacttcttccgttgcgatccagcagcaacaccagctgcaggagcagtacagcttttacagcaacagcaacagcacccagctggccggcaccggcaaccaagacgtatcggcaacagcagcagcagccgccgccctggagctgagcctcagctcatggtgctccccttaccctgctgcagggagtatgtgagagcaacgcgagctgccactgctcttcactgatgtctctggaatggaaggaggaggaagtgagcatagcgttggtgcgttgctgtcaagggcgaattcacatggttaacctagacttgtccatcttctggattggccaacttaattaatgtatgaaataaaaggatgcacacatagtgacatgctaatcactataatgtgggcatcaaagttgtgtgttatgtgtaattactagttatctgaataaaagagaaagagatcatccatatttcttatcctaaatgaatgtcacgtgtctttataattctttgatgaaccagatgcatttcattaaccaaatccatatacatataaatattaatcatatataattaatatcaattgggttagcaaaacaaatctagtctaggtgtgttttgcgaatgcggccgccaccgcggtggagctcgaattccggtccgggcctagaaggccagcttcaagtttgtacaaaaaagcaggctccggccagaatggcccggaccgggttaccgaattcgagctcggtaccatttaaattgcgcccgccacggccgtggaggtcgtattccggtcagcttgcatccctgcagtgcagcgtgacccggtcgtgcccctctctagagataatgagcattgcatgtctaagttataaaaaattaccacatattttttttgtcacacttgtttgaagtgcagtttatctatctttatacatatatttaaactttactctacgaataatataatctatagtactacaataatatcagtgttttagagaatcatataaatgaacagttagacatggtctaaaggacaattgagtattttgacaacaggactctacagttttatctttttagtgtgcatgtgttctcctttttttttgcaaatagcttcacctatataatacttcatccattttattagtacatccatttagggtttagggttaatggtttttatagactaatttttttagtacatctattttattctattttagcctctaaattaagaaaactaaaactctattttagtttttttatttaataatttagatataaaatagaataaaataaagtgactaaaaattaaacaaataccctttaagaaattaaaaaaactaaggaaacatttttcttgtttcgagtagataatgccagcctgttaaacgccgtcgacgagtctaacggacaccaaccagcgaaccagcagcgtcgcgtcgggccaagcgaagcagacggcacggcatctctgtcgctgcctctggacccctctcgagagttccgctccaccgttggacttgctccgctgtcggcatccagaaattgcgtggcggagcggcagacgtgagccggcacggcaggcggcctcctcctcctctcacggcaccggcagctacgggggattcctttcccaccgctccttcgctttcccttcctcgcccgccgtaataaatagacaccccctccacaccctctttccccaacctcgtgttgttcggagcgcacacacacacaaccagatctcccccaaatccacccgtcggcacctccgcttcaaggtacgccgctcgtcctcccccccccccctctctaccttctctagatcggcgttccggtccatgcatggttagggcccggtagttctacttctgttcatgtttgtgttagatccgtgtttgtgttagatccgtgctgctagcgttcgtacacggatgcgacctgtacgtcagacacgttctgattgctaacttgccagtgtttctctttggggaatcctgggatggctctagccgttccgcagacgggatcgatttcatgattttttttgtttcgttgcatagggtttggtttgcccttttcctttatttcaatatatgccgtgcacttgtttgtcgggtcatcttttcatgcttttttttgtcttggttgtgatgatgtggtctggttgggcggtcgttctagatcggagtagaattctgtttcaaactacctggtggatttattaattttggatctgtatgtgtgtgccatacatattcatagttacgaattgaagatgatggatggaaatatcgatctaggataggtatacatgttgatgcgggttttactgatgcatatacagagatgctttttgttcgcttggttgtgatgatgtggtgtggttgggcggtcgttcattcgttctagatcggagtagaatactgtttcaaactacctggtgtatttattaattttggaactgtatgtgtgtgtcatacatcttcatagttacgagtttaagatggatggaaatatcgatctaggataggtatacatgttgatgtgggttttactgatgcatatacatgatggcatatgcagcatctattcatatgctctaaccttgagtacctatctattataataaacaagtatgttttataattattttgatcttgatatacttggatgatggcatatgcagcagctatatgtggatttttttagccctgccttcatacgctatttatttgcttggtactgtttcttttgtcgatgctcaccctgttgtttggtgttacttctgcaggtcgactctagaggatccatggccactgtgaacaactggctcgctttctccctctccccgcaggagctgccgccctcccagacgacggactccacactcatctcggccgccaccgccgaccatgtctccggcgatgtctgcttcaacatcccccaagattggagcatgaggggatcagagctttcggcgctcgtcgcggagccgaagctggaggacttcctcggcggcatctccttctccgagcagcatcacaaggccaactgcaacatgatacccagcactagcagcacagtttgctacgcgagctcaggtgctagcaccggctaccatcaccagctgtaccaccagcccaccagctcagcgctccacttcgcggactccgtaatggtggcttcctcggccggtgtccacgacggcggtgccatgctcagcgcggccgccgctaacggtgtcgctggcgctgccagtgccaacggcggcggcatcgggctgtccatgattaagaactggctgcggagccaaccggcgcccatgcagccgagggtggcggcggctgagggcgcgcaggggctctctttgtccatgaacatggcggggacgacccaaggcgctgctggcatgccacttctcgctggagagcgcgcacgggcgcccgagagtgtatcgacgtcagcacagggtggagccgtcgtcgtcacggcgccgaaggaggatagcggtggcagcggtgttgccggcgctctagtagccgtgagcacggacacgggtggcagcggcggcgcgtcggctgacaacacggcaaggaagacggtggacacgttcgggcagcgcacgtcgatttaccgtggcgtgacaaggcatagatggactgggagatatgaggcacatctttgggataacagttgcagaagggaagggcaaactcgtaagggtcgtcaagtctatttaggtggctatgataaagaggagaaagctgctagggcttatgatcttgctgctctgaagtactggggtgccacaacaacaacaaattttccagtgagtaactacgaaaaggagctcgaggacatgaagcacatgacaaggcaggagtttgtagcgtctctgagaaggaagagcagtggtttctccagaggtgcatccatttacaggggagtgactaggcatcaccaacatggaagatggcaagcacggattggacgagttgcagggaacaaggatctttacttgggcaccttcagcacccaggaggaggcagcggaggcgtacgacatcgcggcgatcaagttccgcggcctcaacgccgtcaccaacttcgacatgagccgctacgacgtgaagagcatcctggacagcagcgccctccccatcggcagcgccgccaagcgcctcaaggaggccgaggccgcagcgtccgcgcagcaccaccacgccggcgtggtgagctacgacgtcggccgcatcgcctcgcagctcggcgacggcggagccctggcggcggcgtacggcgcgcactaccacggcgccgcctggccgaccatcgcgttccagccgggcgccgccagcacaggcctgtaccacccgtacgcgcagcagccaatgcgcggcggcgggtggtgcaagcaggagcaggaccacgcggtgatcgcggccgcgcacagcctgcaggacctccaccacctgaacctgggcgcggccggcgcgcacgactttttctcggcagggcagcaggccgccgccgctgcgatgcacggcctgggtagcatcgacagtgcgtcgctcgagcacagcaccggctccaactccgtcgtctacaacggcggggtcggcgacagcaacggcgccagcgccgtcggcggcagtggcggtggctacatgatgccgatgagcgctgccggagcaaccactacatcggcaatggtgagccacgagcaggtgcatgcacgggcctacgacgaagccaagcaggctgctcagatggggtacgagagctacctggtgaacgcggagaacaatggtggcggaaggatgtctgcatgggggactgtcgtgtctgcagccgcggcggcagcagcaagcagcaacgacaacatggccgccgacgtcgggcatggcggcgcgcagctcttcagtgtctggaacgacacttaagcgtacgtgccggcctggctctccgaaagggcgtattccagcacactggcggccgttactagacccaacctagacttgtccatcttctggattggccaacttaattaatgtatgaaataaaaggatgcacacatagtgacatgctaatcactataatgtgggcatcaaagttgtgtgttatgtgtaattactagttatctgaataaaagagaaagagatcatccatatttcttatcctaaatgaatgtcacgtgtctttataattctttgatgaaccagatgcatttcattaaccaaatccatatacatataaatattaatcatatataattaatatcaattgggttagcaaaacaaatctagtctaggtgtgttttgcgaatgcggcctccgggcacccagctttcttgtacaaagtggccgttaacggatcggccagaatggcccggaccgggttaccgaattcgagctcggtaccctggttcacaaactcaatacaacacacagtggagtagggtattacgctccggcggcccgaaccactctaaatccttgtgtcctcgtgtgctcttccaccattaatgactgtaattgcagggacacgaagagttgtagcgcttttgccaacaagatccgctatatgctagtagagtggaacctgcacagcaacaagcatccaataatctgagaataagaattatgtgtggtgatggttctcatctctgcaactcgccattttcgcgagagaaccaaatccaagttggtgaagatcatgatttgggctcatgggctggcatagtagctattacctttgcaattgtggttcgaatctatccgatattctccttttcagggagagctaatgcttatgcttattgggtattttggtttgacactgcttcacgcccaaaaaaaggcaactatgtctgagttggatatggcccaaaaaaaggcagctatgtctgagttggatatggaagtcttctttcgtttagggtgaagtaagaccaagctcatgagcttattatcttaggtcggaacaaattagttgataggcatggcacatttatcaaattataatgattttaacagaaaagcaacacctctttttcagcagcaccagctttgcaagctgcaattgacactccaagcatagtatttgctccaaactcagcctgcatttcgcacaatatcatatctatttccatttggataaaatatattttccagaaatatgggaacagaatcaagatacagaaaaaagttgtggtagtagtggtaagtggaaacacaagtacagtgaaaagatagcattatttctgaacagtcaaattaaccgaaataagtagtatcacatactgcccctaaattgactacacccaatgtaaagaattgcttgagcatattgagccatcagttgtttgtttgtgtaacggatttgacaatgcagagttcaggagcaaaaaaccgcaaaggagagaaagagggaaaggatctcctagtatcccaccttgtggcgcgccctgtcaagtgcatgatggcctggtcgatctgcgtctgctgctgcggttccatcccaacgagtgcctccgacaccttgtcgttgatcacccgcaccgcgtaggcgacccccctggcgaggaacttccgcctctcggaggccccggccgcgtcggcggcggcgccctcgagcgcgcccacgctagccgtagatgctcggtgcacggccttgttggtgtgcaactcgacctcaacggccggtgcgctacgcccgtcaaggatctggcgcgcccgcaccctcgtgatcacggtgggcgcctcccgcctcatgtggccgacgatgaaaagcgccgggttaggggccttggcgcgcaccgccgtattcagggcctcctcgctcttgcgcgagagcaggtgcttccccaggtactcctgcactgacaaggctgccacagcggtggaatttgtcctcacgacttcgccacgtcgtcctcacctccctggcttcccacgactccgccgtatcgaggtgctcggtgggtcgtcttaatccgaagtccgaactaggaagacgagacagagaggtctgaggaatgggcctcgtttgatgttgagctgaattatttttccagcataagcccaggtcttggtccatgaacaaaattactagaaacccagcccagtactacgatctaaaagagggactgccactggatagctctctctagcattctccacgctccaatacagcggcgtcgtgtctatccgggtctatccgcgaacacgtgagaactctccagaaactgctttctcctccacttcatctctctcgctttccctctataaaaagaccccttctaggaattgagggagacagcaagcaccaagcagcgatccgaagctcaatcaattcactcaaacctcttccccaaatcttcgattagatcttcgttgacaagaagactagaaccgaacctgacatgtccaacctgctcacggttcaccagaaccttccggctcttccagtggacgcgacgtccgatgaagtcaggaagaacctcatggacatgttccgcgacaggcaagcgttcagcgagcacacctggaagatgctgctctccgtctgccgctcctgggctgcatggtgcaagctgaacaacaggaagtggttccccgctgagcccgaggacgtgagggattaccttctgtacctgcaagcgcgaggtttgtttctgcttctacctttgatatatatataataattatcattaattagtagtaatataatatttcaaatatttttttcaaaataaaagaatgtagtatatagcaattgcttttctgtagtttataagtgtgtatattttaatttataacttttctaatatatgaccaaaacatggtgatgcctaggtctggcagtgaagaccatccagcaacaccttggacaactgaacatgcttcacaggcgctccggcctcccgcgccccagcgactcgaacgccgtgagcctcgtcatgcgccgcatcaggaaggaaaacgtcgatgccggcgaaagggcaaagcaggccctcgcgttcgagaggaccgatttcgaccaggtccgcagcctgatggagaacagcgacaggtgccaggacattaggaacctggcgttcctcggaattgcatacaacacgctcctcaggatcgcggaaattgcccgcattcgcgtgaaggacattagccgcaccgacggcggcaggatgcttatccacattggcaggaccaagacgctcgtttccaccgcaggcgtcgaaaaggccctcagcctcggagtgaccaagctcgtcgaacgctggatctccgtgtccggcgtcgcggacgacccaaacaactacctcttctgccgcgtccgcaagaacggggtggctgcccctagcgccaccagccaactcagcacgagggccttggaaggtattttcgaggccacccaccgcctgatctacggcgcgaaggatgacagcggtcaacgctacctcgcatggtccgggcactccgcccgcgttggagctgctagggacatggcccgcgccggtgtttccatccccgaaatcatgcaggcgggtggatggacgaacgtgaacattgtcatgaactacattcgcaaccttgacagcgagacgggcgcaatggttcgcctcctggaagatggtgactgaggtacccaacctagacttgtccatcttctggattggccaacttaattaatgtatgaaataaaaggatgcacacatagtgacatgctaatcactataatgtgggcatcaaagttgtgtgttatgtgtaattactagttatctgaataaaagagaaagagatcatccatatttcttatcctaaatgaatgtcacgtgtctttataattctttgatgaaccagatgcatttcattaaccaaatccatatacatataaatattaatcatatataattaatatcaattgggttagcaaaacaaatctagtctaggtgtgttttgcgatccgatatcgaattggccacggtaccagctgctgctgttctagggttcacaagtctgcctatttgtcttccccaatggagctatggttgtctggtctggtccttggtcgtgtcccgtttcattgtgtactatttacctgtaatgtgtatccttaagtctggtttgatggtgtctgaaacgttttgctgtggtagagcagcatggaagaactataatgaataagtgatccctaatcattgtgtccaaattttgcttctgctatacccttttgtgctgtttcttatgttttgcttaaaaatttgatctgacaaacaaatttgtctaaattatgctcttgttctgactgtgtactgtacacatttgtattgctaccggtttggcacatagttttctctttgattgcagatcaaacccttctgattgcagattgcttggctatggctgatgtgctcactgttcttctttagcttgtatattgctgatggtggcttggctacggctgaaaaagttgctgctgcgccgacttggcaactgttgctccagtaatgctttgtcctctcttcctagccgccgacttggcacttggcagctgttgctcctgtaatgcgttgttatctcttatctcttgagatgtactatgattttgaggctgtttgacttgtgccagattgccagtgctgatgctatattatctcaggtttttatgctagtatatgttttactgtgtgctgcctgtgtcgagttacgtaatctattgaaccgctatgcgtgttgatgccctgttgttgcttgccagattgatgcccctgttgcttgcagcttgcaagctgtagtgaaatcctaaaattccaaaccaaatctattctgaacttttgaagatctgtgatgtccggaagaaaagattcaaacagataaacgggactctccagaatctataaaataaatgatcgacaaacgctttgctttggtaggcttcaagcttggtcacccggtccgggcctagaaggccagcttcggccgccccgggcaactttattatacaaagttgatagataaatcagatatctggttcctaaggacccggcggaccgattaaactgattcggtccgacgcgttacctaataacttcgtatagcatacattatacgaagttattagctaactaactagtaagcttaagccatgggtcgacggatccgttaactagcgtggcatttggcaccgccgcacactatgcgagctaggagtgctagtttacagatgaaactatgaaaccaagaaaacacaattgtccgtagctagcgcgtggcgtcgtgtcaagcttcacacagtatcttcgttcttcactataaatcgcgcctgttgttcgtgagacccaccaccgtggataacagtcccctaataataagcgatcaacagcactgctgatggctgaacaccgaggcgccgccgcgcgtaaccatccgccggagcagcccgtcgtgccggcgaacgacgccttccccgaccgcgcccagcagctctgcctcgacgccgggcgcgcgctcgcgatgtgcggcgtgctcgtcgccgtccctcccgcattttacgcgtcgacgtcgcggacgacaccgcacttgccttcgtcggcttcgtcctctggatcatcggtgcgtggctgtgcctcctggcgctcacgcccttggctccacgggcggtgagggcgggcggggccgccgccagcaccttgctgatcaggtgcctgtccctttcatgaactactagcgcccgcgcccgcggccgccgggcacaagagaacacatcgatgttcgctgcgtacgtcagcaataaggcactctttgtcagtagtcgagtgcatatgttgggtgtttgccctgggagatttcaagtgttgtggccattatcccgcaggataaaaaatcggcggcttttggattgatacggaaaataacgatgtttcatgctcgtgttgtgtgtgtgacatcttgtcagccaagtttttaaccgttgctactccccctctgtgggctcagtgtgtggaccggaatacgtcgtacataggccgtagcctaagcccaatatgccgtttttcaggttggcctgtgtgacgacaagcgggtctcaaaagcccatcacgcaactggcctgcaattattggaggagagcgcgtcgagttggttccagaggctgcgtggtggggccggactctgcgacgacctctcgttcgcgtccgatttggttgccgtgagccgtgacgtaacgcctccttccgttcctccctatataagttccacccccgggtccggtttccccaagccccagtgacccccgatcccgatcgcgaaatctccgcacccgccggcaagggaccgaagcaagcctctctcccgaccgtcgcatcaaggtacgcgtccgctcgatctgtcctcttccttctcgatttgacttgctgtggtgcccgatcacgggatcagaatcgcaccagtgtagatttcgcatgttctaagatgtgttagtttccaggctaatccagttctcttgacgcccgatccgatcgagctccgtgtttatttcagcctaatcgtagtattcccctaaaatttcctcattagggggttcgcaagattgttggtcgacaggttcacttatgctcgatcgcttacttttagtcgattcatgctgcgtactattgttgccccccgtggttttatcttttctcgtgtgaaatccagtagatatagtagatatcgtagcattaggttttaattcaatcgattgattattgtatcatcaaaattgagaagttcgaatcatgcctatcatgctgcctcaaccgaaatcctgtatattgaagtttcaattcaattgattgatcattcattagattcaaccaaaatctagaaggttagatgacgcatgtcatgctgcctgcgtagtttacctttgatctgtttatgattaccttatcagtaggatatttgtgattttgggaagtagcactaactgattcatgctgacatgatgttccctttcagattatactgttgagtcctatctaattgatgctttgtatgctatatgaatacgtcatggtaaattagcagttaattagcatattagcaattgggcgtacctcatcaggattgctcttgtagatgtgtgtggtgatgtttcttgttcaattcatgttctgctttaaaagtatgtgttctctgtttgttaattaagattcatggttataatgatttggacctaattaatcagggttgcccttttagatgcgtggttacttgttgagttcatttttttcctgctatagttgtatgcgtttgttcattcatggttagatttgatttgtttcttctctattccatgccttccatatacttcaattgtagcttaacatgagatttctgtatatgcaggtcgaccgccggggatccacacgacaccatggcccagtccaagcacggcctgaccaaggagatgaccatgaagtaccgcatggagggctgcgtggacggccacaagttcgtgatcaccggcgagggcatcggctaccccttcaagggcaagcaggccatcaacctgtgcgtggtggagggcggccccttgcccttcgccgaggacatcttgtccgccgccttcatgtacggcaaccgcgtgttcaccgagtacccccaggacatcgtcgactacttcaagaactcctgccccgccggctacacctgggaccgctccttcctgttcgaggacggcgccgtgtgcatctgcaacgccgacatcaccgtgagcgtggaggagaactgcatgtaccacgagtccaagttctacggcgtgaacttccccgccgacggccccgtgatgaagaagatgaccgacaactgggagccctcctgcgagaagatcatccccgtgcccaagcagggcatcttgaagggcgacgtgagcatgtacctgctgctgaaggacggtggccgcttgcgctgccagttcgacaccgtgtacaaggccaagtccgtgccccgcaagatgcccgactggcacttcatccagcacaagctgacccgcgaggaccgcagcgacgccaagaaccagaagtggcacctgaccgagcacgccatcgcctccggctccgccttgccctccggactcagatctcgatagagtcaacctagacttgtccatcttctggattggccaacttaattaatgtatgaaataaaaggatgcacacatagtgacatgctaatcactataatgtgggcatcaaagttgtgtgttatgtgtaattactagttatctgaataaaagagaaagagatcatccatatttcttatcctaaatgaatgtcacgtgtctttataattctttgatgaaccagatgcatttcattaaccaaatccatatacatataaatattaatcatatataattaatatcaattgggttagcaaaacaaatctagtctaggtgtgttttgcgaattgcggcgcccttactttaacgcctctaaccaacacccctttatctttataaggaacaataaacagaatttgccccactgttctaaatcacctaataatatccccagctaaaaacaataaaggtttcctagaattaagacaagcatgactgttcctccaggagggtttggaacattgttgcagtcttgcagatacgggcgaagggtgagaaacagagcggagggctggaggtgacctcggtagtcgacgccggagttgagcttgacaacgacggggcggcccctgatggacttgaggaagtccgatggcgtcttcaccgtcccgccggcgcccgaggcgggcctgtcgctgccgccgccgccgctgctcatcttgcgcgctgtgcccccggcggtgtccctgtgttgcggatcgcgggtgggccaggtggatgcgagggcgacccgtttggactccggccggagccgccggatccctggtcggtgtcagtgccgtttactctgggccccacgtgtcagtaccgtctgtagatgacaacaacccgtcgtccacagtcatgtccaaaatatcctttcttcttttttttcgattcggatatctatcttccttttttttttccaaaaatcttcttgacgcaccagcgcgcacgtttgtggtaaacgccgacacgtcggtcccacgtcgatagaccccacccaccagtgagtagcgtgtacgtattcgggggtgacggacgtgtcgccgtcgtcttgctagtcccattcccatctgagccacacatctctgaacaaaaaaaaggagggaggcctccacgcacatccccctccgtgccacccgccccaaaccctcgcgccgcctccgagacagccgccgcaaccatggccaccgccgccgccgcgtctaccgcgctcactggcgccactaccgctgcgcccaaggcgaggcgccgggcgcacctcctggccacccgccgcgccctcgccgcgcccatcaggtgctcagcggcgtcacccgccatgccgatggctcccccggccaccccgctccggccgtggggccccaccgagccccgcaagggtgctgacatcctcgtcgagtccctcgagcgctgcggcgtccgcgacgtcttcgcctaccccggcggcgcgtccatggagatccaccaggcactcacccgctcccccgtcatcgccaaccacctcttccgccacgagcaaggggaggcctttgccgcctccggctacgcgcgctcctcgggccgcgtcggcgtctgcatcgccacctccggccccggcgccaccaacctagtctccgcgctcgccgacgcgctgctcgattccgtccccatggtcgccatcacgggacaggtggcgcgacgcatgattggcaccgacgccttccaggagacgcccatcgtcgaggtcacccgctccatcaccaagcacaactacctggtcctcgacgtcgacgacatcccccgcgtcgtgcaggaggctttcttcctcgcctcctctggtcgaccagggccggtgcttgtcgacatccccaaggacatccagcagcagatggcggtgcctgtctgggacaagcccatgagtctgcctgggtacattgcgcgccttcccaagccccctgcgactgagttgcttgagcaggtgctgcgtcttgttggtgaatcgcggcgccctgttctttatgtgggcggtggctgcgcagcatctggtgaggagttgcgacgctttgtggagctgactggaatcccggtcacaactactcttatgggcctcggcaacttccccagcgacgacccactgtctctgcgcatgctaggtatgcatgggacggtgtatgcaaattatgcagtggataaggccgatctgttgcttgcacttggtgtgcggtttgatgatcgcgtgacagggaagattgaggcttttgcaagcagggctaagattgtgcacgttgatattgatccggctgagattggcaagaacaagcagccacatgtgtccatctgtgcagatgttaagcttgctttgcagggcatgaatgctcttcttgaaggaagcacatcaaagaagagctttgactttggctcatggaacgatgagttggatcagcagaagagggaattcccccttgggtataaaacatctaatgaggagatccagccacaatatgctattcaggttcttgatgagctgacgaaaggcgaggccatcatcggcacaggtgttgggcagcaccagatgtgggcggcacagtactacacttacaagcggccaaggcagtggttgtcttcagctggtcttggggctatgggatttggtttgccggctgctgctggtgcttctgtggcaaacccaggtgtcactgttgttgacatcgatggagatggtagctttctcatgaacgttcaggagctagctatgatccgaattgagaacctcccagtgaaggtctttgtgctaaacaaccagcacctggggatggtggtgcagttggaggacaggttctataaggccaacagagcgcacacatacttgggaaacccagagaatgaaagtgagatatatccagatttcgtgacgatcgccaaagggttcaacattccagcggtccgtgtgacaaagaagaacgaagtccgcgcagcgataaagaagatgctcgagactccagggccgtacctcttggatataatcgtcccacaccaggagcatgtgttgcctatgatccctagtggtggggctttcaaggatatgatcctggatggtgatggcaggactgtgtactgactagctagtcagttaacagatctgccagatcctcggtgtacaaataacccgtcttatcctatgagacgggccggcgtcagtgtgttctggaggaatttttatgtcagagcctttttctttgtgtgcttgatgtagatgccaagggaagcttattggctgttgaagcttgatgcaaaataaattatggaactctgttttttgtttatctaataataactagcaaatatgcttccattgcattgaaactaacagccttttgtgtttccaagttttattttgtgacaatgtcatctatttcaattagttgtggaatcggaaacttgcaggactaacttggaaactccaatccctcagcatcctggactttttcctggtgtaatccatgtagatattattttaatcatcattttagttctggaggtttttccatctccggttttgctcccctttcttcaaaaaaaaaaaaaaaatgccgtaggcgccgcaacgcccacctgttgttcaaactcatgggcacgagtggctcgaagattttatacaacaattgctgtagtttcaccgttgctggtgaagaagcatttttttaaaaaaatatagtggtattcattttaattagtttagttgtgcagcgagcaaaatttggacatgctctgctcggaatctgatcgacctagacacagattagcagcagtagctttgtcatctgttccaagagttgcgatctgatagaagaaaaaaaaaccttcccttcaatgtaaaaccgaaactaacaagaaagaagcacagtgccgtttaggcaagtatggagtacgtattaagcatgtagaaggccatgcatgaaccactaacaagaaagaagcgcagtgccattcaggcaagcataagcatgtagattggcatgcatgaacaactaacagtagatcgtctctggtctgattagaagttttttgggaagccaagaaatcatgtacaactggttccatctcaaattccgtggcaaaaagaggcctaagcaacatacctcgagtagatcacattcaagcttggtcacccggtccgtcaatattctgattccgatgacttcgtaggttcctagctcaagccgctcgtgtccaagcgtcacttacgattagctaatgattacggcatctaggaccgactagtggcgcgccgactagctagctaaggtaccgagctcgaattcattccgattaatcgtggcctcttgctcttcaggatgaagagctatgtttaaacgtgcaagcgctactagacaattcagtacattaaaaacgtccgcaatgtgttattaagttgtctaagcgtcaatttgtttacaccacaatatatcctgcca

SEQ ID NO: 44 - DNA, 23291 bp, Artificial sequence
  PHP95074
gtttacccgccaatatatcctgtcaaacactgatagtttaaactgaaggcgggaaacgacaatctgatcatgagcggagaattaagggagtcacgttatgacccccgccgatgacgcgggacaagccgttttacgtttggaactgacagaaccgcaacgttgaaggagccactcagcaagctggtacgattgtaatacgactcactatagggcgaattgagcgctgtttaaacgctcttcaactggaagagcggttacgctgtttaaacgctcttcaactggaagagcggttactaccggttcactagctagctgctaatcgagctagttaccctatgaggtgacatgaagcgctcacggttactatgacggttagcttcacgactgttggtggcagtagcgtacgacttagctatagttccggacttacccttaagcgatttaaatctgcggttaccgaattcgagctcggtacctagtacccttgtacttttggtttcacctgcatagagaaaacccacaagaatatgacagtctgatttgtcagtctcattctcaagcaacatttctctatccgttactttcatggtgaataacacaatccatcatcaatactttgtgttactcagaaactgaaagttattccgagtcttgcatatctttggacctactcgtttttctaccattattgctgattgttaagctctcgctacttgaatcggcattgttggagtgggaaggttcaaaaaattggagttatgactagttgtctctttctatgtacgatggagaaaatgaataaacaactgagaaaatggctcttgtttagttgatgatgctcttaagctttccactggttgccatatatgatttgggcatttcactttgatcttaatgggccttgtaaagcccaagactcatgattatctttagttgatgctcttaattaggtgtgggcaaataattcaaactgtatgtacccgaccaaaaccaaagcaaaaataatcgaaccaaaccgaaaatttaaaaataaccgaatgaaaactaaatcctataactgaaagaactgaaaccgaatcaaaatatttaatgtaaccaaaaatatccgaaatataattatattgtcaaaaatattaataatttctagattaaataattaaaaatacttaaaaatttatataaaatagtaaaaatactcgaaaataaccacaaatattcaaaaacaaccgaaatatcccaaaatattcaaagcaaaataaccgaatggataccaaattttaaaaccgaaaaaactggaacaaaaccaaaatcgaaccaaaatttcaaaaatcgaataaatactaaactttagaacaaaaaaaaacgataaccgaatgtatacgaaccaaagccgaattagataaccgaacgtccaggactactcttaatctttccgccacttatgatttgggctattactttgtttataatgagccttttcaagctcaagttcatgattgtccgtgagatgagaaactgacttgttggattcgaaaccctagctagtattggttaatacttaatacataaatgacctgcattgacatcatcatccaagaaaataaaaattgtatgcttgagatatttagttttcctagctaggttttctttattttagtaccgaatctttaggtgtgccacgttaatttagacccattttttcatacttaccaactgagtctagtttaatcatgactataatcgtataaaatgattcagtcgacgtcattgcgaacgtatataaaatcatccaaattgacgtcattccaaagaggtaagcatgcttatctaagagtccgagcatactaaacaagacgacattttatttgcactccaaatcaaattttgtattgcctaaagaaaaacaatcaaactcaagtttcttaaaattaatttcattcaaactaatcactttcaatatctcacatattattcatgccatttctatttgtctaaacatgatttaaaaaaaaaagtaaaatacaaagattactatgcaaaaactctataaaaaaaaattcaaatttcttatttatttgtgacatcaaattttcaaaataatttttttaattatcggttgatccggtcagtcgataaaaacataaactttcagcgaccgttaaaactttcctactaccgatttagagaaaatcttagcttgaaacgtaattgtaacctgccttcatgcaagtcgcaagatatgtcatcctaagttgtatatgttttctcaaaagatgtatttacttgagaaaatacgtttcaacgttgatggacaaccaattaagaatcaagcacctttcgtaatcaatttaggcttatcgtctaaggtatactgatttacgacagttgactagacttataaggaacaaaataatagaatagtttctaaacacttcacctaatcatagagactaagatggtaattcgtaaacgacaaagcctagtgacactgtccattgtaaaattccacatcatattagtattaaacatatacatgtagtttcctgaacacatgtagtatcaaacacacttcgtggcttcttcctcgaaacctgcggccgcgctatagttccggacttacccttaagataacttcgtatagcatacattatacgaagttatgggcccacgcgtgaagagcggttaccagagctggtcacctttgtccaccaagatggaactgtcttcggccagaatggccatctggattcagcaggcctagaaggccatttatcgctatcaactttgtatagaaaagttgggccgaattcgagctcggtacggccagaatggcccggaccgaagcttgcggccgcacactgatagtttaaaccctaactaactaggcagcctagtatcagcaaaggatttaagtgaatctcacttcgcacaaaactgtcaattcaaggcttagtccattgttcagttgtgaatgggtgaaacttttattctagatggatgttcaacttaacagtctccatcgaaacactggtatatcaaaggattgtgattatgatacttcatcattacaaaccctagaatttggtgggggttgttggatcttttatgggcttggcccatttattgaataaactctatgctgtgtaatggtggagaataccaatagtaccatattggaagtccaagggtcttttggcttgacttatatggtgggaattattccacctaacttgagaagtcaagaaacggaaaagggcgtgccaccggccgggccgggctcgggccggccgtggcgtggcaggcgagcgggcgtggtgtggttgtgttaatttttagcactcactaaccgtggttgtgttaatttttagcactcactaaccgcgtaaacctttcagttgcctgtctcttcgtcagcagcatgcgagacccttgtccttcagctgcccgtctcttggcgtgccgcatgcgacccttctccttcagcttccctttgagagaggttaagtagaggagaacccttggcacttggtacacgagaaacagaactatttcagagtcacagcccagccgcaagtgagagtattcccatctcgtgactctacgcgcacagagcagcgagagggcaggtgcctccgaagcccttgccgttcgagaccttgcacgggggatcggcaattaggtttttggggagcgtctacgcgactgcccaaaacatcttctttctggctacatgacaagggaagctggacaaagatctggatcatcagagcgcatgagagggtatgatcagtttatttttttactgttttacgttctacagattagatatgtttcatatattcatctgtgctgttttatatgtagcaatgattttagcttatctgttctgtcttattataatatgttatatctgtctgttttaattttacagtcatgttgtttatgtttctatctgtttattttgaattgttcagtcagtttatatgcttatcattatatgatttatatgattcatatgctgtgtgttctcatgatccatattgttatggatatatttgagatcacacttttatatgttatcattataatgttaatttatataattaaaatgatatgaaaaatgcctatatatctaacgttcaaattaattgataggcaattatccctagactgctagtatatagtcttctagttaactaattcatgcttgatgcgtacgtgcttatgaagtatcggctatttgtcaagatcattggccataggacagtagtggtccaaaagatctagatctccgttgggagcagggtcacaacgtagggaaaggaaaggtggacaatacgtgaaacctcatcctttcacaggaaaggcgcctcatcgggatgcaaggtcgctttcacacatgcatacatgatatttgaggggatcggcagtgcatattttagaattgaagggcatgcatgatattttacaatctttaatcttttaattcgaaaataaatgacaaatatttaagaacgaagttagtattaggcagaagcttgcatcgcatctttctcgcaggtggtgggatttgctcaggaggcatgataggtacttggacggttcccaattttaggcggcggagcggaatacttttagaaatcagagaacttgaatttctccacaaagccatccttggccatcgtccatcgatcaaaatatctgcatacaccagctagctgacacagggtgggtgccagagtgcccgtgaccaaccacgccccatctgctaaacacgtagccatgcatggcgccacggccacgccagccaagatatttgttgccctcgtctcgtcttgtgcccttcttaatataaaccttgtgcccctctgctgcagcaagaaggaaagaagctagcgcttatagcttgtcagccccgggggatctcgactctagaggatcgctcaggaaggccgctgagatagaggcatggcggccaatgcgggcggcggtggagcgggaggaggcagcggcagcggcagcgtggctgcgccggcggtgtgccgccccagcggctcgcggtggacgccgacgccggagcagatcaggatgctgaaggagctctactacggctgcggcatccggtcgcccagctcggagcagatccagcgcatcaccgccatgctgcggcagcacggcaagatcgagggcaagaacgtcttctactggttccagaaccacaaggcccgcgagcgccagaagcgccgcctcaccagcctcgacgtcaacgtgcccgccgccggcgcggccgacgccaccaccagccaactcggcgtcctctcgctgtcgtcgccgccgccttcaggcgcggcgcctccctcgcccaccctcggcttctacgccgccggcaatggcggcggatcggctgtgctgctggacacgagttccgactggggcagcagcggcgctgccatggccaccgagacatgcttcctgcaggactacatgggcgtgacggacacgggcagctcgtcgcagtggccacgcttctcgtcgtcggacacgataatggcggcggccgcggcgcgggcggcgacgacgcgggcgcccgagacgctccctctcttcccgacctgcggcgacgacggcggcagcggtagcagcagctacttgccgttctggggtgccgcgtccacaactgccggcgccacttcttccgttgcgatccagcagcaacaccagctgcaggagcagtacagcttttacagcaacagcaacagcacccagctggccggcaccggcaaccaagacgtatcggcaacagcagcagcagccgccgccctggagctgagcctcagctcatggtgctccccttaccctgctgcagggagtatgtgagagcaacgcgagctgccactgctcttcactgatgtctctggaatggaaggaggaggaagtgagcatagcgttggtgcgttgctgtcaagggcgaattcacatggttaacctagacttgtccatcttctggattggccaacttaattaatgtatgaaataaaaggatgcacacatagtgacatgctaatcactataatgtgggcatcaaagttgtgtgttatgtgtaattactagttatctgaataaaagagaaagagatcatccatatttcttatcctaaatgaatgtcacgtgtctttataattctttgatgaaccagatgcatttcattaaccaaatccatatacatataaatattaatcatatataattaatatcaattgggttagcaaaacaaatctagtctaggtgtgttttgcgaatgcggccgccaccgcggtggagctcgaattccggtccgggcctagaaggccagcttcaagtttgtacaaaaaagcaggctccggccagaatggcccggaccgggttaccgaattcgagctcggtaccatttaaattgcgcccgccacggccgtggaggtcgtattccggtcagcttgcatccctgcagtgcagcgtgacccggtcgtgcccctctctagagataatgagcattgcatgtctaagttataaaaaattaccacatattttttttgtcacacttgtttgaagtgcagtttatctatctttatacatatatttaaactttactctacgaataatataatctatagtactacaataatatcagtgttttagagaatcatataaatgaacagttagacatggtctaaaggacaattgagtattttgacaacaggactctacagttttatctttttagtgtgcatgtgttctcctttttttttgcaaatagcttcacctatataatacttcatccattttattagtacatccatttagggtttagggttaatggtttttatagactaatttttttagtacatctattttattctattttagcctctaaattaagaaaactaaaactctattttagtttttttatttaataatttagatataaaatagaataaaataaagtgactaaaaattaaacaaataccctttaagaaattaaaaaaactaaggaaacatttttcttgtttcgagtagataatgccagcctgttaaacgccgtcgacgagtctaacggacaccaaccagcgaaccagcagcgtcgcgtcgggccaagcgaagcagacggcacggcatctctgtcgctgcctctggacccctctcgagagttccgctccaccgttggacttgctccgctgtcggcatccagaaattgcgtggcggagcggcagacgtgagccggcacggcaggcggcctcctcctcctctcacggcaccggcagctacgggggattcctttcccaccgctccttcgctttcccttcctcgcccgccgtaataaatagacaccccctccacaccctctttccccaacctcgtgttgttcggagcgcacacacacacaaccagatctcccccaaatccacccgtcggcacctccgcttcaaggtacgccgctcgtcctcccccccccccctctctaccttctctagatcggcgttccggtccatgcatggttagggcccggtagttctacttctgttcatgtttgtgttagatccgtgtttgtgttagatccgtgctgctagcgttcgtacacggatgcgacctgtacgtcagacacgttctgattgctaacttgccagtgtttctctttggggaatcctgggatggctctagccgttccgcagacgggatcgatttcatgattttttttgtttcgttgcatagggtttggtttgcccttttcctttatttcaatatatgccgtgcacttgtttgtcgggtcatcttttcatgcttttttttgtcttggttgtgatgatgtggtctggttgggcggtcgttctagatcggagtagaattctgtttcaaactacctggtggatttattaattttggatctgtatgtgtgtgccatacatattcatagttacgaattgaagatgatggatggaaatatcgatctaggataggtatacatgttgatgcgggttttactgatgcatatacagagatgctttttgttcgcttggttgtgatgatgtggtgtggttgggcggtcgttcattcgttctagatcggagtagaatactgtttcaaactacctggtgtatttattaattttggaactgtatgtgtgtgtcatacatcttcatagttacgagtttaagatggatggaaatatcgatctaggataggtatacatgttgatgtgggttttactgatgcatatacatgatggcatatgcagcatctattcatatgctctaaccttgagtacctatctattataataaacaagtatgttttataattattttgatcttgatatacttggatgatggcatatgcagcagctatatgtggatttttttagccctgccttcatacgctatttatttgcttggtactgtttcttttgtcgatgctcaccctgttgtttggtgttacttctgcaggtcgactctagaggatccatggccactgtgaacaactggctcgctttctccctctccccgcaggagctgccgccctcccagacgacggactccacactcatctcggccgccaccgccgaccatgtctccggcgatgtctgcttcaacatcccccaagattggagcatgaggggatcagagctttcggcgctcgtcgcggagccgaagctggaggacttcctcggcggcatctccttctccgagcagcatcacaaggccaactgcaacatgatacccagcactagcagcacagtttgctacgcgagctcaggtgctagcaccggctaccatcaccagctgtaccaccagcccaccagctcagcgctccacttcgcggactccgtaatggtggcttcctcggccggtgtccacgacggcggtgccatgctcagcgcggccgccgctaacggtgtcgctggcgctgccagtgccaacggcggcggcatcgggctgtccatgattaagaactggctgcggagccaaccggcgcccatgcagccgagggtggcggcggctgagggcgcgcaggggctctctttgtccatgaacatggcggggacgacccaaggcgctgctggcatgccacttctcgctggagagcgcgcacgggcgcccgagagtgtatcgacgtcagcacagggtggagccgtcgtcgtcacggcgccgaaggaggatagcggtggcagcggtgttgccggcgctctagtagccgtgagcacggacacgggtggcagcggcggcgcgtcggctgacaacacggcaaggaagacggtggacacgttcgggcagcgcacgtcgatttaccgtggcgtgacaaggcatagatggactgggagatatgaggcacatctttgggataacagttgcagaagggaagggcaaactcgtaagggtcgtcaagtctatttaggtggctatgataaagaggagaaagctgctagggcttatgatcttgctgctctgaagtactggggtgccacaacaacaacaaattttccagtgagtaactacgaaaaggagctcgaggacatgaagcacatgacaaggcaggagtttgtagcgtctctgagaaggaagagcagtggtttctccagaggtgcatccatttacaggggagtgactaggcatcaccaacatggaagatggcaagcacggattggacgagttgcagggaacaaggatctttacttgggcaccttcagcacccaggaggaggcagcggaggcgtacgacatcgcggcgatcaagttccgcggcctcaacgccgtcaccaacttcgacatgagccgctacgacgtgaagagcatcctggacagcagcgccctccccatcggcagcgccgccaagcgcctcaaggaggccgaggccgcagcgtccgcgcagcaccaccacgccggcgtggtgagctacgacgtcggccgcatcgcctcgcagctcggcgacggcggagccctggcggcggcgtacggcgcgcactaccacggcgccgcctggccgaccatcgcgttccagccgggcgccgccagcacaggcctgtaccacccgtacgcgcagcagccaatgcgcggcggcgggtggtgcaagcaggagcaggaccacgcggtgatcgcggccgcgcacagcctgcaggacctccaccacctgaacctgggcgcggccggcgcgcacgactttttctcggcagggcagcaggccgccgccgctgcgatgcacggcctgggtagcatcgacagtgcgtcgctcgagcacagcaccggctccaactccgtcgtctacaacggcggggtcggcgacagcaacggcgccagcgccgtcggcggcagtggcggtggctacatgatgccgatgagcgctgccggagcaaccactacatcggcaatggtgagccacgagcaggtgcatgcacgggcctacgacgaagccaagcaggctgctcagatggggtacgagagctacctggtgaacgcggagaacaatggtggcggaaggatgtctgcatgggggactgtcgtgtctgcagccgcggcggcagcagcaagcagcaacgacaacatggccgccgacgtcgggcatggcggcgcgcagctcttcagtgtctggaacgacacttaagcgtacgtgccggcctggctctccgaaagggcgtattccagcacactggcggccgttactagacccaacctagacttgtccatcttctggattggccaacttaattaatgtatgaaataaaaggatgcacacatagtgacatgctaatcactataatgtgggcatcaaagttgtgtgttatgtgtaattactagttatctgaataaaagagaaagagatcatccatatttcttatcctaaatgaatgtcacgtgtctttataattctttgatgaaccagatgcatttcattaaccaaatccatatacatataaatattaatcatatataattaatatcaattgggttagcaaaacaaatctagtctaggtgtgttttgcgaatgcggcctccgggcacccagctttcttgtacaaagtggccgttaacggatcggccagaatggcccggaccgggttaccgaattcgagctcggtaccctggttcacaaactcaatacaacacacagtggagtagggtattacgctccggcggcccgaaccactctaaatccttgtgtcctcgtgtgctcttccaccattaatgactgtaattgcagggacacgaagagttgtagcgcttttgccaacaagatccgctatatgctagtagagtggaacctgcacagcaacaagcatccaataatctgagaataagaattatgtgtggtgatggttctcatctctgcaactcgccattttcgcgagagaaccaaatccaagttggtgaagatcatgatttgggctcatgggctggcatagtagctattacctttgcaattgtggttcgaatctatccgatattctccttttcagggagagctaatgcttatgcttattgggtattttggtttgacactgcttcacgcccaaaaaaaggcaactatgtctgagttggatatggcccaaaaaaaggcagctatgtctgagttggatatggaagtcttctttcgtttagggtgaagtaagaccaagctcatgagcttattatcttaggtcggaacaaattagttgataggcatggcacatttatcaaattataatgattttaacagaaaagcaacacctctttttcagcagcaccagctttgcaagctgcaattgacactccaagcatagtatttgctccaaactcagcctgcatttcgcacaatatcatatctatttccatttggataaaatatattttccagaaatatgggaacagaatcaagatacagaaaaaagttgtggtagtagtggtaagtggaaacacaagtacagtgaaaagatagcattatttctgaacagtcaaattaaccgaaataagtagtatcacatactgcccctaaattgactacacccaatgtaaagaattgcttgagcatattgagccatcagttgtttgtttgtgtaacggatttgacaatgcagagttcaggagcaaaaaaccgcaaaggagagaaagagggaaaggatctcctagtatcccaccttgtggcgcgccctgtcaagtgcatgatggcctggtcgatctgcgtctgctgctgcggttccatcccaacgagtgcctccgacaccttgtcgttgatcacccgcaccgcgtaggcgacccccctggcgaggaacttccgcctctcggaggccccggccgcgtcggcggcggcgccctcgagcgcgcccacgctagccgtagatgctcggtgcacggccttgttggtgtgcaactcgacctcaacggccggtgcgctacgcccgtcaaggatctggcgcgcccgcaccctcgtgatcacggtgggcgcctcccgcctcatgtggccgacgatgaaaagcgccgggttaggggccttggcgcgcaccgccgtattcagggcctcctcgctcttgcgcgagagcaggtgcttccccaggtactcctgcactgacaaggctgccacagcggtggaatttgtcctcacgacttcgccacgtcgtcctcacctccctggcttcccacgactccgccgtatcgaggtgctcggtgggtcgtcttaatccgaagtccgaactaggaagacgagacagagaggtctgaggaatgggcctcgtttgatgttgagctgaattatttttccagcataagcccaggtcttggtccatgaacaaaattactagaaacccagcccagtactacgatctaaaagagggactgccactggatagctctctctagcattctccacgctccaatacagcggcgtcgtgtctatccgggtctatccgcgaacacgtgagaactctccagaaactgctttctcctccacttcatctctctcgctttccctctataaaaagaccccttctaggaattgagggagacagcaagcaccaagcagcgatccgaagctcaatcaattcactcaaacctcttccccaaatcttcgattagatcttcgttgacaagaagactagaaccgaacctgacatgtccaacctgctcacggttcaccagaaccttccggctcttccagtggacgcgacgtccgatgaagtcaggaagaacctcatggacatgttccgcgacaggcaagcgttcagcgagcacacctggaagatgctgctctccgtctgccgctcctgggctgcatggtgcaagctgaacaacaggaagtggttccccgctgagcccgaggacgtgagggattaccttctgtacctgcaagcgcgaggtttgtttctgcttctacctttgatatatatataataattatcattaattagtagtaatataatatttcaaatatttttttcaaaataaaagaatgtagtatatagcaattgcttttctgtagtttataagtgtgtatattttaatttataacttttctaatatatgaccaaaacatggtgatgcctaggtctggcagtgaagaccatccagcaacaccttggacaactgaacatgcttcacaggcgctccggcctcccgcgccccagcgactcgaacgccgtgagcctcgtcatgcgccgcatcaggaaggaaaacgtcgatgccggcgaaagggcaaagcaggccctcgcgttcgagaggaccgatttcgaccaggtccgcagcctgatggagaacagcgacaggtgccaggacattaggaacctggcgttcctcggaattgcatacaacacgctcctcaggatcgcggaaattgcccgcattcgcgtgaaggacattagccgcaccgacggcggcaggatgcttatccacattggcaggaccaagacgctcgtttccaccgcaggcgtcgaaaaggccctcagcctcggagtgaccaagctcgtcgaacgctggatctccgtgtccggcgtcgcggacgacccaaacaactacctcttctgccgcgtccgcaagaacggggtggctgcccctagcgccaccagccaactcagcacgagggccttggaaggtattttcgaggccacccaccgcctgatctacggcgcgaaggatgacagcggtcaacgctacctcgcatggtccgggcactccgcccgcgttggagctgctagggacatggcccgcgccggtgtttccatccccgaaatcatgcaggcgggtggatggacgaacgtgaacattgtcatgaactacattcgcaaccttgacagcgagacgggcgcaatggttcgcctcctggaagatggtgactgaggtacccaacctagacttgtccatcttctggattggccaacttaattaatgtatgaaataaaaggatgcacacatagtgacatgctaatcactataatgtgggcatcaaagttgtgtgttatgtgtaattactagttatctgaataaaagagaaagagatcatccatatttcttatcctaaatgaatgtcacgtgtctttataattctttgatgaaccagatgcatttcattaaccaaatccatatacatataaatattaatcatatataattaatatcaattgggttagcaaaacaaatctagtctaggtgtgttttgcgatccgatatcgaattggccacggtaccagctgctgctgttctagggttcacaagtctgcctatttgtcttccccaatggagctatggttgtctggtctggtccttggtcgtgtcccgtttcattgtgtactatttacctgtaatgtgtatccttaagtctggtttgatggtgtctgaaacgttttgctgtggtagagcagcatggaagaactataatgaataagtgatccctaatcattgtgtccaaattttgcttctgctatacccttttgtgctgtttcttatgttttgcttaaaaatttgatctgacaaacaaatttgtctaaattatgctcttgttctgactgtgtactgtacacatttgtattgctaccggtttggcacatagttttctctttgattgcagatcaaacccttctgattgcagattgcttggctatggctgatgtgctcactgttcttctttagcttgtatattgctgatggtggcttggctacggctgaaaaagttgctgctgcgccgacttggcaactgttgctccagtaatgctttgtcctctcttcctagccgccgacttggcacttggcagctgttgctcctgtaatgcgttgttatctcttatctcttgagatgtactatgattttgaggctgtttgacttgtgccagattgccagtgctgatgctatattatctcaggtttttatgctagtatatgttttactgtgtgctgcctgtgtcgagttacgtaatctattgaaccgctatgcgtgttgatgccctgttgttgcttgccagattgatgcccctgttgcttgcagcttgcaagctgtagtgaaatcctaaaattccaaaccaaatctattctgaacttttgaagatctgtgatgtccggaagaaaagattcaaacagataaacgggactctccagaatctataaaataaatgatcgacaaacgctttgctttggtaggcttcaagcttggtcacccggtccgggcctagaaggccagcttcggccgccccgggcaactttattatacaaagttgatagataaatcagatatctggttcctaaggacccggcggaccgattaaactgattcggtccgacgcgttacctaataacttcgtatagcatacattatacgaagttattagctaactaactagtaagcttaagccatgggtcgacggatccgttaactagcgtggcatttggcaccgccgcacactatgcgagctaggagtgctagtttacagatgaaactatgaaaccaagaaaacacaattgtccgtagctagcgcgtggcgtcgtgtcaagcttcacacagtatcttcgttcttcactataaatcgcgcctgttgttcgtgagacccaccaccgtggataacagtcccctaataataagcgatcaacagcactgctgatggctgaacaccgaggcgccgccgcgcgtaaccatccgccggagcagcccgtcgtgccggcgaacgacgccttccccgaccgcgcccagcagctctgcctcgacgccgggcgcgcgctcgcgatgtgcggcgtgctcgtcgccgtccctcccgcattttacgcgtcgacgtcgcggacgacaccgcacttgccttcgtcggcttcgtcctctggatcatcggtgcgtggctgtgcctcctggcgctcacgcccttggctccacgggcggtgagggcgggcggggccgccgccagcaccttgctgatcaggtgcctgtccctttcatgaactactagcgcccgcgcccgcggccgccgggcacaagagaacacatcgatgttcgctgcgtacgtcagcaataaggcactctttgtcagtagtcgagtgcatatgttgggtgtttgccctgggagatttcaagtgttgtggccattatcccgcaggataaaaaatcggcggcttttggattgatacggaaaataacgatgtttcatgctcgtgttgtgtgtgtgacatcttgtcagccaagtttttaaccgttgctactccccctctgtgggctcagtgtgtggaccggaatacgtcgtacataggccgtagcctaagcccaatatgccgtttttcaggttggcctgtgtgacgacaagcgggtctcaaaagcccatcacgcaactggcctgcaattattggaggagagcgcgtcgagttggttccagaggctgcgtggtggggccggactctgcgacgacctctcgttcgcgtccgatttggttgccgtgagccgtgacgtaacgcctccttccgttcctccctatataagttccacccccgggtccggtttccccaagccccagtgacccccgatcccgatcgcgaaatctccgcacccgccggcaagggaccgaagcaagcctctctcccgaccgtcgcatcaaggtacgcgtccgctcgatctgtcctcttccttctcgatttgacttgctgtggtgcccgatcacgggatcagaatcgcaccagtgtagatttcgcatgttctaagatgtgttagtttccaggctaatccagttctcttgacgcccgatccgatcgagctccgtgtttatttcagcctaatcgtagtattcccctaaaatttcctcattagggggttcgcaagattgttggtcgacaggttcacttatgctcgatcgcttacttttagtcgattcatgctgcgtactattgttgccccccgtggttttatcttttctcgtgtgaaatccagtagatatagtagatatcgtagcattaggttttaattcaatcgattgattattgtatcatcaaaattgagaagttcgaatcatgcctatcatgctgcctcaaccgaaatcctgtatattgaagtttcaattcaattgattgatcattcattagattcaaccaaaatctagaaggttagatgacgcatgtcatgctgcctgcgtagtttacctttgatctgtttatgattaccttatcagtaggatatttgtgattttgggaagtagcactaactgattcatgctgacatgatgttccctttcagattatactgttgagtcctatctaattgatgctttgtatgctatatgaatacgtcatggtaaattagcagttaattagcatattagcaattgggcgtacctcatcaggattgctcttgtagatgtgtgtggtgatgtttcttgttcaattcatgttctgctttaaaagtatgtgttctctgtttgttaattaagattcatggttataatgatttggacctaattaatcagggttgcccttttagatgcgtggttacttgttgagttcatttttttcctgctatagttgtatgcgtttgttcattcatggttagatttgatttgtttcttctctattccatgccttccatatacttcaattgtagcttaacatgagatttctgtatatgcaggtcgaccgccggggatccacacgacaccatggcccagtccaagcacggcctgaccaaggagatgaccatgaagtaccgcatggagggctgcgtggacggccacaagttcgtgatcaccggcgagggcatcggctaccccttcaagggcaagcaggccatcaacctgtgcgtggtggagggcggccccttgcccttcgccgaggacatcttgtccgccgccttcatgtacggcaaccgcgtgttcaccgagtacccccaggacatcgtcgactacttcaagaactcctgccccgccggctacacctgggaccgctccttcctgttcgaggacggcgccgtgtgcatctgcaacgccgacatcaccgtgagcgtggaggagaactgcatgtaccacgagtccaagttctacggcgtgaacttccccgccgacggccccgtgatgaagaagatgaccgacaactgggagccctcctgcgagaagatcatccccgtgcccaagcagggcatcttgaagggcgacgtgagcatgtacctgctgctgaaggacggtggccgcttgcgctgccagttcgacaccgtgtacaaggccaagtccgtgccccgcaagatgcccgactggcacttcatccagcacaagctgacccgcgaggaccgcagcgacgccaagaaccagaagtggcacctgaccgagcacgccatcgcctccggctccgccttgccctccggactcagatctcgatagagtcaacctagacttgtccatcttctggattggccaacttaattaatgtatgaaataaaaggatgcacacatagtgacatgctaatcactataatgtgggcatcaaagttgtgtgttatgtgtaattactagttatctgaataaaagagaaagagatcatccatatttcttatcctaaatgaatgtcacgtgtctttataattctttgatgaaccagatgcatttcattaaccaaatccatatacatataaatattaatcatatataattaatatcaattgggttagcaaaacaaatctagtctaggtgtgttttgcgaattgcggcgcccttactttaacgcctctaaccaacacccctttatctttataaggaacaataaacagaatttgccccactgttctaaatcacctaataatatccccagctaaaaacaataaaggtttcctagaattaagacaagcatgactgttcctccaggagggtttggaacattgttgcagtcttgcagatacgggcgaagggtgagaaacagagcggagggctggaggtgacctcggtagtcgacgccggagttgagcttgacaacgacggggcggcccctgatggacttgaggaagtccgatggcgtcttcaccgtcccgccggcgcccgaggcgggcctgtcgctgccgccgccgccgctgctcatcttgcgcgctgtgcccccggcggtgtccctgtgttgcggatcgcgggtgggccaggtggatgcgagggcgacccgtttggactccggccggagccgccggatccctggtcggtgtcagtgccgtttactctgggccccacgtgtcagtaccgtctgtagatgacaacaacccgtcgtccacagtcatgtccaaaatatcctttcttcttttttttcgattcggatatctatcttccttttttttttccaaaaatcttcttgacgcaccagcgcgcacgtttgtggtaaacgccgacacgtcggtcccacgtcgatagaccccacccaccagtgagtagcgtgtacgtattcgggggtgacggacgtgtcgccgtcgtcttgctagtcccattcccatctgagccacacatctctgaacaaaaaaaaggagggaggcctccacgcacatccccctccgtgccacccgccccaaaccctcgcgccgcctccgagacagccgccgcaaccatggccaccgccgccgccgcgtctaccgcgctcactggcgccactaccgctgcgcccaaggcgaggcgccgggcgcacctcctggccacccgccgcgccctcgccgcgcccatcaggtgctcagcggcgtcacccgccatgccgatggctcccccggccaccccgctccggccgtggggccccaccgagccccgcaagggtgctgacatcctcgtcgagtccctcgagcgctgcggcgtccgcgacgtcttcgcctaccccggcggcgcgtccatggagatccaccaggcactcacccgctcccccgtcatcgccaaccacctcttccgccacgagcaaggggaggcctttgccgcctccggctacgcgcgctcctcgggccgcgtcggcgtctgcatcgccacctccggccccggcgccaccaacctagtctccgcgctcgccgacgcgctgctcgattccgtccccatggtcgccatcacgggacaggtggcgcgacgcatgattggcaccgacgccttccaggagacgcccatcgtcgaggtcacccgctccatcaccaagcacaactacctggtcctcgacgtcgacgacatcccccgcgtcgtgcaggaggctttcttcctcgcctcctctggtcgaccagggccggtgcttgtcgacatccccaaggacatccagcagcagatggcggtgcctgtctgggacaagcccatgagtctgcctgggtacattgcgcgccttcccaagccccctgcgactgagttgcttgagcaggtgctgcgtcttgttggtgaatcgcggcgccctgttctttatgtgggcggtggctgcgcagcatctggtgaggagttgcgacgctttgtggagctgactggaatcccggtcacaactactcttatgggcctcggcaacttccccagcgacgacccactgtctctgcgcatgctaggtatgcatgggacggtgtatgcaaattatgcagtggataaggccgatctgttgcttgcacttggtgtgcggtttgatgatcgcgtgacagggaagattgaggcttttgcaagcagggctaagattgtgcacgttgatattgatccggctgagattggcaagaacaagcagccacatgtgtccatctgtgcagatgttaagcttgctttgcagggcatgaatgctcttcttgaaggaagcacatcaaagaagagctttgactttggctcatggaacgatgagttggatcagcagaagagggaattcccccttgggtataaaacatctaatgaggagatccagccacaatatgctattcaggttcttgatgagctgacgaaaggcgaggccatcatcggcacaggtgttgggcagcaccagatgtgggcggcacagtactacacttacaagcggccaaggcagtggttgtcttcagctggtcttggggctatgggatttggtttgccggctgctgctggtgcttctgtggcaaacccaggtgtcactgttgttgacatcgatggagatggtagctttctcatgaacgttcaggagctagctatgatccgaattgagaacctcccagtgaaggtctttgtgctaaacaaccagcacctggggatggtggtgcagttggaggacaggttctataaggccaacagagcgcacacatacttgggaaacccagagaatgaaagtgagatatatccagatttcgtgacgatcgccaaagggttcaacattccagcggtccgtgtgacaaagaagaacgaagtccgcgcagcgataaagaagatgctcgagactccagggccgtacctcttggatataatcgtcccacaccaggagcatgtgttgcctatgatccctagtggtggggctttcaaggatatgatcctggatggtgatggcaggactgtgtactgactagctagtcagttaacagatctgccagatcctcggtgtacaaataacccgtcttatcctatgagacgggccggcgtcagtgtgttctggaggaatttttatgtcagagcctttttctttgtgtgcttgatgtagatgccaagggaagcttattggctgttgaagcttgatgcaaaataaattatggaactctgttttttgtttatctaataataactagcaaatatgcttccattgcattgaaactaacagccttttgtgtttccaagttttattttgtgacaatgtcatctatttcaattagttgtggaatcggaaacttgcaggactaacttggaaactccaatccctcagcatcctggactttttcctggtgtaatccatgtagatattattttaatcatcattttagttctggaggtttttccatctccggttttgctcccctttcttcaaaaaaaaaaaaaaaatgccgtaggcgccgcaacgcccacctgttgttcaaactcatgggcacgagtggctcgaagattttatacaacaattgctgtagtttcaccgttgctggtgaagaagcatttttttaaaaaaatatagtggtattcattttaattagtttagttgtgcagcgagcaaaatttggacatgctctgctcggaatctgatcgacctagacacagattagcagcagtagctttgtcatctgttccaagagttgcgatctgatagaagaaaaaaaaaccttcccttcaatgtaaaaccgaaactaacaagaaagaagcacagtgccgtttaggcaagtatggagtacgtattaagcatgtagaaggccatgcatgaaccactaacaagaaagaagcgcagtgccattcaggcaagcataagcatgtagattggcatgcatgaacaactaacagtagatcgtctctggtctgattagaagttttttgggaagccaagaaatcatgtacaactggttccatctcaaattccgtggcaaaaagaggcctaagcaacatacctcgagtagatcacattcaagcttggtcacccggtccgtcaatattctgattccgatgacttcgtaggttcctagctcaagccgctcgtgtccaagcgtcacttacgattagctaatgattacggcatctaggaccgactagtggcgcgccgactagctagctaaggtaccgagctcgaattcattccgattaatcgtggcctcttgctcttcaggatgaagagctatgtttaaacgtgcaagcgctactagacaattcagtacattaaaaacgtccgcaatgtgttattaagttgtctaagcgtcaatttgtttacaccacaatatatcctgcca

SEQ ID NO: 45 - DNA, 20569 bp, Artificial sequence
  PHP95075
gtttacccgccaatatatcctgtcaaacactgatagtttaaactgaaggcgggaaacgacaatctgatcatgagcggagaattaagggagtcacgttatgacccccgccgatgacgcgggacaagccgttttacgtttggaactgacagaaccgcaacgttgaaggagccactcagcaagctggtacgattgtaatacgactcactatagggcgaattgagcgctgtttaaacgctcttcaactggaagagcggttacgctgtttaaacgctcttcaactggaagagcggttactaccggttcactagctagctgctaatcgagctagttaccctatgaggtgacatgaagcgctcacggttactatgacggttagcttcacgactgttggtggcagtagcgtacgacttagctatagttccggacttacccttaagcgatttaaatctgcggttaccgaattcgagctcggtacctagtacccttgtacttttggtttcacctgcatagagaaaacccacaagaatatgacagtctgatttgtcagtctcattctcaagcaacatttctctatccgttactttcatggtgaataacacaatccatcatcaatactttgtgttactcagaaactgaaagttattccgagtcttgcatatctttggacctactcgtttttctaccattattgctgattgttaagctctcgctacttgaatcggcattgttggagtgggaaggttcaaaaaattggagttatgactagttgtctctttctatgtacgatggagaaaatgaataaacaactgagaaaatggctcttgtttagttgatgatgctcttaagctttccactggttgccatatatgatttgggcatttcactttgatcttaatgggccttgtaaagcccaagactcatgattatctttagttgatgctcttaattaggtgtgggcaaataattcaaactgtatgtacccgaccaaaaccaaagcaaaaataatcgaaccaaaccgaaaatttaaaaataaccgaatgaaaactaaatcctataactgaaagaactgaaaccgaatcaaaatatttaatgtaaccaaaaatatccgaaatataattatattgtcaaaaatattaataatttctagattaaataattaaaaatacttaaaaatttatataaaatagtaaaaatactcgaaaataaccacaaatattcaaaaacaaccgaaatatcccaaaatattcaaagcaaaataaccgaatggataccaaattttaaaaccgaaaaaactggaacaaaaccaaaatcgaaccaaaatttcaaaaatcgaataaatactaaactttagaacaaaaaaaaacgataaccgaatgtatacgaaccaaagccgaattagataaccgaacgtccaggactactcttaatctttccgccacttatgatttgggctattactttgtttataatgagccttttcaagctcaagttcatgattgtccgtgagatgagaaactgacttgttggattcgaaaccctagctagtattggttaatacttaatacataaatgacctgcattgacatcatcatccaagaaaataaaaattgtatgcttgagatatttagttttcctagctaggttttctttattttagtaccgaatctttaggtgtgccacgttaatttagacccattttttcatacttaccaactgagtctagtttaatcatgactataatcgtataaaatgattcagtcgacgtcattgcgaacgtatataaaatcatccaaattgacgtcattccaaagaggtaagcatgcttatctaagagtccgagcatactaaacaagacgacattttatttgcactccaaatcaaattttgtattgcctaaagaaaaacaatcaaactcaagtttcttaaaattaatttcattcaaactaatcactttcaatatctcacatattattcatgccatttctatttgtctaaacatgatttaaaaaaaaaagtaaaatacaaagattactatgcaaaaactctataaaaaaaaattcaaatttcttatttatttgtgacatcaaattttcaaaataatttttttaattatcggttgatccggtcagtcgataaaaacataaactttcagcgaccgttaaaactttcctactaccgatttagagaaaatcttagcttgaaacgtaattgtaacctgccttcatgcaagtcgcaagatatgtcatcctaagttgtatatgttttctcaaaagatgtatttacttgagaaaatacgtttcaacgttgatggacaaccaattaagaatcaagcacctttcgtaatcaatttaggcttatcgtctaaggtatactgatttacgacagttgactagacttataaggaacaaaataatagaatagtttctaaacacttcacctaatcatagagactaagatggtaattcgtaaacgacaaagcctagtgacactgtccattgtaaaattccacatcatattagtattaaacatatacatgtagtttcctgaacacatgtagtatcaaacacacttcgtggcttcttcctcgaaacctgcggccgcgctatagttccggacttacccttaagataacttcgtatagcatacattatacgaagttatgggcccacgcgtgaagagcggttaccagagctggtcacctttgtccaccaagatggaactgtcttcggccagaatggccatctggattcagcaggcctagaaggccatttatcgctatcaactttgtatagaaaagttgggccgaattcgagctcggtacggccagaatggcccggaccgaagcttgcggccgcacactgatagtttaaactgaaggcgggaaacgacaatctgatcatgagcggagaattaagggagtcacgttatgacccccgccgatgacgcgggacaagccgttttacgtttggaactgacagaaccgcaacgttgaaggagccactcagccgcgggtttctggagtttaatgagctaagcacatacgtcagaaaccattattgcgcgttcaaaagtcgcctaaggtcactatcagctagcaaatatttcttgtcaaaaatgctccactgacgttccataaattcccctcggtatccaattagagtctcatattcactctcccgggggatctcgactctagaggatcgctcaggaaggccgctgagatagaggcatggcggccaatgcgggcggcggtggagcgggaggaggcagcggcagcggcagcgtggctgcgccggcggtgtgccgccccagcggctcgcggtggacgccgacgccggagcagatcaggatgctgaaggagctctactacggctgcggcatccggtcgcccagctcggagcagatccagcgcatcaccgccatgctgcggcagcacggcaagatcgagggcaagaacgtcttctactggttccagaaccacaaggcccgcgagcgccagaagcgccgcctcaccagcctcgacgtcaacgtgcccgccgccggcgcggccgacgccaccaccagccaactcggcgtcctctcgctgtcgtcgccgccgccttcaggcgcggcgcctccctcgcccaccctcggcttctacgccgccggcaatggcggcggatcggctgtgctgctggacacgagttccgactggggcagcagcggcgctgccatggccaccgagacatgcttcctgcaggactacatgggcgtgacggacacgggcagctcgtcgcagtggccacgcttctcgtcgtcggacacgataatggcggcggccgcggcgcgggcggcgacgacgcgggcgcccgagacgctccctctcttcccgacctgcggcgacgacggcggcagcggtagcagcagctacttgccgttctggggtgccgcgtccacaactgccggcgccacttcttccgttgcgatccagcagcaacaccagctgcaggagcagtacagcttttacagcaacagcaacagcacccagctggccggcaccggcaaccaagacgtatcggcaacagcagcagcagccgccgccctggagctgagcctcagctcatggtgctccccttaccctgctgcagggagtatgtgagagcaacgcgagctgccactgctcttcactgatgtctctggaatggaaggaggaggaagtgagcatagcgttggtgcgttgctgtcaagggcgaattcacatggttaacctagacttgtccatcttctggattggccaacttaattaatgtatgaaataaaaggatgcacacatagtgacatgctaatcactataatgtgggcatcaaagttgtgtgttatgtgtaattactagttatctgaataaaagagaaagagatcatccatatttcttatcctaaatgaatgtcacgtgtctttataattctttgatgaaccagatgcatttcattaaccaaatccatatacatataaatattaatcatatataattaatatcaattgggttagcaaaacaaatctagtctaggtgtgttttgcgaatgcggccgccaccgcggtggagctcgaattccggtccgggcctagaaggccagcttcaagtttgtacaaaaaagcaggctccggccagagttacccggaccgaagcttgcatgcctgcagtgcagcgtgacccggtcgtgcccctctctagagataatgagcattgcatgtctaagttataaaaaattaccacatattttttttgtcacacttgtttgaagtgcagtttatctatctttatacatatatttaaactttactctacgaataatataatctatagtactacaataatatcagtgttttagagaatcatataaatgaacagttagacatggtctaaaggacaattgagtattttgacaacaggactctacagttttatctttttagtgtgcatgtgttctcctttttttttgcaaatagcttcacctatataatacttcatccattttattagtacatccatttagggtttagggttaatggtttttatagactaatttttttagtacatctattttattctattttagcctctaaattaagaaaactaaaactctattttagtttttttatttaataatttagatataaaatagaataaaataaagtgactaaaaattaaacaaataccctttaagaaattaaaaaaactaaggaaacatttttcttgtttcgagtagataatgccagcctgttaaacgccgtcgacgagtctaacggacaccaaccagcgaaccagcagcgtcgcgtcgggccaagcgaagcagacggcacggcatctctgtcgctgcctctggacccctctcgagagttccgctccaccgttggacttgctccgctgtcggcatccagaaattgcgtggcggagcggcagacgtgagccggcacggcaggcggcctcctcctcctctcacggcaccggcagctacgggggattcctttcccaccgctccttcgctttcccttcctcgcccgccgtaataaatagacaccccctccacaccctctttccccaacctcgtgttgttcggagcgcacacacacacaaccagatctcccccaaatccacccgtcggcacctccgcttcaaggtacgccgctcgtcctcccccccccccctctctaccttctctagatcggcgttccggtccatgcatggttagggcccggtagttctacttctgttcatgtttgtgttagatccgtgtttgtgttagatccgtgctgctagcgttcgtacacggatgcgacctgtacgtcagacacgttctgattgctaacttgccagtgtttctctttggggaatcctgggatggctctagccgttccgcagacgggatcgatttcatgattttttttgtttcgttgcatagggtttggtttgcccttttcctttatttcaatatatgccgtgcacttgtttgtcgggtcatcttttcatgcttttttttgtcttggttgtgatgatgtggtctggttgggcggtcgttctagatcggagtagaattctgtttcaaactacctggtggatttattaattttggatctgtatgtgtgtgccatacatattcatagttacgaattgaagatgatggatggaaatatcgatctaggataggtatacatgttgatgcgggttttactgatgcatatacagagatgctttttgttcgcttggttgtgatgatgtggtgtggttgggcggtcgttcattcgttctagatcggagtagaatactgtttcaaactacctggtgtatttattaattttggaactgtatgtgtgtgtcatacatcttcatagttacgagtttaagatggatggaaatatcgatctaggataggtatacatgttgatgtgggttttactgatgcatatacatgatggcatatgcagcatctattcatatgctctaaccttgagtacctatctattataataaacaagtatgttttataattattttgatcttgatatacttggatgatggcatatgcagcagctatatgtggatttttttagccctgccttcatacgctatttatttgcttggtactgtttcttttgtcgatgctcaccctgttgtttggtgttacttctgcaggtcgactttaacttagcctaggatggacaacttcctgccgttcccgagcagcaacgccaacagcgtgcaggagctgagcatggacccgaacaacaacaggagccacttcaccaccgtgccgacctacgaccaccaccaggcccagccgcaccacttcctgccgccgttcagctacccggtggagcagatggccgccgtgatgaacccgcagccggtgtacctgagcgagtgctacccgcagatcccggtgacccagaccggcagcgagttcggcagcctggtgggcaacccgtgcctgtggcaggagaggggcggcttcctggacccgaggatgaccaagatggccaggatcaacaggaagaacgccatgatgaggagcaggaacaacagcagcccgaacagcagcccgagcgagctggtggacagcaagaggcagctgatgatgctgaacctgaagaacaacgtgcagatcagcgacaagaaggacagctaccagcagagcaccttcgacaacaagaagctgagggtgctgtgcgagaaggagctgaagaacagcgacgtgggcagcctgggcaggatcgtgctgccgaagagggacgccgaggccaacctgccgaagctgagcgacaaggagggcatcgtggtgcagatgagggacgtgttcagcatgcagagctggagcttcaagtacaagttctggagcaacaacaagagcaggatgtacgtgctggagaacaccggcgagttcgtgaagcagaacggcgccgagatcggcgacttcctgaccatctacgaggacgagagcaagaacctgtacttcgccatgaacggcaacagcggcaagcagaacgagggcagggagaacgagagcagggagaggaaccactacgaggaggccatgctggactacatcccgagggacgaggaggaggccagcatcgccatgctgatcggcaacctgaacgaccactacccgatcccgaacgacctgatggacctgaccaccgacctgcagcaccaccaggccaccagcagcagcatgccgccggaggaccacgcctacgtgggcagcagcgacgaccaggtgagcttcaacgacttcgagtggtggtagggtaccgttaacagatctactaactatctatactgtaataatgttgtatagccgccggatagctagctagtttagtcattcagcggcgatgggtaataataaagtgtcatccatccatcaccatgcgtggcaacgtgagcaatgacctgattgaacaaattgaaatgaaaagaagaaatatgttatatgtcaacgagatttcctcataatgccactgacgacgtgtgtccaagaaatgtatcagtgatacgtatattcacaatttttttatgacttatactcacaatttgtttttttactacttatactcacaatttgttgtgcgtaccataacaatttcgatcgaatatatatcagaaagttgacgaaagtaagctcactcaaaaagttaaatgggctgcggaagctgcgtcaggcccaagttttggctattctatccggtatccacgattttgatggctgagggacatatgttcgcttaagcttcggtccgggcctagaaggccgatctcccgggcacccagctttcttgtacaaagtggccgttaacggatcggccagaatggcccggaccgggttaccgaattcgagctcggtaccctggttcacaaactcaatacaacacacagtggagtagggtattacgctccggcggcccgaaccactctaaatccttgtgtcctcgtgtgctcttccaccattaatgactgtaattgcagggacacgaagagttgtagcgcttttgccaacaagatccgctatatgctagtagagtggaacctgcacagcaacaagcatccaataatctgagaataagaattatgtgtggtgatggttctcatctctgcaactcgccattttcgcgagagaaccaaatccaagttggtgaagatcatgatttgggctcatgggctggcatagtagctattacctttgcaattgtggttcgaatctatccgatattctccttttcagggagagctaatgcttatgcttattgggtattttggtttgacactgcttcacgcccaaaaaaaggcaactatgtctgagttggatatggcccaaaaaaaggcagctatgtctgagttggatatggaagtcttctttcgtttagggtgaagtaagaccaagctcatgagcttattatcttaggtcggaacaaattagttgataggcatggcacatttatcaaattataatgattttaacagaaaagcaacacctctttttcagcagcaccagctttgcaagctgcaattgacactccaagcatagtatttgctccaaactcagcctgcatttcgcacaatatcatatctatttccatttggataaaatatattttccagaaatatgggaacagaatcaagatacagaaaaaagttgtggtagtagtggtaagtggaaacacaagtacagtgaaaagatagcattatttctgaacagtcaaattaaccgaaataagtagtatcacatactgcccctaaattgactacacccaatgtaaagaattgcttgagcatattgagccatcagttgtttgtttgtgtaacggatttgacaatgcagagttcaggagcaaaaaaccgcaaaggagagaaagagggaaaggatctcctagtatcccaccttgtggcgcgccctgtcaagtgcatgatggcctggtcgatctgcgtctgctgctgcggttccatcccaacgagtgcctccgacaccttgtcgttgatcacccgcaccgcgtaggcgacccccctggcgaggaacttccgcctctcggaggccccggccgcgtcggcggcggcgccctcgagcgcgcccacgctagccgtagatgctcggtgcacggccttgttggtgtgcaactcgacctcaacggccggtgcgctacgcccgtcaaggatctggcgcgcccgcaccctcgtgatcacggtgggcgcctcccgcctcatgtggccgacgatgaaaagcgccgggttaggggccttggcgcgcaccgccgtattcagggcctcctcgctcttgcgcgagagcaggtgcttccccaggtactcctgcactgacaaggctgccacagcggtggaatttgtcctcacgacttcgccacgtcgtcctcacctccctggcttcccacgactccgccgtatcgaggtgctcggtgggtcgtcttaatccgaagtccgaactaggaagacgagacagagaggtctgaggaatgggcctcgtttgatgttgagctgaattatttttccagcataagcccaggtcttggtccatgaacaaaattactagaaacccagcccagtactacgatctaaaagagggactgccactggatagctctctctagcattctccacgctccaatacagcggcgtcgtgtctatccgggtctatccgcgaacacgtgagaactctccagaaactgctttctcctccacttcatctctctcgctttccctctataaaaagaccccttctaggaattgagggagacagcaagcaccaagcagcgatccgaagctcaatcaattcactcaaacctcttccccaaatcttcgattagatcttcgttgacaagaagactagaaccgaacctgacatgtccaacctgctcacggttcaccagaaccttccggctcttccagtggacgcgacgtccgatgaagtcaggaagaacctcatggacatgttccgcgacaggcaagcgttcagcgagcacacctggaagatgctgctctccgtctgccgctcctgggctgcatggtgcaagctgaacaacaggaagtggttccccgctgagcccgaggacgtgagggattaccttctgtacctgcaagcgcgaggtttgtttctgcttctacctttgatatatatataataattatcattaattagtagtaatataatatttcaaatatttttttcaaaataaaagaatgtagtatatagcaattgcttttctgtagtttataagtgtgtatattttaatttataacttttctaatatatgaccaaaacatggtgatgcctaggtctggcagtgaagaccatccagcaacaccttggacaactgaacatgcttcacaggcgctccggcctcccgcgccccagcgactcgaacgccgtgagcctcgtcatgcgccgcatcaggaaggaaaacgtcgatgccggcgaaagggcaaagcaggccctcgcgttcgagaggaccgatttcgaccaggtccgcagcctgatggagaacagcgacaggtgccaggacattaggaacctggcgttcctcggaattgcatacaacacgctcctcaggatcgcggaaattgcccgcattcgcgtgaaggacattagccgcaccgacggcggcaggatgcttatccacattggcaggaccaagacgctcgtttccaccgcaggcgtcgaaaaggccctcagcctcggagtgaccaagctcgtcgaacgctggatctccgtgtccggcgtcgcggacgacccaaacaactacctcttctgccgcgtccgcaagaacggggtggctgcccctagcgccaccagccaactcagcacgagggccttggaaggtattttcgaggccacccaccgcctgatctacggcgcgaaggatgacagcggtcaacgctacctcgcatggtccgggcactccgcccgcgttggagctgctagggacatggcccgcgccggtgtttccatccccgaaatcatgcaggcgggtggatggacgaacgtgaacattgtcatgaactacattcgcaaccttgacagcgagacgggcgcaatggttcgcctcctggaagatggtgactgaggtacccaacctagacttgtccatcttctggattggccaacttaattaatgtatgaaataaaaggatgcacacatagtgacatgctaatcactataatgtgggcatcaaagttgtgtgttatgtgtaattactagttatctgaataaaagagaaagagatcatccatatttcttatcctaaatgaatgtcacgtgtctttataattctttgatgaaccagatgcatttcattaaccaaatccatatacatataaatattaatcatatataattaatatcaattgggttagcaaaacaaatctagtctaggtgtgttttgcgatccgatatcgaattggccacggtaccagctgctgctgttctagggttcacaagtctgcctatttgtcttccccaatggagctatggttgtctggtctggtccttggtcgtgtcccgtttcattgtgtactatttacctgtaatgtgtatccttaagtctggtttgatggtgtctgaaacgttttgctgtggtagagcagcatggaagaactataatgaataagtgatccctaatcattgtgtccaaattttgcttctgctatacccttttgtgctgtttcttatgttttgcttaaaaatttgatctgacaaacaaatttgtctaaattatgctcttgttctgactgtgtactgtacacatttgtattgctaccggtttggcacatagttttctctttgattgcagatcaaacccttctgattgcagattgcttggctatggctgatgtgctcactgttcttctttagcttgtatattgctgatggtggcttggctacggctgaaaaagttgctgctgcgccgacttggcaactgttgctccagtaatgctttgtcctctcttcctagccgccgacttggcacttggcagctgttgctcctgtaatgcgttgttatctcttatctcttgagatgtactatgattttgaggctgtttgacttgtgccagattgccagtgctgatgctatattatctcaggtttttatgctagtatatgttttactgtgtgctgcctgtgtcgagttacgtaatctattgaaccgctatgcgtgttgatgccctgttgttgcttgccagattgatgcccctgttgcttgcagcttgcaagctgtagtgaaatcctaaaattccaaaccaaatctattctgaacttttgaagatctgtgatgtccggaagaaaagattcaaacagataaacgggactctccagaatctataaaataaatgatcgacaaacgctttgctttggtaggcttcaagcttggtcacccggtccgggcctagaaggccagcttcggccgccccgggcaactttattatacaaagttgatagataaatcagatatctggttcctaaggacccggcggaccgattaaactgattcggtccgacgcgttacctaataacttcgtatagcatacattatacgaagttattagctaactaactagtaagcttaagccatgggtcgacggatccgttaactagcgtggcatttggcaccgccgcacactatgcgagctaggagtgctagtttacagatgaaactatgaaaccaagaaaacacaattgtccgtagctagcgcgtggcgtcgtgtcaagcttcacacagtatcttcgttcttcactataaatcgcgcctgttgttcgtgagacccaccaccgtggataacagtcccctaataataagcgatcaacagcactgctgatggctgaacaccgaggcgccgccgcgcgtaaccatccgccggagcagcccgtcgtgccggcgaacgacgccttccccgaccgcgcccagcagctctgcctcgacgccgggcgcgcgctcgcgatgtgcggcgtgctcgtcgccgtccctcccgcattttacgcgtcgacgtcgcggacgacaccgcacttgccttcgtcggcttcgtcctctggatcatcggtgcgtggctgtgcctcctggcgctcacgcccttggctccacgggcggtgagggcgggcggggccgccgccagcaccttgctgatcaggtgcctgtccctttcatgaactactagcgcccgcgcccgcggccgccgggcacaagagaacacatcgatgttcgctgcgtacgtcagcaataaggcactctttgtcagtagtcgagtgcatatgttgggtgtttgccctgggagatttcaagtgttgtggccattatcccgcaggataaaaaatcggcggcttttggattgatacggaaaataacgatgtttcatgctcgtgttgtgtgtgtgacatcttgtcagccaagtttttaaccgttgctactccccctctgtgggctcagtgtgtggaccggaatacgtcgtacataggccgtagcctaagcccaatatgccgtttttcaggttggcctgtgtgacgacaagcgggtctcaaaagcccatcacgcaactggcctgcaattattggaggagagcgcgtcgagttggttccagaggctgcgtggtggggccggactctgcgacgacctctcgttcgcgtccgatttggttgccgtgagccgtgacgtaacgcctccttccgttcctccctatataagttccacccccgggtccggtttccccaagccccagtgacccccgatcccgatcgcgaaatctccgcacccgccggcaagggaccgaagcaagcctctctcccgaccgtcgcatcaaggtacgcgtccgctcgatctgtcctcttccttctcgatttgacttgctgtggtgcccgatcacgggatcagaatcgcaccagtgtagatttcgcatgttctaagatgtgttagtttccaggctaatccagttctcttgacgcccgatccgatcgagctccgtgtttatttcagcctaatcgtagtattcccctaaaatttcctcattagggggttcgcaagattgttggtcgacaggttcacttatgctcgatcgcttacttttagtcgattcatgctgcgtactattgttgccccccgtggttttatcttttctcgtgtgaaatccagtagatatagtagatatcgtagcattaggttttaattcaatcgattgattattgtatcatcaaaattgagaagttcgaatcatgcctatcatgctgcctcaaccgaaatcctgtatattgaagtttcaattcaattgattgatcattcattagattcaaccaaaatctagaaggttagatgacgcatgtcatgctgcctgcgtagtttacctttgatctgtttatgattaccttatcagtaggatatttgtgattttgggaagtagcactaactgattcatgctgacatgatgttccctttcagattatactgttgagtcctatctaattgatgctttgtatgctatatgaatacgtcatggtaaattagcagttaattagcatattagcaattgggcgtacctcatcaggattgctcttgtagatgtgtgtggtgatgtttcttgttcaattcatgttctgctttaaaagtatgtgttctctgtttgttaattaagattcatggttataatgatttggacctaattaatcagggttgcccttttagatgcgtggttacttgttgagttcatttttttcctgctatagttgtatgcgtttgttcattcatggttagatttgatttgtttcttctctattccatgccttccatatacttcaattgtagcttaacatgagatttctgtatatgcaggtcgaccgccggggatccacacgacaccatggcccagtccaagcacggcctgaccaaggagatgaccatgaagtaccgcatggagggctgcgtggacggccacaagttcgtgatcaccggcgagggcatcggctaccccttcaagggcaagcaggccatcaacctgtgcgtggtggagggcggccccttgcccttcgccgaggacatcttgtccgccgccttcatgtacggcaaccgcgtgttcaccgagtacccccaggacatcgtcgactacttcaagaactcctgccccgccggctacacctgggaccgctccttcctgttcgaggacggcgccgtgtgcatctgcaacgccgacatcaccgtgagcgtggaggagaactgcatgtaccacgagtccaagttctacggcgtgaacttccccgccgacggccccgtgatgaagaagatgaccgacaactgggagccctcctgcgagaagatcatccccgtgcccaagcagggcatcttgaagggcgacgtgagcatgtacctgctgctgaaggacggtggccgcttgcgctgccagttcgacaccgtgtacaaggccaagtccgtgccccgcaagatgcccgactggcacttcatccagcacaagctgacccgcgaggaccgcagcgacgccaagaaccagaagtggcacctgaccgagcacgccatcgcctccggctccgccttgccctccggactcagatctcgatagagtcaacctagacttgtccatcttctggattggccaacttaattaatgtatgaaataaaaggatgcacacatagtgacatgctaatcactataatgtgggcatcaaagttgtgtgttatgtgtaattactagttatctgaataaaagagaaagagatcatccatatttcttatcctaaatgaatgtcacgtgtctttataattctttgatgaaccagatgcatttcattaaccaaatccatatacatataaatattaatcatatataattaatatcaattgggttagcaaaacaaatctagtctaggtgtgttttgcgaattgcggcgcccttactttaacgcctctaaccaacacccctttatctttataaggaacaataaacagaatttgccccactgttctaaatcacctaataatatccccagctaaaaacaataaaggtttcctagaattaagacaagcatgactgttcctccaggagggtttggaacattgttgcagtcttgcagatacgggcgaagggtgagaaacagagcggagggctggaggtgacctcggtagtcgacgccggagttgagcttgacaacgacggggcggcccctgatggacttgaggaagtccgatggcgtcttcaccgtcccgccggcgcccgaggcgggcctgtcgctgccgccgccgccgctgctcatcttgcgcgctgtgcccccggcggtgtccctgtgttgcggatcgcgggtgggccaggtggatgcgagggcgacccgtttggactccggccggagccgccggatccctggtcggtgtcagtgccgtttactctgggccccacgtgtcagtaccgtctgtagatgacaacaacccgtcgtccacagtcatgtccaaaatatcctttcttcttttttttcgattcggatatctatcttccttttttttttccaaaaatcttcttgacgcaccagcgcgcacgtttgtggtaaacgccgacacgtcggtcccacgtcgatagaccccacccaccagtgagtagcgtgtacgtattcgggggtgacggacgtgtcgccgtcgtcttgctagtcccattcccatctgagccacacatctctgaacaaaaaaaaggagggaggcctccacgcacatccccctccgtgccacccgccccaaaccctcgcgccgcctccgagacagccgccgcaaccatggccaccgccgccgccgcgtctaccgcgctcactggcgccactaccgctgcgcccaaggcgaggcgccgggcgcacctcctggccacccgccgcgccctcgccgcgcccatcaggtgctcagcggcgtcacccgccatgccgatggctcccccggccaccccgctccggccgtggggccccaccgagccccgcaagggtgctgacatcctcgtcgagtccctcgagcgctgcggcgtccgcgacgtcttcgcctaccccggcggcgcgtccatggagatccaccaggcactcacccgctcccccgtcatcgccaaccacctcttccgccacgagcaaggggaggcctttgccgcctccggctacgcgcgctcctcgggccgcgtcggcgtctgcatcgccacctccggccccggcgccaccaacctagtctccgcgctcgccgacgcgctgctcgattccgtccccatggtcgccatcacgggacaggtggcgcgacgcatgattggcaccgacgccttccaggagacgcccatcgtcgaggtcacccgctccatcaccaagcacaactacctggtcctcgacgtcgacgacatcccccgcgtcgtgcaggaggctttcttcctcgcctcctctggtcgaccagggccggtgcttgtcgacatccccaaggacatccagcagcagatggcggtgcctgtctgggacaagcccatgagtctgcctgggtacattgcgcgccttcccaagccccctgcgactgagttgcttgagcaggtgctgcgtcttgttggtgaatcgcggcgccctgttctttatgtgggcggtggctgcgcagcatctggtgaggagttgcgacgctttgtggagctgactggaatcccggtcacaactactcttatgggcctcggcaacttccccagcgacgacccactgtctctgcgcatgctaggtatgcatgggacggtgtatgcaaattatgcagtggataaggccgatctgttgcttgcacttggtgtgcggtttgatgatcgcgtgacagggaagattgaggcttttgcaagcagggctaagattgtgcacgttgatattgatccggctgagattggcaagaacaagcagccacatgtgtccatctgtgcagatgttaagcttgctttgcagggcatgaatgctcttcttgaaggaagcacatcaaagaagagctttgactttggctcatggaacgatgagttggatcagcagaagagggaattcccccttgggtataaaacatctaatgaggagatccagccacaatatgctattcaggttcttgatgagctgacgaaaggcgaggccatcatcggcacaggtgttgggcagcaccagatgtgggcggcacagtactacacttacaagcggccaaggcagtggttgtcttcagctggtcttggggctatgggatttggtttgccggctgctgctggtgcttctgtggcaaacccaggtgtcactgttgttgacatcgatggagatggtagctttctcatgaacgttcaggagctagctatgatccgaattgagaacctcccagtgaaggtctttgtgctaaacaaccagcacctggggatggtggtgcagttggaggacaggttctataaggccaacagagcgcacacatacttgggaaacccagagaatgaaagtgagatatatccagatttcgtgacgatcgccaaagggttcaacattccagcggtccgtgtgacaaagaagaacgaagtccgcgcagcgataaagaagatgctcgagactccagggccgtacctcttggatataatcgtcccacaccaggagcatgtgttgcctatgatccctagtggtggggctttcaaggatatgatcctggatggtgatggcaggactgtgtactgactagctagtcagttaacagatctgccagatcctcggtgtacaaataacccgtcttatcctatgagacgggccggcgtcagtgtgttctggaggaatttttatgtcagagcctttttctttgtgtgcttgatgtagatgccaagggaagcttattggctgttgaagcttgatgcaaaataaattatggaactctgttttttgtttatctaataataactagcaaatatgcttccattgcattgaaactaacagccttttgtgtttccaagttttattttgtgacaatgtcatctatttcaattagttgtggaatcggaaacttgcaggactaacttggaaactccaatccctcagcatcctggactttttcctggtgtaatccatgtagatattattttaatcatcattttagttctggaggtttttccatctccggttttgctcccctttcttcaaaaaaaaaaaaaaaatgccgtaggcgccgcaacgcccacctgttgttcaaactcatgggcacgagtggctcgaagattttatacaacaattgctgtagtttcaccgttgctggtgaagaagcatttttttaaaaaaatatagtggtattcattttaattagtttagttgtgcagcgagcaaaatttggacatgctctgctcggaatctgatcgacctagacacagattagcagcagtagctttgtcatctgttccaagagttgcgatctgatagaagaaaaaaaaaccttcccttcaatgtaaaaccgaaactaacaagaaagaagcacagtgccgtttaggcaagtatggagtacgtattaagcatgtagaaggccatgcatgaaccactaacaagaaagaagcgcagtgccattcaggcaagcataagcatgtagattggcatgcatgaacaactaacagtagatcgtctctggtctgattagaagttttttgggaagccaagaaatcatgtacaactggttccatctcaaattccgtggcaaaaagaggcctaagcaacatacctcgagtagatcacattcaagcttggtcacccggtccgtcaatattctgattccgatgacttcgtaggttcctagctcaagccgctcgtgtccaagcgtcacttacgattagctaatgattacggcatctaggaccgactagtggcgcgccgactagctagctaaggtaccgagctcgaattcattccgattaatcgtggcctcttgctcttcaggatgaagagctatgtttaaacgtgcaagcgctactagacaattcagtacattaaaaacgtccgcaatgtgttattaagttgtctaagcgtcaatttgtttacaccacaatatatcctgcca

SEQ ID NO: 46 - DNA, 22197 bp, Artificial sequence
  PHP95205
gtttacccgccaatatatcctgtcaaacactgatagtttaaactgaaggcgggaaacgacaatctgatcatgagcggagaattaagggagtcacgttatgacccccgccgatgacgcgggacaagccgttttacgtttggaactgacagaaccgcaacgttgaaggagccactcagcaagctggtacgattgtaatacgactcactatagggcgaattgagcgctgtttaaacgctcttcaactggaagagcggttacgctgtttaaacgctcttcaactggaagagcggttactaccggttcactagctagctgctaatcgagctagttaccctatgaggtgacatgaagcgctcacggttactatgacggttagcttcacgactgttggtggcagtagcgtacgacttagctatagttccggacttacccttaagcgatttaaatctgcggttaccgaattcgagctcggtacctagtacccttgtacttttggtttcacctgcatagagaaaacccacaagaatatgacagtctgatttgtcagtctcattctcaagcaacatttctctatccgttactttcatggtgaataacacaatccatcatcaatactttgtgttactcagaaactgaaagttattccgagtcttgcatatctttggacctactcgtttttctaccattattgctgattgttaagctctcgctacttgaatcggcattgttggagtgggaaggttcaaaaaattggagttatgactagttgtctctttctatgtacgatggagaaaatgaataaacaactgagaaaatggctcttgtttagttgatgatgctcttaagctttccactggttgccatatatgatttgggcatttcactttgatcttaatgggccttgtaaagcccaagactcatgattatctttagttgatgctcttaattaggtgtgggcaaataattcaaactgtatgtacccgaccaaaaccaaagcaaaaataatcgaaccaaaccgaaaatttaaaaataaccgaatgaaaactaaatcctataactgaaagaactgaaaccgaatcaaaatatttaatgtaaccaaaaatatccgaaatataattatattgtcaaaaatattaataatttctagattaaataattaaaaatacttaaaaatttatataaaatagtaaaaatactcgaaaataaccacaaatattcaaaaacaaccgaaatatcccaaaatattcaaagcaaaataaccgaatggataccaaattttaaaaccgaaaaaactggaacaaaaccaaaatcgaaccaaaatttcaaaaatcgaataaatactaaactttagaacaaaaaaaaacgataaccgaatgtatacgaaccaaagccgaattagataaccgaacgtccaggactactcttaatctttccgccacttatgatttgggctattactttgtttataatgagccttttcaagctcaagttcatgattgtccgtgagatgagaaactgacttgttggattcgaaaccctagctagtattggttaatacttaatacataaatgacctgcattgacatcatcatccaagaaaataaaaattgtatgcttgagatatttagttttcctagctaggttttctttattttagtaccgaatctttaggtgtgccacgttaatttagacccattttttcatacttaccaactgagtctagtttaatcatgactataatcgtataaaatgattcagtcgacgtcattgcgaacgtatataaaatcatccaaattgacgtcattccaaagaggtaagcatgcttatctaagagtccgagcatactaaacaagacgacattttatttgcactccaaatcaaattttgtattgcctaaagaaaaacaatcaaactcaagtttcttaaaattaatttcattcaaactaatcactttcaatatctcacatattattcatgccatttctatttgtctaaacatgatttaaaaaaaaaagtaaaatacaaagattactatgcaaaaactctataaaaaaaaattcaaatttcttatttatttgtgacatcaaattttcaaaataatttttttaattatcggttgatccggtcagtcgataaaaacataaactttcagcgaccgttaaaactttcctactaccgatttagagaaaatcttagcttgaaacgtaattgtaacctgccttcatgcaagtcgcaagatatgtcatcctaagttgtatatgttttctcaaaagatgtatttacttgagaaaatacgtttcaacgttgatggacaaccaattaagaatcaagcacctttcgtaatcaatttaggcttatcgtctaaggtatactgatttacgacagttgactagacttataaggaacaaaataatagaatagtttctaaacacttcacctaatcatagagactaagatggtaattcgtaaacgacaaagcctagtgacactgtccattgtaaaattccacatcatattagtattaaacatatacatgtagtttcctgaacacatgtagtatcaaacacacttcgtggcttcttcctcgaaacctgcggccgcgctatagttccggacttacccttaagataacttcgtatagcatacattatacgaagttatgggcccacgcgtgaagagcggttaccagagctggtcacctttgtccaccaagatggaactgtcttcggccagaatggccatctggattcagcaggcctagaaggccatttatcgctatcaactttgtatagaaaagttgggccgaattcgagctcggtacggccagaatggcccggaccgaagcttaggagctccctttaatctggcgcttgatctgcatccgcggcttgcaaagataaatggcacatttagtgtgttattttgcaatacctttcatagtagatatccttaaatgcagttttaggcatgtttgggtaattaaataacatttttaggaggagttttagatttacctttctttcgtgatgactgatgacagacgtggggaattcaaatgcaactctagcgaaagttcatatatttttcataaatagctgaggctggggtaattattttttgtagaaaaatagaataggtggaatggtttggggaaggcgtaggcgctcgtggacgacgccccataaaagacaagaggcggaattgccatgaattcgaggtagctaagtaaggcgcatatatatgccaaaaattctactgtcactttccaatttcaatgcgctgccaaacaagccgccgacccttggatactgacttgaattcagcccaattctgtagatccaaacagggccggcgtcagtgcctcaggtgagagagcagcagacgatgcaaagagccaaaagtggaagcagacgcagccgaagccgaagcccaagcccaaaactgttttgtctttgcccagaaccgcgacgagcctaaactgccgcttcctcctatctacaagtccctggcacatcacgcatagtccaaccatcgcgcgcaggcgataaggcgcgccacggggacgcgacatgtggtggcggacgcgatcaggatagggccaggctggccgggcgcggccacgggagaacggtggccactcgtcccacatccgcttcgtcctgtcctgtactgcgtcctgcccccaacgagagccggagccggccatcccgtcgcacactctccccctctatatatgccgtcggtgtgggggagcctactacaggacgacccaagcaagcaagcaagcagcgagtacatacatactaggcagccaggcagccccgggggatctcgactctagaggatcgctcaggaaggccgctgagatagaggcatggcggccaatgcgggcggcggtggagcgggaggaggcagcggcagcggcagcgtggctgcgccggcggtgtgccgccccagcggctcgcggtggacgccgacgccggagcagatcaggatgctgaaggagctctactacggctgcggcatccggtcgcccagctcggagcagatccagcgcatcaccgccatgctgcggcagcacggcaagatcgagggcaagaacgtcttctactggttccagaaccacaaggcccgcgagcgccagaagcgccgcctcaccagcctcgacgtcaacgtgcccgccgccggcgcggccgacgccaccaccagccaactcggcgtcctctcgctgtcgtcgccgccgccttcaggcgcggcgcctccctcgcccaccctcggcttctacgccgccggcaatggcggcggatcggctgtgctgctggacacgagttccgactggggcagcagcggcgctgccatggccaccgagacatgcttcctgcaggactacatgggcgtgacggacacgggcagctcgtcgcagtggccacgcttctcgtcgtcggacacgataatggcggcggccgcggcgcgggcggcgacgacgcgggcgcccgagacgctccctctcttcccgacctgcggcgacgacggcggcagcggtagcagcagctacttgccgttctggggtgccgcgtccacaactgccggcgccacttcttccgttgcgatccagcagcaacaccagctgcaggagcagtacagcttttacagcaacagcaacagcacccagctggccggcaccggcaaccaagacgtatcggcaacagcagcagcagccgccgccctggagctgagcctcagctcatggtgctccccttaccctgctgcagggagtatgtgagagcaacgcgagctgccactgctcttcactgatgtctctggaatggaaggaggaggaagtgagcatagcgttggtgcgttgctgtcaagggcgaattcacatggttaacctagacttgtccatcttctggattggccaacttaattaatgtatgaaataaaaggatgcacacatagtgacatgctaatcactataatgtgggcatcaaagttgtgtgttatgtgtaattactagttatctgaataaaagagaaagagatcatccatatttcttatcctaaatgaatgtcacgtgtctttataattctttgatgaaccagatgcatttcattaaccaaatccatatacatataaatattaatcatatataattaatatcaattgggttagcaaaacaaatctagtctaggtgtgttttgcgaatgcggccgccaccgcggtggagctcgaattccggtccgggcctagaaggccagcttcaagtttgtacaaaaaagcaggctccggccagaatggcccggaccgggttaccgaattcgagctcggtaccatttaaattgcgcccgccacggccgtggaggtcgtattccggtcagcttgcatccctgcagtgcagcgtgacccggtcgtgcccctctctagagataatgagcattgcatgtctaagttataaaaaattaccacatattttttttgtcacacttgtttgaagtgcagtttatctatctttatacatatatttaaactttactctacgaataatataatctatagtactacaataatatcagtgttttagagaatcatataaatgaacagttagacatggtctaaaggacaattgagtattttgacaacaggactctacagttttatctttttagtgtgcatgtgttctcctttttttttgcaaatagcttcacctatataatacttcatccattttattagtacatccatttagggtttagggttaatggtttttatagactaatttttttagtacatctattttattctattttagcctctaaattaagaaaactaaaactctattttagtttttttatttaataatttagatataaaatagaataaaataaagtgactaaaaattaaacaaataccctttaagaaattaaaaaaactaaggaaacatttttcttgtttcgagtagataatgccagcctgttaaacgccgtcgacgagtctaacggacaccaaccagcgaaccagcagcgtcgcgtcgggccaagcgaagcagacggcacggcatctctgtcgctgcctctggacccctctcgagagttccgctccaccgttggacttgctccgctgtcggcatccagaaattgcgtggcggagcggcagacgtgagccggcacggcaggcggcctcctcctcctctcacggcaccggcagctacgggggattcctttcccaccgctccttcgctttcccttcctcgcccgccgtaataaatagacaccccctccacaccctctttccccaacctcgtgttgttcggagcgcacacacacacaaccagatctcccccaaatccacccgtcggcacctccgcttcaaggtacgccgctcgtcctcccccccccccctctctaccttctctagatcggcgttccggtccatgcatggttagggcccggtagttctacttctgttcatgtttgtgttagatccgtgtttgtgttagatccgtgctgctagcgttcgtacacggatgcgacctgtacgtcagacacgttctgattgctaacttgccagtgtttctctttggggaatcctgggatggctctagccgttccgcagacgggatcgatttcatgattttttttgtttcgttgcatagggtttggtttgcccttttcctttatttcaatatatgccgtgcacttgtttgtcgggtcatcttttcatgcttttttttgtcttggttgtgatgatgtggtctggttgggcggtcgttctagatcggagtagaattctgtttcaaactacctggtggatttattaattttggatctgtatgtgtgtgccatacatattcatagttacgaattgaagatgatggatggaaatatcgatctaggataggtatacatgttgatgcgggttttactgatgcatatacagagatgctttttgttcgcttggttgtgatgatgtggtgtggttgggcggtcgttcattcgttctagatcggagtagaatactgtttcaaactacctggtgtatttattaattttggaactgtatgtgtgtgtcatacatcttcatagttacgagtttaagatggatggaaatatcgatctaggataggtatacatgttgatgtgggttttactgatgcatatacatgatggcatatgcagcatctattcatatgctctaaccttgagtacctatctattataataaacaagtatgttttataattattttgatcttgatatacttggatgatggcatatgcagcagctatatgtggatttttttagccctgccttcatacgctatttatttgcttggtactgtttcttttgtcgatgctcaccctgttgtttggtgttacttctgcaggtcgactctagaggatccatggccactgtgaacaactggctcgctttctccctctccccgcaggagctgccgccctcccagacgacggactccacactcatctcggccgccaccgccgaccatgtctccggcgatgtctgcttcaacatcccccaagattggagcatgaggggatcagagctttcggcgctcgtcgcggagccgaagctggaggacttcctcggcggcatctccttctccgagcagcatcacaaggccaactgcaacatgatacccagcactagcagcacagtttgctacgcgagctcaggtgctagcaccggctaccatcaccagctgtaccaccagcccaccagctcagcgctccacttcgcggactccgtaatggtggcttcctcggccggtgtccacgacggcggtgccatgctcagcgcggccgccgctaacggtgtcgctggcgctgccagtgccaacggcggcggcatcgggctgtccatgattaagaactggctgcggagccaaccggcgcccatgcagccgagggtggcggcggctgagggcgcgcaggggctctctttgtccatgaacatggcggggacgacccaaggcgctgctggcatgccacttctcgctggagagcgcgcacgggcgcccgagagtgtatcgacgtcagcacagggtggagccgtcgtcgtcacggcgccgaaggaggatagcggtggcagcggtgttgccggcgctctagtagccgtgagcacggacacgggtggcagcggcggcgcgtcggctgacaacacggcaaggaagacggtggacacgttcgggcagcgcacgtcgatttaccgtggcgtgacaaggcatagatggactgggagatatgaggcacatctttgggataacagttgcagaagggaagggcaaactcgtaagggtcgtcaagtctatttaggtggctatgataaagaggagaaagctgctagggcttatgatcttgctgctctgaagtactggggtgccacaacaacaacaaattttccagtgagtaactacgaaaaggagctcgaggacatgaagcacatgacaaggcaggagtttgtagcgtctctgagaaggaagagcagtggtttctccagaggtgcatccatttacaggggagtgactaggcatcaccaacatggaagatggcaagcacggattggacgagttgcagggaacaaggatctttacttgggcaccttcagcacccaggaggaggcagcggaggcgtacgacatcgcggcgatcaagttccgcggcctcaacgccgtcaccaacttcgacatgagccgctacgacgtgaagagcatcctggacagcagcgccctccccatcggcagcgccgccaagcgcctcaaggaggccgaggccgcagcgtccgcgcagcaccaccacgccggcgtggtgagctacgacgtcggccgcatcgcctcgcagctcggcgacggcggagccctggcggcggcgtacggcgcgcactaccacggcgccgcctggccgaccatcgcgttccagccgggcgccgccagcacaggcctgtaccacccgtacgcgcagcagccaatgcgcggcggcgggtggtgcaagcaggagcaggaccacgcggtgatcgcggccgcgcacagcctgcaggacctccaccacctgaacctgggcgcggccggcgcgcacgactttttctcggcagggcagcaggccgccgccgctgcgatgcacggcctgggtagcatcgacagtgcgtcgctcgagcacagcaccggctccaactccgtcgtctacaacggcggggtcggcgacagcaacggcgccagcgccgtcggcggcagtggcggtggctacatgatgccgatgagcgctgccggagcaaccactacatcggcaatggtgagccacgagcaggtgcatgcacgggcctacgacgaagccaagcaggctgctcagatggggtacgagagctacctggtgaacgcggagaacaatggtggcggaaggatgtctgcatgggggactgtcgtgtctgcagccgcggcggcagcagcaagcagcaacgacaacatggccgccgacgtcgggcatggcggcgcgcagctcttcagtgtctggaacgacacttaagcgtacgtgccggcctggctctccgaaagggcgtattccagcacactggcggccgttactagacccaacctagacttgtccatcttctggattggccaacttaattaatgtatgaaataaaaggatgcacacatagtgacatgctaatcactataatgtgggcatcaaagttgtgtgttatgtgtaattactagttatctgaataaaagagaaagagatcatccatatttcttatcctaaatgaatgtcacgtgtctttataattctttgatgaaccagatgcatttcattaaccaaatccatatacatataaatattaatcatatataattaatatcaattgggttagcaaaacaaatctagtctaggtgtgttttgcgaatgcggcctccgggcacccagctttcttgtacaaagtggccgttaacggatcggccagaatggcccggaccgggttaccgaattcgagctcggtaccctggttcacaaactcaatacaacacacagtggagtagggtattacgctccggcggcccgaaccactctaaatccttgtgtcctcgtgtgctcttccaccattaatgactgtaattgcagggacacgaagagttgtagcgcttttgccaacaagatccgctatatgctagtagagtggaacctgcacagcaacaagcatccaataatctgagaataagaattatgtgtggtgatggttctcatctctgcaactcgccattttcgcgagagaaccaaatccaagttggtgaagatcatgatttgggctcatgggctggcatagtagctattacctttgcaattgtggttcgaatctatccgatattctccttttcagggagagctaatgcttatgcttattgggtattttggtttgacactgcttcacgcccaaaaaaaggcaactatgtctgagttggatatggcccaaaaaaaggcagctatgtctgagttggatatggaagtcttctttcgtttagggtgaagtaagaccaagctcatgagcttattatcttaggtcggaacaaattagttgataggcatggcacatttatcaaattataatgattttaacagaaaagcaacacctctttttcagcagcaccagctttgcaagctgcaattgacactccaagcatagtatttgctccaaactcagcctgcatttcgcacaatatcatatctatttccatttggataaaatatattttccagaaatatgggaacagaatcaagatacagaaaaaagttgtggtagtagtggtaagtggaaacacaagtacagtgaaaagatagcattatttctgaacagtcaaattaaccgaaataagtagtatcacatactgcccctaaattgactacacccaatgtaaagaattgcttgagcatattgagccatcagttgtttgtttgtgtaacggatttgacaatgcagagttcaggagcaaaaaaccgcaaaggagagaaagagggaaaggatctcctagtatcccaccttgtggcgcgccctgtcaagtgcatgatggcctggtcgatctgcgtctgctgctgcggttccatcccaacgagtgcctccgacaccttgtcgttgatcacccgcaccgcgtaggcgacccccctggcgaggaacttccgcctctcggaggccccggccgcgtcggcggcggcgccctcgagcgcgcccacgctagccgtagatgctcggtgcacggccttgttggtgtgcaactcgacctcaacggccggtgcgctacgcccgtcaaggatctggcgcgcccgcaccctcgtgatcacggtgggcgcctcccgcctcatgtggccgacgatgaaaagcgccgggttaggggccttggcgcgcaccgccgtattcagggcctcctcgctcttgcgcgagagcaggtgcttccccaggtactcctgcactgacaaggctgccacagcggtggaatttgtcctcacgacttcgccacgtcgtcctcacctccctggcttcccacgactccgccgtatcgaggtgctcggtgggtcgtcttaatccgaagtccgaactaggaagacgagacagagaggtctgaggaatgggcctcgtttgatgttgagctgaattatttttccagcataagcccaggtcttggtccatgaacaaaattactagaaacccagcccagtactacgatctaaaagagggactgccactggatagctctctctagcattctccacgctccaatacagcggcgtcgtgtctatccgggtctatccgcgaacacgtgagaactctccagaaactgctttctcctccacttcatctctctcgctttccctctataaaaagaccccttctaggaattgagggagacagcaagcaccaagcagcgatccgaagctcaatcaattcactcaaacctcttccccaaatcttcgattagatcttcgttgacaagaagactagaaccgaacctgacatgtccaacctgctcacggttcaccagaaccttccggctcttccagtggacgcgacgtccgatgaagtcaggaagaacctcatggacatgttccgcgacaggcaagcgttcagcgagcacacctggaagatgctgctctccgtctgccgctcctgggctgcatggtgcaagctgaacaacaggaagtggttccccgctgagcccgaggacgtgagggattaccttctgtacctgcaagcgcgaggtttgtttctgcttctacctttgatatatatataataattatcattaattagtagtaatataatatttcaaatatttttttcaaaataaaagaatgtagtatatagcaattgcttttctgtagtttataagtgtgtatattttaatttataacttttctaatatatgaccaaaacatggtgatgcctaggtctggcagtgaagaccatccagcaacaccttggacaactgaacatgcttcacaggcgctccggcctcccgcgccccagcgactcgaacgccgtgagcctcgtcatgcgccgcatcaggaaggaaaacgtcgatgccggcgaaagggcaaagcaggccctcgcgttcgagaggaccgatttcgaccaggtccgcagcctgatggagaacagcgacaggtgccaggacattaggaacctggcgttcctcggaattgcatacaacacgctcctcaggatcgcggaaattgcccgcattcgcgtgaaggacattagccgcaccgacggcggcaggatgcttatccacattggcaggaccaagacgctcgtttccaccgcaggcgtcgaaaaggccctcagcctcggagtgaccaagctcgtcgaacgctggatctccgtgtccggcgtcgcggacgacccaaacaactacctcttctgccgcgtccgcaagaacggggtggctgcccctagcgccaccagccaactcagcacgagggccttggaaggtattttcgaggccacccaccgcctgatctacggcgcgaaggatgacagcggtcaacgctacctcgcatggtccgggcactccgcccgcgttggagctgctagggacatggcccgcgccggtgtttccatccccgaaatcatgcaggcgggtggatggacgaacgtgaacattgtcatgaactacattcgcaaccttgacagcgagacgggcgcaatggttcgcctcctggaagatggtgactgaggtacccaacctagacttgtccatcttctggattggccaacttaattaatgtatgaaataaaaggatgcacacatagtgacatgctaatcactataatgtgggcatcaaagttgtgtgttatgtgtaattactagttatctgaataaaagagaaagagatcatccatatttcttatcctaaatgaatgtcacgtgtctttataattctttgatgaaccagatgcatttcattaaccaaatccatatacatataaatattaatcatatataattaatatcaattgggttagcaaaacaaatctagtctaggtgtgttttgcgatccgatatcgaattggccacggtaccagctgctgctgttctagggttcacaagtctgcctatttgtcttccccaatggagctatggttgtctggtctggtccttggtcgtgtcccgtttcattgtgtactatttacctgtaatgtgtatccttaagtctggtttgatggtgtctgaaacgttttgctgtggtagagcagcatggaagaactataatgaataagtgatccctaatcattgtgtccaaattttgcttctgctatacccttttgtgctgtttcttatgttttgcttaaaaatttgatctgacaaacaaatttgtctaaattatgctcttgttctgactgtgtactgtacacatttgtattgctaccggtttggcacatagttttctctttgattgcagatcaaacccttctgattgcagattgcttggctatggctgatgtgctcactgttcttctttagcttgtatattgctgatggtggcttggctacggctgaaaaagttgctgctgcgccgacttggcaactgttgctccagtaatgctttgtcctctcttcctagccgccgacttggcacttggcagctgttgctcctgtaatgcgttgttatctcttatctcttgagatgtactatgattttgaggctgtttgacttgtgccagattgccagtgctgatgctatattatctcaggtttttatgctagtatatgttttactgtgtgctgcctgtgtcgagttacgtaatctattgaaccgctatgcgtgttgatgccctgttgttgcttgccagattgatgcccctgttgcttgcagcttgcaagctgtagtgaaatcctaaaattccaaaccaaatctattctgaacttttgaagatctgtgatgtccggaagaaaagattcaaacagataaacgggactctccagaatctataaaataaatgatcgacaaacgctttgctttggtaggcttcaagcttggtcacccggtccgggcctagaaggccagcttcggccgccccgggcaactttattatacaaagttgatagataaatcagatatctggttcctaaggacccggcggaccgattaaactgattcggtccgacgcgttacctaataacttcgtatagcatacattatacgaagttattagctaactaactagtaagcttaagccatgggtcgacggatccgttaactagcgtggcatttggcaccgccgcacactatgcgagctaggagtgctagtttacagatgaaactatgaaaccaagaaaacacaattgtccgtagctagcgcgtggcgtcgtgtcaagcttcacacagtatcttcgttcttcactataaatcgcgcctgttgttcgtgagacccaccaccgtggataacagtcccctaataataagcgatcaacagcactgctgatggctgaacaccgaggcgccgccgcgcgtaaccatccgccggagcagcccgtcgtgccggcgaacgacgccttccccgaccgcgcccagcagctctgcctcgacgccgggcgcgcgctcgcgatgtgcggcgtgctcgtcgccgtccctcccgcattttacgcgtcgacgtcgcggacgacaccgcacttgccttcgtcggcttcgtcctctggatcatcggtgcgtggctgtgcctcctggcgctcacgcccttggctccacgggcggtgagggcgggcggggccgccgccagcaccttgctgatcaggtgcctgtccctttcatgaactactagcgcccgcgcccgcggccgccgggcacaagagaacacatcgatgttcgctgcgtacgtcagcaataaggcactctttgtcagtagtcgagtgcatatgttgggtgtttgccctgggagatttcaagtgttgtggccattatcccgcaggataaaaaatcggcggcttttggattgatacggaaaataacgatgtttcatgctcgtgttgtgtgtgtgacatcttgtcagccaagtttttaaccgttgctactccccctctgtgggctcagtgtgtggaccggaatacgtcgtacataggccgtagcctaagcccaatatgccgtttttcaggttggcctgtgtgacgacaagcgggtctcaaaagcccatcacgcaactggcctgcaattattggaggagagcgcgtcgagttggttccagaggctgcgtggtggggccggactctgcgacgacctctcgttcgcgtccgatttggttgccgtgagccgtgacgtaacgcctccttccgttcctccctatataagttccacccccgggtccggtttccccaagccccagtgacccccgatcccgatcgcgaaatctccgcacccgccggcaagggaccgaagcaagcctctctcccgaccgtcgcatcaaggtacgcgtccgctcgatctgtcctcttccttctcgatttgacttgctgtggtgcccgatcacgggatcagaatcgcaccagtgtagatttcgcatgttctaagatgtgttagtttccaggctaatccagttctcttgacgcccgatccgatcgagctccgtgtttatttcagcctaatcgtagtattcccctaaaatttcctcattagggggttcgcaagattgttggtcgacaggttcacttatgctcgatcgcttacttttagtcgattcatgctgcgtactattgttgccccccgtggttttatcttttctcgtgtgaaatccagtagatatagtagatatcgtagcattaggttttaattcaatcgattgattattgtatcatcaaaattgagaagttcgaatcatgcctatcatgctgcctcaaccgaaatcctgtatattgaagtttcaattcaattgattgatcattcattagattcaaccaaaatctagaaggttagatgacgcatgtcatgctgcctgcgtagtttacctttgatctgtttatgattaccttatcagtaggatatttgtgattttgggaagtagcactaactgattcatgctgacatgatgttccctttcagattatactgttgagtcctatctaattgatgctttgtatgctatatgaatacgtcatggtaaattagcagttaattagcatattagcaattgggcgtacctcatcaggattgctcttgtagatgtgtgtggtgatgtttcttgttcaattcatgttctgctttaaaagtatgtgttctctgtttgttaattaagattcatggttataatgatttggacctaattaatcagggttgcccttttagatgcgtggttacttgttgagttcatttttttcctgctatagttgtatgcgtttgttcattcatggttagatttgatttgtttcttctctattccatgccttccatatacttcaattgtagcttaacatgagatttctgtatatgcaggtcgaccgccggggatccacacgacaccatggcccagtccaagcacggcctgaccaaggagatgaccatgaagtaccgcatggagggctgcgtggacggccacaagttcgtgatcaccggcgagggcatcggctaccccttcaagggcaagcaggccatcaacctgtgcgtggtggagggcggccccttgcccttcgccgaggacatcttgtccgccgccttcatgtacggcaaccgcgtgttcaccgagtacccccaggacatcgtcgactacttcaagaactcctgccccgccggctacacctgggaccgctccttcctgttcgaggacggcgccgtgtgcatctgcaacgccgacatcaccgtgagcgtggaggagaactgcatgtaccacgagtccaagttctacggcgtgaacttccccgccgacggccccgtgatgaagaagatgaccgacaactgggagccctcctgcgagaagatcatccccgtgcccaagcagggcatcttgaagggcgacgtgagcatgtacctgctgctgaaggacggtggccgcttgcgctgccagttcgacaccgtgtacaaggccaagtccgtgccccgcaagatgcccgactggcacttcatccagcacaagctgacccgcgaggaccgcagcgacgccaagaaccagaagtggcacctgaccgagcacgccatcgcctccggctccgccttgccctccggactcagatctcgatagagtcaacctagacttgtccatcttctggattggccaacttaattaatgtatgaaataaaaggatgcacacatagtgacatgctaatcactataatgtgggcatcaaagttgtgtgttatgtgtaattactagttatctgaataaaagagaaagagatcatccatatttcttatcctaaatgaatgtcacgtgtctttataattctttgatgaaccagatgcatttcattaaccaaatccatatacatataaatattaatcatatataattaatatcaattgggttagcaaaacaaatctagtctaggtgtgttttgcgaattgcggcgcccttactttaacgcctctaaccaacacccctttatctttataaggaacaataaacagaatttgccccactgttctaaatcacctaataatatccccagctaaaaacaataaaggtttcctagaattaagacaagcatgactgttcctccaggagggtttggaacattgttgcagtcttgcagatacgggcgaagggtgagaaacagagcggagggctggaggtgacctcggtagtcgacgccggagttgagcttgacaacgacggggcggcccctgatggacttgaggaagtccgatggcgtcttcaccgtcccgccggcgcccgaggcgggcctgtcgctgccgccgccgccgctgctcatcttgcgcgctgtgcccccggcggtgtccctgtgttgcggatcgcgggtgggccaggtggatgcgagggcgacccgtttggactccggccggagccgccggatccctggtcggtgtcagtgccgtttactctgggccccacgtgtcagtaccgtctgtagatgacaacaacccgtcgtccacagtcatgtccaaaatatcctttcttcttttttttcgattcggatatctatcttccttttttttttccaaaaatcttcttgacgcaccagcgcgcacgtttgtggtaaacgccgacacgtcggtcccacgtcgatagaccccacccaccagtgagtagcgtgtacgtattcgggggtgacggacgtgtcgccgtcgtcttgctagtcccattcccatctgagccacacatctctgaacaaaaaaaaggagggaggcctccacgcacatccccctccgtgccacccgccccaaaccctcgcgccgcctccgagacagccgccgcaaccatggccaccgccgccgccgcgtctaccgcgctcactggcgccactaccgctgcgcccaaggcgaggcgccgggcgcacctcctggccacccgccgcgccctcgccgcgcccatcaggtgctcagcggcgtcacccgccatgccgatggctcccccggccaccccgctccggccgtggggccccaccgagccccgcaagggtgctgacatcctcgtcgagtccctcgagcgctgcggcgtccgcgacgtcttcgcctaccccggcggcgcgtccatggagatccaccaggcactcacccgctcccccgtcatcgccaaccacctcttccgccacgagcaaggggaggcctttgccgcctccggctacgcgcgctcctcgggccgcgtcggcgtctgcatcgccacctccggccccggcgccaccaacctagtctccgcgctcgccgacgcgctgctcgattccgtccccatggtcgccatcacgggacaggtggcgcgacgcatgattggcaccgacgccttccaggagacgcccatcgtcgaggtcacccgctccatcaccaagcacaactacctggtcctcgacgtcgacgacatcccccgcgtcgtgcaggaggctttcttcctcgcctcctctggtcgaccagggccggtgcttgtcgacatccccaaggacatccagcagcagatggcggtgcctgtctgggacaagcccatgagtctgcctgggtacattgcgcgccttcccaagccccctgcgactgagttgcttgagcaggtgctgcgtcttgttggtgaatcgcggcgccctgttctttatgtgggcggtggctgcgcagcatctggtgaggagttgcgacgctttgtggagctgactggaatcccggtcacaactactcttatgggcctcggcaacttccccagcgacgacccactgtctctgcgcatgctaggtatgcatgggacggtgtatgcaaattatgcagtggataaggccgatctgttgcttgcacttggtgtgcggtttgatgatcgcgtgacagggaagattgaggcttttgcaagcagggctaagattgtgcacgttgatattgatccggctgagattggcaagaacaagcagccacatgtgtccatctgtgcagatgttaagcttgctttgcagggcatgaatgctcttcttgaaggaagcacatcaaagaagagctttgactttggctcatggaacgatgagttggatcagcagaagagggaattcccccttgggtataaaacatctaatgaggagatccagccacaatatgctattcaggttcttgatgagctgacgaaaggcgaggccatcatcggcacaggtgttgggcagcaccagatgtgggcggcacagtactacacttacaagcggccaaggcagtggttgtcttcagctggtcttggggctatgggatttggtttgccggctgctgctggtgcttctgtggcaaacccaggtgtcactgttgttgacatcgatggagatggtagctttctcatgaacgttcaggagctagctatgatccgaattgagaacctcccagtgaaggtctttgtgctaaacaaccagcacctggggatggtggtgcagttggaggacaggttctataaggccaacagagcgcacacatacttgggaaacccagagaatgaaagtgagatatatccagatttcgtgacgatcgccaaagggttcaacattccagcggtccgtgtgacaaagaagaacgaagtccgcgcagcgataaagaagatgctcgagactccagggccgtacctcttggatataatcgtcccacaccaggagcatgtgttgcctatgatccctagtggtggggctttcaaggatatgatcctggatggtgatggcaggactgtgtactgactagctagtcagttaacagatctgccagatcctcggtgtacaaataacccgtcttatcctatgagacgggccggcgtcagtgtgttctggaggaatttttatgtcagagcctttttctttgtgtgcttgatgtagatgccaagggaagcttattggctgttgaagcttgatgcaaaataaattatggaactctgttttttgtttatctaataataactagcaaatatgcttccattgcattgaaactaacagccttttgtgtttccaagttttattttgtgacaatgtcatctatttcaattagttgtggaatcggaaacttgcaggactaacttggaaactccaatccctcagcatcctggactttttcctggtgtaatccatgtagatattattttaatcatcattttagttctggaggtttttccatctccggttttgctcccctttcttcaaaaaaaaaaaaaaaatgccgtaggcgccgcaacgcccacctgttgttcaaactcatgggcacgagtggctcgaagattttatacaacaattgctgtagtttcaccgttgctggtgaagaagcatttttttaaaaaaatatagtggtattcattttaattagtttagttgtgcagcgagcaaaatttggacatgctctgctcggaatctgatcgacctagacacagattagcagcagtagctttgtcatctgttccaagagttgcgatctgatagaagaaaaaaaaaccttcccttcaatgtaaaaccgaaactaacaagaaagaagcacagtgccgtttaggcaagtatggagtacgtattaagcatgtagaaggccatgcatgaaccactaacaagaaagaagcgcagtgccattcaggcaagcataagcatgtagattggcatgcatgaacaactaacagtagatcgtctctggtctgattagaagttttttgggaagccaagaaatcatgtacaactggttccatctcaaattccgtggcaaaaagaggcctaagcaacatacctcgagtagatcacattcaagcttggtcacccggtccgtcaatattctgattccgatgacttcgtaggttcctagctcaagccgctcgtgtccaagcgtcacttacgattagctaatgattacggcatctaggaccgactagtggcgcgccgactagctagctaaggtaccgagctcgaattcattccgattaatcgtggcctcttgctcttcaggatgaagagctatgtttaaacgtgcaagcgctactagacaattcagtacattaaaaacgtccgcaatgtgttattaagttgtctaagcgtcaatttgtttacaccacaatatatcctgcca

SEQ ID NO: 47 - DNA, 23835 bp, Artificial sequence
  PHP95385
gtttacccgccaatatatcctgtcaaacactgcggccgcacttgaccgcggatggagccggagctgtggtgaggccatcgacgggaggtgggggagaacacagtctcagtgttctttgtgagtccgcaaggtttttagcttttctgtattaattaaggttgctgttggctgtagaatacggtcgtggaagagctgtatcggtagctactacgtaagctattatatactggaagtctggagctcgtcgatctccggtcgtcttcctccatttctcctcgtcttgctttgactgctgctaccatttgcttctgttttctgatgaagcatgccatgtcggccaccagtgtttgtgtggtttttgcagggaatggctttcaagtgctgtgattgaatggccctcgtcgtcctcggctgagctcacatggacgcgtcatgtgagtgagatatatgatcatatgatgagtggggttcgggtgagtgcgtacttgaagtaggatcccgctttcactcattcattcattggcctttaaaccgggaaattttcgcgaggagatggagggaagcaagcagggtgacgagtgcagagtgccgcgagcgctttgtcaaaaggcaccgccgtaggcaaaaaaatcaatggccctgactgactcgatggtagtactactgtagagactagagagggttgctccccatatcttcgtgtgacttttactccagcattgcatttccgtcattgagacgttaattaatagcagctttcgggacagatgactgtggccatgtttcgtcacggccgcttcgtgccagctgggggtactatagtactgtgattttgttagtaaaaactttcattaggccaccattgacgaccgggccttcgcttttgctgcgctaattaaccatttcccggcgaccgaagggaacatgaacatgccccgacacatgagggcatgaggactagtgttctccctgtcgttcgttgacttgactagtgatagtttaaacgctcttcaactggaagagcggttactaccggttcactagctagctgctaatcgagctagttaccctatgaggtgacatgaagcgctcacggttactatgacggttagcttcacgactgttggtggcagtagcgtacgacttagctatagttccggacttacctagctaataacttcgtatagcatacattatacgaagttatggttacccggaccgaagcttgcatgcctgcagcccatccctcagccgcctttcactatcttttttgcccgagtcattgtcatgtgaaccttggcatgtataatcggtgaattgcgtcgattttcctcttataggtgggccaatgaatccgtgtgatcgcgtctgattggctagagatatgtttcttccttgttggatgtattttcatacataatcatatgcatacaaatatttcattacactttatagaaatggtcagtaataaaccctatcactatgtctggtgtttcattttatttgcttttaaacgaaaattgacttcctgattcaatatttaaggatcgtcaacggtgtgcagttactaaattctggtttgtaggaactatagtaaactattcaagtcttcacttattgtgcactcacctctcgccacatcaccacagatgttattcacgtcttaaatttgaactacacatcatattgacacaatattttttttaaataagcgattaaaacctagcctctatgtcaacaatggtgtacataaccagcgaagtttagggagtaaaaaacatcgccttacacaaagttcgctttaaaaaataaagagtaaattttactttggaccacccttcaaccaatgtttcactttagaacgagtaattttattattgtcactttggaccaccctcaaatcttttttccatctacatccaatttatcatgtcaaagaaatggtctacatacagctaaggagatttatcgacgaatagtagctagcatactcgaggtcattcatatgcttgagaagagagtcgggatagtccaaaataaaacaaaggtaagattacctggtcaaaagtgaaaacatcagttaaaaggtggtataaagtaaaatatcggtaataaaaggtggcccaaagtgaaatttactcttttctactattataaaaattgaggatgtttttgtcggtactttgatacgtcatttttgtatgaattggtttttaagtttattcgcttttggaaatgcatatctgtatttgagtcgggttttaagttcgtttgcttttgtaaatacagagggatttgtataagaaatatctttaaaaaaacccatatgctaatttgacataatttttgagaaaaatatatattcaggcgaattctcacaatgaacaataataagattaaaatagctttcccccgttgcagcgcatgggtattttttctagtaaaaataaaagataaacttagactcaaaacatttacaaaaacaacccctaaagttcctaaagcccaaagtgctatccacgatccatagcaagcccagcccaacccaacccaacccaacccaccccagtccagccaactggacaatagtctccacacccccccactatcaccgtgagttgtccgcacgcaccgcacgtctcgcagccaaaaaaaaaaaaagaaagaaaaaaaagaaaaagaaaaaacagcaggtgggtccgggtcgtgggggccggaaacgcgaggaggatcgcgagccagcgacgaggccggccctccctccgcttccaaagaaacgccccccatcgccactatatacatacccccccctctcctcccatccccccaaccctaccaccaccaccaccaccacctccacctcctcccccctcgctgccggacgacgagctcctcccccctccccctccgccgccgccgcgccggtaaccaccccgcccctctcctctttctttctccgttttttttttccgtcacggtctcgatctttggccttggtagtttgggtgggcgagaggcggcttcgtgcgcgcccagatcggtgcgcgggaggggcgggatctcgcggctggggctctcgccggcgtggatcaggcccggatctcgcggggaatggggctctcggatgtagatctgcgatccgccgttgttgggggagatgatggggggtttaaaatttccgccatgctaaacaagatcaggaagaggggaaaagggcactatggtttatatttttatatatttctgctgcttcgtcaggcttagatgtgctagatctttctttcttctttttgtgggtagaatttgaatccctcagcattgttcatcggtagtttttcttttcatgatttgtgacaaatgcagcctcgtgcggagcttttttgtaggtagaaggatccgcccatggcggccaatgcgggcggcggtggagcgggaggaggcagcggcagcggcagcgtggctgcgccggcggtgtgccgccccagcggctcgcggtggacgccgacgccggagcagatcaggatgctgaaggagctctactacggctgcggcatccggtcgcccagctcggagcagatccagcgcatcaccgccatgctgcggcagcacggcaagatcgagggcaagaacgtcttctactggttccagaaccacaaggcccgcgagcgccagaagcgccgcctcaccagcctcgacgtcaacgtgcccgccgccggcgcggccgacgccaccaccagccaactcggcgtcctctcgctgtcgtcgccgccgccttcaggcgcggcgcctccctcgcccaccctcggcttctacgccgccggcaatggcggcggatcggctgtgctgctggacacgagttccgactggggcagcagcggcgctgctatggccaccgagacatgcttcctgcaggactacatgggcgtgacggacacgggcagctcgtcgcagtggccacgcttctcgtcgtcggacacgataatggcggcggccgcggcgcgggcggcgacgacgcgggcgcccgagacgctccctctcttcccgacctgcggcgacgacggcggcagcggtagcagcagctacttgccgttctggggtgccgcgtccacaactgccggcgccacttcttccgttgcgatccaacagcaacaccagctgcaggagcagtacagcttttacagcaacagcaacagcacccagctggccggcaccggcaaccaagacgtatcggcaacagcagcagcagccgccgccctggagctgagcctcagctcatggtgctccccttaccctgctgcagggagtatgtgagagcaacgcgagctgccactgctcttcactgatgtctctggaatggaaggaggaggaagtgagaacagatcattcgacaaagcagcattagtccgttgatcggtggaagaccactcgtcagtgttgagttgaatgtttgatcaataaaatacggcaatgctgtaagggttgttttttatgccattgataatacactgtactgttcagttgttgaactctatttcttagccatgccaagtgcttttcttattttgaataacattacagcaaaaagttgaaagacaaaaaaaaaaacccccgaacagagtgctttgggtcccaagcttctttagactgtgttcggcgttccccctaaatttctccccctatatctcactcacttgtcacatcagcgttctctttccccctatatctccacgctctacagcagttccacctatatcaaacctctataccccaccacaacaatattatatactttcatcttcaactaactcatgtaccttccaatttttttctactaataattatttacgtgcacagaaacttagcaaggagagagagagcgggaatttaaatgctcggcgttaggcttttagtccgctaggtggctagaccgaggttaggacgctagttcactaggggcctagtggtgttttaagacgtcacggtcaccacgcgtggaccgaagcttgcatgcctgcagtgcagcgtgacccggtcgtgcccctctctagagataatgagcattgcatgtctaagttataaaaaattaccacatattttttttgtcacacttgtttgaagtgcagtttatctatctttatacatatatttaaactttactctacgaataatataatctatagtactacaataatatcagtgttttagagaatcatataaatgaacagttagacatggtctaaaggacaattgagtattttgacaacaggactctacagttttatctttttagtgtgcatgtgttctcctttttttttgcaaatagcttcacctatataatacttcatccattttattagtacatccatttagggtttagggttaatggtttttatagactaatttttttagtacatctattttattctattttagcctctaaattaagaaaactaaaactctattttagtttttttatttaataatttagatataaaatagaataaaataaagtgactaaaaattaaacaaataccctttaagaaattaaaaaaactaaggaaacatttttcttgtttcgagtagataatgccagcctgttaaacgccgtcgacgagtctaacggacaccaaccagcgaaccagcagcgtcgcgtcgggccaagcgaagcagacggcacggcatctctgtcgctgcctctggacccctctcgagagttccgctccaccgttggacttgctccgctgtcggcatccagaaattgcgtggcggagcggcagacgtgagccggcacggcaggcggcctcctcctcctctcacggcaccggcagctacgggggattcctttcccaccgctccttcgctttcccttcctcgcccgccgtaataaatagacaccccctccacaccctctttccccaacctcgtgttgttcggagcgcacacacacacaaccagatctcccccaaatccacccgtcggcacctccgcttcaaggtacgccgctcgtcctcccccccccccctctctaccttctctagatcggcgttccggtccatgcatggttagggcccggtagttctacttctgttcatgtttgtgttagatccgtgtttgtgttagatccgtgctgctagcgttcgtacacggatgcgacctgtacgtcagacacgttctgattgctaacttgccagtgtttctctttggggaatcctgggatggctctagccgttccgcagacgggatcgatttcatgattttttttgtttcgttgcatagggtttggtttgcccttttcctttatttcaatatatgccgtgcacttgtttgtcgggtcatcttttcatgcttttttttgtcttggttgtgatgatgtggtctggttgggcggtcgttctagatcggagtagaattctgtttcaaactacctggtggatttattaattttggatctgtatgtgtgtgccatacatattcatagttacgaattgaagatgatggatggaaatatcgatctaggataggtatacatgttgatgcgggttttactgatgcatatacagagatgctttttgttcgcttggttgtgatgatgtggtgtggttgggcggtcgttcattcgttctagatcggagtagaatactgtttcaaactacctggtgtatttattaattttggaactgtatgtgtgtgtcatacatcttcatagttacgagtttaagatggatggaaatatcgatctaggataggtatacatgttgatgtgggttttactgatgcatatacatgatggcatatgcagcatctattcatatgctctaaccttgagtacctatctattataataaacaagtatgttttataattattttgatcttgatatacttggatgatggcatatgcagcagctatatgtggatttttttagcactgccttcatacgctatttatttgcttggtactgtttcttttgtcgatgctcaccctgttgtttggtgttacttctgcaggtcgactttaacttagcctaggatccatggccactgtgaacaactggctcgctttctccctctccccgcaggagctgccgccctcccagacgacggactccacactcatctcggccgccaccgccgaccatgtctccggcgatgtctgcttcaacatcccccaagattggagcatgaggggatcagagctttcggcgctcgtcgcggagccgaagctggaggacttcctcggcggcatctccttctccgagcagcatcacaaggccaactgcaacatgatacccagcactagcagcacagtttgctacgcgagctcaggtgctagcaccggctaccatcaccagctgtaccaccagcccaccagctcagcgctccacttcgcggactccgtaatggtggcttcctcggccggtgtccacgacggcggtgccatgctcagcgcggccgccgctaacggtgtcgctggcgctgccagtgccaacggcggcggcatcgggctgtccatgattaagaactggctgcggagccaaccggcgcccatgcagccgagggtggcggcggctgagggcgcgcaggggctctctttgtccatgaacatggcggggacgacccaaggcgctgctggcatgccacttctcgctggagagcgcgcacgggcgcccgagagtgtatcgacgtcagcacagggtggagccgtcgtcgtcacggcgccgaaggaggatagcggtggcagcggtgttgccggcgctctagtagccgtgagcacggacacgggtggcagcggcggcgcgtcggctgacaacacggcaaggaagacggtggacacgttcgggcagcgcacgtcgatttaccgtggcgtgacaaggcatagatggactgggagatatgaggcacatctttgggataacagttgcagaagggaagggcaaactcgtaagggtcgtcaagtctatttaggtggctatgataaagaggagaaagctgctagggcttatgatcttgctgctctgaagtactggggtgccacaacaacaacaaattttccagtgagtaactacgaaaaggagctcgaggacatgaagcacatgacaaggcaggagtttgtagcgtctctgagaaggaagagcagtggtttctccagaggtgcatccatttacaggggagtgactaggcatcaccaacatggaagatggcaagcacggattggacgagttgcagggaacaaggatctttacttgggcaccttcagcacccaggaggaggcagcggaggcgtacgacatcgcggcgatcaagttccgcggcctcaacgccgtcaccaacttcgacatgagccgctacgacgtgaagagcatcctggacagcagcgccctccccatcggcagcgccgccaagcgcctcaaggaggccgaggccgcagcgtccgcgcagcaccaccacgccggcgtggtgagctacgacgtcggccgcatcgcctcgcagctcggcgacggcggagccctggcggcggcgtacggcgcgcactaccacggcgccgcctggccgaccatcgcgttccagccgggcgccgccagcacaggcctgtaccacccgtacgcgcagcagccaatgcgcggcggcgggtggtgcaagcaggagcaggaccacgcggtgatcgcggccgcgcacagcctgcaggacctccaccacctgaacctgggcgcggccggcgcgcacgactttttctcggcagggcagcaggccgccgccgctgcgatgcacggcctgggtagcatcgacagtgcgtcgctcgagcacagcaccggctccaactccgtcgtctacaacggcggggtcggcgacagcaacggcgccagcgccgtcggcggcagtggcggtggctacatgatgccgatgagcgctgccggagcaaccactacatcggcaatggtgagccacgagcaggtgcatgcacgggcctacgacgaagccaagcaggctgctcagatggggtacgagagctacctggtgaacgcggagaacaatggtggcggaaggatgtctgcatgggggactgtcgtgtctgcagccgcggcggcagcagcaagcagcaacgacaacatggccgccgacgtcgggcatggcggcgcgcagctcttcagtgtctggaacgacacttaagcgtacctagtggtacctgacatcttatagtctgcaacctctcgtgtctgaattcctatctttatcaagtgttattgcttccacgactataggacagctttcgtcgaaagcttttgctcatgtgatctcgaaggattcatctagtctgatttttcgtgacttgtatcggttttattggattcatccaacatatatcaataaaaaatgagttgtgtttcctttcttcctagttcagttaaaattatttccctcctgcgcttgtgctgtaattgtctgtgtacctgttgtttgtgactgtgttagttcccttggatatgatttcgtatttgatatgtacatggagatagcttagcttcattattggagtatgaagttagtatgacatagtcactctcctggaaaattgacactgcaaaccatatttttattctgaaccacaaatcctagtcagtccgctggcatatgccgtccgtttgctgaatccagaacgtgggtttggagatgtacggctgagatgcctctatgcgaaggggatttcgtggtgaaacgagatgggagtagagcaacgcccgtggaagatgcttcaaacttccacacttttgagcaacgatcggcagtagtaaggtagacgatttcaagatcaaagcatatgaagataaacaacatcaacaacaaaatttgttggggttctatagagagaaacagagctacatacatacactgttttgtatctaccatctgagatgatgaaaagatgaaaaactaaagaatgccccggcgccaacgccaggacacgccgcgcgcgcgtcacccgagccatctcttgacccagccggcgctgtatatttacacacgttgcagcatcgatcaccacctgttcgatcgcgtcgccgtcaccggcgcgccgcgacttattgaactagtctagggcgcggctaacaacctagcttagattgccttgtctaaacccttaggctaacgcgccactctagaaggccgatctcccccgaacgcgccagatcttgaagaaactatgtgctgtagtatagccgctgcccgctggctagctagctagttgagtcatttagcggcgatgattgagtaataatgtgtcacgcatcaccatgcatgggtggcagtgtcagtgtgagcaatgacctgaatgaacaattgaaatgaaaagaaaaaagtattgttccaaattaaacgttttaaccttttaataggtttatacaataattgatatatgttttctgtatatgtctaatttgttatcatccatttagatatagacaaaaaaaatctaagaactaaaacaaatgctaatttgaaatgaagggagtatatattgggataatgtcgatgagatccctcgtaatatcaccgacatcacacgtgtccagttaatgtatcagtgatacgtgtattcacatttgttgcgcgtaggcgtacccaacaattttgatcgactatcagaaagtcaacggaagcgagtcgacctcgagggggggccccggccgaagcttcggccggggcccatcgataacgagtatcggtccccattgacacatctactcctaacgctaacaacattcttcacttctagtgtatggcatcgacaattggtactttaatcttgggtcttcacttttacaactaaacaacccaaatataaatattatttgagtgggtttggtgttcatcagaacattcccatctttggtaatgctacctagcataaaagtgagctatcacgttgggcagcccattccatgcaatttttaccttcctcaaaaaaaatctttgatatatttatggtataataatttaaacttcacattgatcataattttttcagcaaataagttccataatttggtgtttgcaatatcgaaattgttactcatagggtccagttgatttaatgacattagtgttgttaagttcacatgcttcaaagaattctacatgtctacaatgctgcatttgtctgtaaaatttgggttcttgtaaaaaatacatgtgttgaatatttaccaaaaaaatataatgcgatatgactttgtgtgagcatgtttggacacagttacaagtttacttctaaacttatattatgttttgcttcgtgcaagtacaagtgatttgaatatccaaggccaaagcatgtgtccatcactatatcaaatcaacataccatatatgtatatactcaacaaaaagcacaaataatcacatctatgttataaacacacccccacacaaccaaacattaacattcaataggttgtgctaggacatcattgggatgatgaagtaatattgtattatctatgtattgaccaagcatgagtttaaaattacgatttgatgttttcagttatttatatgatgaacatagttcagaaatatatcgagataaatctcaatcaatatattgattatttctaggaaacacatgccggtatgagggcaccattgtcgagtacatcttaagtgagttaacggatcctctagagtcgacctgcaggcatgcccgcggatatcgatgggccccggccgaagcttcaagtttgtacaaaaaagcaggctccggccagaatggcccggaccgggttaccgaattcgagctcggtaccctggttcacaaactcaatacaacacacagtggagtagggtattacgctccggcggcccgaaccactctaaatccttgtgtcctcgtgtgctcttccaccattaatgactgtaattgcagggacacgaagagttgtagcgcttttgccaacaagatccgctatatgctagtagagtggaacctgcacagcaacaagcatccaataatctgagaataagaattatgtgtggtgatggttctcatctctgcaactcgccattttcgcgagagaaccaaatccaagttggtgaagatcatgatttgggctcatgggctggcatagtagctattacctttgcaattgtggttcgaatctatccgatattctccttttcagggagagctaatgcttatgcttattgggtattttggtttgacactgcttcacgcccaaaaaaaggcaactatgtctgagttggatatggcccaaaaaaaggcagctatgtctgagttggatatggaagtcttctttcgtttagggtgaagtaagaccaagctcatgagcttattatcttaggtcggaacaaattagttgataggcatggcacatttatcaaattataatgattttaacagaaaagcaacacctctttttcagcagcaccagctttgcaagctgcaattgacactccaagcatagtatttgctccaaactcagcctgcatttcgcacaatatcatatctatttccatttggataaaatatattttccagaaatatgggaacagaatcaagatacagaaaaaagttgtggtagtagtggtaagtggaaacacaagtacagtgaaaagatagcattatttctgaacagtcaaattaaccgaaataagtagtatcacatactgcccctaaattgactacacccaatgtaaagaattgcttgagcatattgagccatcagttgtttgtttgtgtaacggatttgacaatgcagagttcaggagcaaaaaaccgcaaaggagagaaagagggaaaggatctcctagtatcccaccttgtggcgcgccctgtcaagtgcatgatggcctggtcgatctgcgtctgctgctgcggttccatcccaacgagtgcctccgacaccttgtcgttgatcacccgcaccgcgtaggcgacccccctggcgaggaacttccgcctctcggaggccccggccgcgtcggcggcggcgccctcgagcgcgcccacgctagccgtagatgctcggtgcacggccttgttggtgtgcaactcgacctcaacggccggtgcgctacgcccgtcaaggatctggcgcgcccgcaccctcgtgatcacggtgggcgcctcccgcctcatgtggccgacgatgaaaagcgccgggttaggggccttggcgcgcaccgccgtattcagggcctcctcgctcttgcgcgagagcaggtgcttccccaggtactcctgcactgacaaggctgccacagcggtggaatttgtcctcacgacttcgccacgtcgtcctcacctccctggcttcccacgactccgccgtatcgaggtgctcggtgggtcgtcttaatccgaagtccgaactaggaagacgagacagagaggtctgaggaatgggcctcgtttgatgttgagctgaattatttttccagcataagcccaggtcttggtccatgaacaaaattactagaaacccagcccagtactacgatctaaaagagggactgccactggatagctctctctagcattctccacgctccaatacagcggcgtcgtgtctatccgggtctatccgcgaacacgtgagaactctccagaaactgctttctcctccacttcatctctctcgctttccctctataaaaagaccccttctaggaattgagggagacagcaagcaccaagcagcgatccgaagctcaatcaattcactcaaacctcttccccaaatcttcgattagatcttcgttgacaagaagactagaaccgaacctgacatgtccaacctgctcacggttcaccagaaccttccggctcttccagtggacgcgacgtccgatgaagtcaggaagaacctcatggacatgttccgcgacaggcaagcgttcagcgagcacacctggaagatgctgctctccgtctgccgctcctgggctgcatggtgcaagctgaacaacaggaagtggttccccgctgagcccgaggacgtgagggattaccttctgtacctgcaagcgcgaggtttgtttctgcttctacctttgatatatatataataattatcattaattagtagtaatataatatttcaaatatttttttcaaaataaaagaatgtagtatatagcaattgcttttctgtagtttataagtgtgtatattttaatttataacttttctaatatatgaccaaaacatggtgatgcctaggtctggcagtgaagaccatccagcaacaccttggacaactgaacatgcttcacaggcgctccggcctcccgcgccccagcgactcgaacgccgtgagcctcgtcatgcgccgcatcaggaaggaaaacgtcgatgccggcgaaagggcaaagcaggccctcgcgttcgagaggaccgatttcgaccaggtccgcagcctgatggagaacagcgacaggtgccaggacattaggaacctggcgttcctcggaattgcatacaacacgctcctcaggatcgcggaaattgcccgcattcgcgtgaaggacattagccgcaccgacggcggcaggatgcttatccacattggcaggaccaagacgctcgtttccaccgcaggcgtcgaaaaggccctcagcctcggagtgaccaagctcgtcgaacgctggatctccgtgtccggcgtcgcggacgacccaaacaactacctcttctgccgcgtccgcaagaacggggtggctgcccctagcgccaccagccaactcagcacgagggccttggaaggtattttcgaggccacccaccgcctgatctacggcgcgaaggatgacagcggtcaacgctacctcgcatggtccgggcactccgcccgcgttggagctgctagggacatggcccgcgccggtgtttccatccccgaaatcatgcaggcgggtggatggacgaacgtgaacattgtcatgaactacattcgcaaccttgacagcgagacgggcgcaatggttcgcctcctggaagatggtgactgaggtaccggctccacgtagtcgttatcgacgatcggcgacactactggagttggagcaacgtctagttccagcaataatataatgcaatattactgtagtagtagtagtatactataggacccctcctagctagcatgcggacatgctcttgtgatcttgtctcgggtccagacttcaataaagccatcttggcattatatgtactatacaaaaaagattatcactgctttctctcgatcgcaaatcatcctgtttttttttttggcaaaaagttcagcgtttctttctctctctctgactaccaaactgttgacagaaagaaaaaggtcaaaggagtttgcgaacgtacagtacagacataaaaaaacaaacacaagcagaaatatcaaatactgtgtttggttgttgtggcacgttgggcgtggtggaactgcggcacagttcttcgtgtagttttgcacaacttctgcctaaagttcgcactgatttcttgcactagatattcggggacaccacagctacctgcgcgcgtataaggtaaacaggccctaataacaaccgtctcaatattgtgtgatgtgtttgaggtcagatttgatcaatcaagaacatcttaacctataagatataggtaaataacaagccatctctttaacagtgaacatgtgtctctcaaacatattaaataatattggtgcggttagtgtgaagaaagtactgttagctgatttgttgtgaaagaaaaatattactgaatgactaacatctcttccaaactaaatgtttgcgtgtgaaataatggatattgtcggttccaaactaaatgtttgcgtgtgaaataatggatattgtcggatagagcacaaggtgctcaccttctgcacccaatataatttcactcaagaacgagcaggatatcgatcgacgatctcaaatgagcaacacgagctcagcataatatcgtgagccgtgatccgtcgccccgctaacttaagtataacttcgtatagcatacattatacgaagttattcggtccgggatctcccgggcacccagctttcttgtacaaagtggccgttaacggatcggccagaatggcccggaccgggttaccctgcccttaaggccaattgttcaagattcattcaacaattgaaacatctcccatgattaaatcagtataaggttgctatggtcttgcttgacaaagtttttttttgagggaatttcaactaaatttttgagtgaaactatcaaatactgattttaaaaaatttttataaaaggaagcgcagagataaaaggccatctatgctacaaaagtacccaaaaatgtaatcctaaagtatgaattgcattttttttttgtttggacgaaaggaaaggagtattaccacaagaatgatatcatcttcatatttagatcttttttgggtaaagcttgagattctctaaatatagagaaatcagaagaaaaaaaaaccgtgttttggtggttttgatttctagcctccacaataactttgacggcgtcgacaagtctaacggacaccaagcagcgaaccaccagcgccgagccaagcgaagcagacggccgagacgttgacaccttcggcgcggcatctctcgagagttccgctccggcgctccacctccaccgctggcggtttcttattccgttccgttccgcctcctgctctgctcctctccacaccacacggcacgaaaccgttacggcaccggcagcacccagcacgggagaggggattcctttcccaccgttccttccctttccgccccgccgctataaatagccagccccatccccagcttttttccccaatctcatctcctctctcctgttgttcggagcacacgcacaatccgatcgatccccaaatccccttcgtctctcctcgcgagcctcgtggatcccagcttcaaggtacggcgatcgatcatcccccctccttctctctaccttcttttctctagactacatcggatggcgatccatggttagggcctgctagtttcccttcctgttttgtcgatggctgcgaggcacaatagatctgatggcgttatgacggctaacttgtcatgttgttgcgatttatagtccctttaggagatcagtttaatttctcggatggttcgagatcggtggtccatggttagtaccctaagatccgcgctgttagggttcgtagatggaggcgacctgttctgattgttaacttgtcagtacctgggaaatcctgggatggttctagctcgtccgcagatgagatcgatttcatgatcctctgtatcttgtttcgttgcctaggttccgtctaatctatccgtggtatgatgtagatgttttgatcgtgctaactacgtcttgtaaagttaattgtcaggtcataatttttagcatgcctttttttttgtttggttttgtctaattgggctgtcgttctagatcagagtagaagactgttccaaactacctgctggatttattgaacttggatctgtatgtgtgtcacatatcttcataaattcatgattaagatggattgaaatatcttttatctttttggtatggatagttctatatgttggtgtggctttgttagatgtatacatgcttagatacatgaagcaacgtgctgctactgtttagtaattgctgttcatttgtctaataaacagataaggatatgtatttatgttgctgttggttttgctggtactttgttggatacaaatgcttcaatacagaaaacagcatgctgctacgatttaccatttatctaatcttatcatatgtctaatctaataaacaaacatgcttttaaattatcttcatatgcttggatgatggcatacacagcggctatgtgtggttttttaaatacccagcatcatgggcatgcatgacactgctttaatatgctttttatttgcttgagactgtttcttttgtttatactgaccctttagttcggtgactcttctgcaggtcgactttaacttagcctaggatccatggcccagtccaagcacggcctgaccaaggagatgaccatgaagtaccgcatggagggctgcgtggacggccacaagttcgtgatcaccggcgagggcatcggctaccccttcaagggcaagcaggccatcaacctgtgcgtggtggagggcggccccttgcccttcgccgaggacatcttgtccgccgccttcatgtacggcaaccgcgtgttcaccgagtacccccaggacatcgtcgactacttcaagaactcctgccccgccggctacacctgggaccgctccttcctgttcgaggacggcgccgtgtgcatctgcaacgccgacatcaccgtgagcgtggaggagaactgcatgtaccacgagtccaagttctacggcgtgaacttccccgccgacggccccgtgatgaagaagatgaccgacaactgggagccctcctgcgagaagatcatccccgtgcccaagcagggcatcttgaagggcgacgtgagcatgtacctgctgctgaaggacggtggccgcttgcgctgccagttcgacaccgtgtacaaggccaagtccgtgccccgcaagatgcccgactggcacttcatccagcacaagctgacccgcgaggaccgcagcgacgccaagaaccagaagtggcacctgaccgagcacgccatcgcctccggctccgccttgccctccggactcagatctcgatagggtaccaatggccagttaacagatccagctgctgctgttctagggttcacaagtctgcctatttgtcttccccaatggagctatggttgtctggtctggtccttggtcgtgtcccgtttcattgtgtactatttacctgtaatgtgtatccttaagtctggtttgatggtgtctgaaacgttttgctgtggtagagcagcatggaagaactataatgaataagtgatccctaatcattgtgtccaaattttgcttctgctatacccttttgtgctgtttcttatgttttgcttaaaaatttgatctgacaaacaaatttgtctaaattatgctcttgttctgactgtgtactgtacacatttgtattgctaccggtttggcacatagttttctctttgattgcagatcaaacccttctgattgcagattgcttggctatggctgatgtgctcactgttcttctttagcttgtatattgctgatggtggcttggctacggctgaaaaagttgctgctgcgccgacttggcaactgttgctccagtaatgctttgtcctctcttcctagccgccgacttggcacttggcagctgttgctcctgtaatgcgttgttatctcttatctcttgagatgtactatgattttgaggctgtttgacttgtgccagattgccagtgctgatgctatattatctcaggtttttatgctagtatatgttttactgtgtgctgcctgtgtcgagttacgtaatctattgaaccgctatgcgtgttgatgccctgttgttgcttgccagattgatgcccctgttgcttgcagcttgcaagctgtagtgaaatcctaaaattcgaaaccaaatctattctgaacttttgaagatctgtgatgtccggaagaaaagattcaaacagataaacgggactctccagaatctataaaataaatgatcgacaaacgctttgctttggtaggcttcctagttagttagcggaccgggatccgacggcgtcttcaccgccccgccgccgcccgagccggacttgtcgctgccgccgccgctgctcatcttgcgcgcttgtgtccctccctcagtccctgcgttcgcggatcgcgggcgggtgcgacccgtttggactccggccggtagccttcgtgccgacctcgctcggtccaccggtttgtcggggacccacatgtcagtgaaggtacgcgtccacgtccacagaccctactaccccagacgagtccaaatcgctgttccctcacactctcgtgtaccagcgcgcggcggaaagcacctttccaacaaccgccgacacgtcggtcccacgtcggcatgctccaccggtcagtgtttggcgtgtacggctcccggcgacgaacgagtgtggcctaagctttcctactcccatcccatctgagccacacatctctctcacgccacgcgcacaaaacagccaggctcccacgcgcatcaaccggctctccctttccgtgccactcgcccccaagccccaaaccctcgccgccgcctccgagacagccgccgccacctaggccatggccaccgccgccgccgcgtctaccgcgctcactggcgccactaccgctgcgcccaaggcgaggcgccgggcgcacctcctggccacccgccgcgccctcgccgcgcccatcaggtgctcagcggcgtcacccgccatgccgatggctcccccggccaccccgctccggccgtggggccccaccgagccccgcaagggtgctgacatcctcgtcgagtccctcgagcgctgcggcgtccgcgacgtcttcgcctaccccggcggcgcgtcgatggagatccaccaggcactcacccgctcccccgtcatcgccaaccacctcttccgccacgagcaaggggaggcctttgccgcctccggctacgcgcgctcctcgggccgcgtcggcgtctgcatcgccacctccggccccggcgccaccaacctagtctccgcgctcgccgacgcgctgctcgattccgtcccgatggtcgccatcacgggacaggtggcgcgacgcatgattggcaccgacgccttccaggagacgcccatcgtcgaggtcacgcgctccatcaccaagcacaactacctggtcctcgacgtcgacgacatcccccgcgtcgtgcaggaggctttcttcctcgcctcctctggtcgaccagggccggtgcttgtcgacatccccaaggacatccagcagcagatggcggtgcctgtctgggacaagcccatgagtctgcctgggtacattgcgcgccttcccaagccccctgcgactgagttgcttgagcaggtgctgcgtcttgttggtgaatcgcggcgccctgttctttatgtgggcggtggctgcgcagcatctggtgaggagttgcgacgctttgtggagctgactggaatcccggtcacaactactcttatgggcctcggcaacttccccagcgacgacccactgtctctgcgcatgctaggtatgcatgggacggtgtatgcaaattatgcagtggataaggccgatctgttgcttgcacttggtgtgcggtttgatgatcgcgtgacagggaagattgaggcttttgcaagcagggctaagattgtgcacgttgatattgatccggctgagattggcaagaacaagcagccacatgtgtccatctgtgcagatgttaagcttgctttgcagggcatgaatgctcttcttgaaggaagcacatcaaagaagagctttgactttggctcatggaacgatgagttggatcagcagaagagggaattcccccttgggtataaaacatctaatgaggagatccagccacaatatgctattcaggttcttgatgagctgacgaaaggcgaggccatcatcggcacaggtgttgggcagcaccagatgtgggcggcacagtactacacttacaagcggccaaggcagtggttgtcttcagctggtcttggggctatgggatttggtttgccggctgctgctggtgcttctgtggcaaacccaggtgtcactgttgttgacatcgatggagatggtagctttctcatgaacgttcaggagctagctatgatccgaattgagaacctcccagtgaaggtctttgtgctaaacaaccagcacctggggatggtggtgcagttggaggacaggttctataaggccaacagagcgcacacatacttgggaaacccagagaatgaaagtgagatatatccagatttcgtgacgatcgccaaagggttcaacattccagccgtccgtgtgacaaagaagaacgaagtccgcgcagcgataaagaagatgctcgagactccagggccgtacctcttggatataatcgtcccacaccaggagcatgtgttgcctatgatccctagtggtggggctttcaaggatatgatcctggatggtgatggcaggactgtgtactgacttcgaataggtacccggggatcctctagtgccgtgggtcgtttaagctgccgctgtacctgtgtcgtctggtgccttctggtgtacctgggaggttgtcgtctatcaagtatctgtggttggtgtcatgagtcagtgagtcccaatactgttcgtgtcctgtgtgcattatacccaaaactgttatgggcaaatcatgaataagcttgatgttcgaacttaaaagtctctgctcaatatggtattatggttgtttttgttcgtctcctaatatttgcctgggatcaaattttattggctggtgttcatttgacctccatgttcttgctaggctccattttttactctacagccataatatgtttgattgtttggtttgttctttgttgtacacctggttctgtcgagcttagttttcgacactggcttacagcttaacatgttgctattttattgggttctgattgctattttattgggttctgattgctagtttttgctgaatccaaaaaccatgttatttatttaagcgatccaggttattattatgatggtggctaagtttttttttttccaagggtaaattttctggattctccagtgtttctgtggccgaattcaatcactagagtcgacctgcaaagcttcggtccgggcctagaaggcccgcgccacttacgcttgattccgatgacttcgtaggttcctagctcaagccgctcgtgtccaagcgtcacttacgattagctaatgattacggcatctaggaccgactagttcttatgtgcttctagtctccaaatgtggttgatagttattttgctctaagatcaacagtaatgaagtataaatcatcgttgtggtgtgctactcggttaattgagcattaacacacacaaacatgacgaggatggtataatctccaaaaatgtgtactttgttaggtgggaccctatagccttgattaatgtgctatgttaggcatgcctggaaacgtgtgacgcatatgttttgtgaacctgttgatattatatgtgcttttatattaccatattttattaaaatactaatatttattactagtaagatataacattctatctagcttaaaaactaaccataaatattccataataactagatttaccaaactaatatactaaatatacataataaatacaaaattaacaagacaataatcaatatttatgagcttaatatatttagacattatggttggtcgacgataatcatgctaacttttcgtaattgcttgattgaaatatgcttagaataatgcctctttgttctacatggcaaatagggaccattatggtgtaacaccctgggaaccacaaacaccccgaaatgctactaaactacacaactaaccttcatatataaaatttcgacagcatctcctttgaaaatttgcatagacgtggaagcaacagagtataaacagatctgcgtttaaacgtgcaagcgctactagacaattcagtacattaaaaacgtccgcaatgtgttattaagttgtctaagcgtcaatttgtttacaccacaatatatcctgcca

SEQ ID NO: 48 - DNA, 23121 bp, Artificial sequence
  PHP95393
gtttacccgccaatatatcctgtcaaacactgatagtttaaactgaaggcgggaaacgacaatctgatcatgagcggagaattaagggagtcacgttatgacccccgccgatgacgcgggacaagccgttttacgtttggaactgacagaaccgcaacgttgaaggagccactcagcaagctggtacgattgtaatacgactcactatagggcgaattgagcgctgtttaaacgctcttcaactggaagagcggttacgctgtttaaacgctcttcaactggaagagcggttactaccggttcactagctagctgctaatcgagctagttaccctatgaggtgacatgaagcgctcacggttactatgacggttagcttcacgactgttggtggcagtagcgtacgacttagctatagttccggacttacccttaagcgatttaaatctgcggttaccgaattcgagctcggtacctagtacccttgtacttttggtttcacctgcatagagaaaacccacaagaatatgacagtctgatttgtcagtctcattctcaagcaacatttctctatccgttactttcatggtgaataacacaatccatcatcaatactttgtgttactcagaaactgaaagttattccgagtcttgcatatctttggacctactcgtttttctaccattattgctgattgttaagctctcgctacttgaatcggcattgttggagtgggaaggttcaaaaaattggagttatgactagttgtctctttctatgtacgatggagaaaatgaataaacaactgagaaaatggctcttgtttagttgatgatgctcttaagctttccactggttgccatatatgatttgggcatttcactttgatcttaatgggccttgtaaagcccaagactcatgattatctttagttgatgctcttaattaggtgtgggcaaataattcaaactgtatgtacccgaccaaaaccaaagcaaaaataatcgaaccaaaccgaaaatttaaaaataaccgaatgaaaactaaatcctataactgaaagaactgaaaccgaatcaaaatatttaatgtaaccaaaaatatccgaaatataattatattgtcaaaaatattaataatttctagattaaataattaaaaatacttaaaaatttatataaaatagtaaaaatactcgaaaataaccacaaatattcaaaaacaaccgaaatatcccaaaatattcaaagcaaaataaccgaatggataccaaattttaaaaccgaaaaaactggaacaaaaccaaaatcgaaccaaaatttcaaaaatcgaataaatactaaactttagaacaaaaaaaaacgataaccgaatgtatacgaaccaaagccgaattagataaccgaacgtccaggactactcttaatctttccgccacttatgatttgggctattactttgtttataatgagccttttcaagctcaagttcatgattgtccgtgagatgagaaactgacttgttggattcgaaaccctagctagtattggttaatacttaatacataaatgacctgcattgacatcatcatccaagaaaataaaaattgtatgcttgagatatttagttttcctagctaggttttctttattttagtaccgaatctttaggtgtgccacgttaatttagacccattttttcatacttaccaactgagtctagtttaatcatgactataatcgtataaaatgattcagtcgacgtcattgcgaacgtatataaaatcatccaaattgacgtcattccaaagaggtaagcatgcttatctaagagtccgagcatactaaacaagacgacattttatttgcactccaaatcaaattttgtattgcctaaagaaaaacaatcaaactcaagtttcttaaaattaatttcattcaaactaatcactttcaatatctcacatattattcatgccatttctatttgtctaaacatgatttaaaaaaaaaagtaaaatacaaagattactatgcaaaaactctataaaaaaaaattcaaatttcttatttatttgtgacatcaaattttcaaaataatttttttaattatcggttgatccggtcagtcgataaaaacataaactttcagcgaccgttaaaactttcctactaccgatttagagaaaatcttagcttgaaacgtaattgtaacctgccttcatgcaagtcgcaagatatgtcatcctaagttgtatatgttttctcaaaagatgtatttacttgagaaaatacgtttcaacgttgatggacaaccaattaagaatcaagcacctttcgtaatcaatttaggcttatcgtctaaggtatactgatttacgacagttgactagacttataaggaacaaaataatagaatagtttctaaacacttcacctaatcatagagactaagatggtaattcgtaaacgacaaagcctagtgacactgtccattgtaaaattccacatcatattagtattaaacatatacatgtagtttcctgaacacatgtagtatcaaacacacttcgtggcttcttcctcgaaacctgcggccgcgctatagttccggacttacccttaagataacttcgtatagcatacattatacgaagttatgggcccacgcgtgaagagcggttaccagagctggtcacctttgtccaccaagatggaactgtcttcggccagaatggccatctggattcagcaggcctagaaggccatttatcgctatcaactttgtatagaaaagttgggccgaattcgagctcggtacggccagaatggcccggaccgaagcttccagaaggtaattatccaagatgtagcatcaagaatccaatgtttacgggaaaaactatggaagtattatgtgagctcagcaagaagcagatcaatatgcggcacatatgcaacctatgttcaaaaatgaagaatgtacagatacaagatcctatactgccagaatacgaagaagaatacgtagaaattgaaaaagaagaaccaggcgaagaaaagaatcttgaagacgtaagcactgacgacaacaatgaaaagaagaagataaggtcggtgattgtgaaagagacatagaggacacatgtaaggtggaaaatgtaagggcggaaagtaaccttatcacaaaggaatcttatcccccactacttatccttttatatttttccgtgtcatttttgcccttgagttttcctatataaggaaccaagttcggcatttgtgaaaacaagaaaaaatttggtgtaagctattttctttgaagtactgaggatacaacttcagagaaatttgtaagtttgtacccgggggatctcgactctagaggatcgctcaggaaggccgctgagatagaggcatggcggccaatgcgggcggcggtggagcgggaggaggcagcggcagcggcagcgtggctgcgccggcggtgtgccgccccagcggctcgcggtggacgccgacgccggagcagatcaggatgctgaaggagctctactacggctgcggcatccggtcgcccagctcggagcagatccagcgcatcaccgccatgctgcggcagcacggcaagatcgagggcaagaacgtcttctactggttccagaaccacaaggcccgcgagcgccagaagcgccgcctcaccagcctcgacgtcaacgtgcccgccgccggcgcggccgacgccaccaccagccaactcggcgtcctctcgctgtcgtcgccgccgccttcaggcgcggcgcctccctcgcccaccctcggcttctacgccgccggcaatggcggcggatcggctgtgctgctggacacgagttccgactggggcagcagcggcgctgccatggccaccgagacatgcttcctgcaggactacatgggcgtgacggacacgggcagctcgtcgcagtggccacgcttctcgtcgtcggacacgataatggcggcggccgcggcgcgggcggcgacgacgcgggcgcccgagacgctccctctcttcccgacctgcggcgacgacggcggcagcggtagcagcagctacttgccgttctggggtgccgcgtccacaactgccggcgccacttcttccgttgcgatccagcagcaacaccagctgcaggagcagtacagcttttacagcaacagcaacagcacccagctggccggcaccggcaaccaagacgtatcggcaacagcagcagcagccgccgccctggagctgagcctcagctcatggtgctccccttaccctgctgcagggagtatgtgagagcaacgcgagctgccactgctcttcactgatgtctctggaatggaaggaggaggaagtgagcatagcgttggtgcgttgctgtcaagggcgaattcacatggttaacctagacttgtccatcttctggattggccaacttaattaatgtatgaaataaaaggatgcacacatagtgacatgctaatcactataatgtgggcatcaaagttgtgtgttatgtgtaattactagttatctgaataaaagagaaagagatcatccatatttcttatcctaaatgaatgtcacgtgtctttataattctttgatgaaccagatgcatttcattaaccaaatccatatacatataaatattaatcatatataattaatatcaattgggttagcaaaacaaatctagtctaggtgtgttttgcgaatgcggccgccaccgcggtggagctcgaattccggtccgggcctagaaggccagcttcaagtttgtacaaaaaagcaggctccggccagaatggcccggaccgggttaccgaattcgagctcggtaccatttaaattgcgcccgccacggccgtggaggtcgtattccggtcagcttgcatccctgcagtgcagcgtgacccggtcgtgcccctctctagagataatgagcattgcatgtctaagttataaaaaattaccacatattttttttgtcacacttgtttgaagtgcagtttatctatctttatacatatatttaaactttactctacgaataatataatctatagtactacaataatatcagtgttttagagaatcatataaatgaacagttagacatggtctaaaggacaattgagtattttgacaacaggactctacagttttatctttttagtgtgcatgtgttctcctttttttttgcaaatagcttcacctatataatacttcatccattttattagtacatccatttagggtttagggttaatggtttttatagactaatttttttagtacatctattttattctattttagcctctaaattaagaaaactaaaactctattttagtttttttatttaataatttagatataaaatagaataaaataaagtgactaaaaattaaacaaataccctttaagaaattaaaaaaactaaggaaacatttttcttgtttcgagtagataatgccagcctgttaaacgccgtcgacgagtctaacggacaccaaccagcgaaccagcagcgtcgcgtcgggccaagcgaagcagacggcacggcatctctgtcgctgcctctggacccctctcgagagttccgctccaccgttggacttgctccgctgtcggcatccagaaattgcgtggcggagcggcagacgtgagccggcacggcaggcggcctcctcctcctctcacggcaccggcagctacgggggattcctttcccaccgctccttcgctttcccttcctcgcccgccgtaataaatagacaccccctccacaccctctttccccaacctcgtgttgttcggagcgcacacacacacaaccagatctcccccaaatccacccgtcggcacctccgcttcaaggtacgccgctcgtcctcccccccccccctctctaccttctctagatcggcgttccggtccatgcatggttagggcccggtagttctacttctgttcatgtttgtgttagatccgtgtttgtgttagatccgtgctgctagcgttcgtacacggatgcgacctgtacgtcagacacgttctgattgctaacttgccagtgtttctctttggggaatcctgggatggctctagccgttccgcagacgggatcgatttcatgattttttttgtttcgttgcatagggtttggtttgcccttttcctttatttcaatatatgccgtgcacttgtttgtcgggtcatcttttcatgcttttttttgtcttggttgtgatgatgtggtctggttgggcggtcgttctagatcggagtagaattctgtttcaaactacctggtggatttattaattttggatctgtatgtgtgtgccatacatattcatagttacgaattgaagatgatggatggaaatatcgatctaggataggtatacatgttgatgcgggttttactgatgcatatacagagatgctttttgttcgcttggttgtgatgatgtggtgtggttgggcggtcgttcattcgttctagatcggagtagaatactgtttcaaactacctggtgtatttattaattttggaactgtatgtgtgtgtcatacatcttcatagttacgagtttaagatggatggaaatatcgatctaggataggtatacatgttgatgtgggttttactgatgcatatacatgatggcatatgcagcatctattcatatgctctaaccttgagtacctatctattataataaacaagtatgttttataattattttgatcttgatatacttggatgatggcatatgcagcagctatatgtggatttttttagccctgccttcatacgctatttatttgcttggtactgtttcttttgtcgatgctcaccctgttgtttggtgttacttctgcaggtcgactctagaggatccatggccactgtgaacaactggctcgctttctccctctccccgcaggagctgccgccctcccagacgacggactccacactcatctcggccgccaccgccgaccatgtctccggcgatgtctgcttcaacatcccccaagattggagcatgaggggatcagagctttcggcgctcgtcgcggagccgaagctggaggacttcctcggcggcatctccttctccgagcagcatcacaaggccaactgcaacatgatacccagcactagcagcacagtttgctacgcgagctcaggtgctagcaccggctaccatcaccagctgtaccaccagcccaccagctcagcgctccacttcgcggactccgtaatggtggcttcctcggccggtgtccacgacggcggtgccatgctcagcgcggccgccgctaacggtgtcgctggcgctgccagtgccaacggcggcggcatcgggctgtccatgattaagaactggctgcggagccaaccggcgcccatgcagccgagggtggcggcggctgagggcgcgcaggggctctctttgtccatgaacatggcggggacgacccaaggcgctgctggcatgccacttctcgctggagagcgcgcacgggcgcccgagagtgtatcgacgtcagcacagggtggagccgtcgtcgtcacggcgccgaaggaggatagcggtggcagcggtgttgccggcgctctagtagccgtgagcacggacacgggtggcagcggcggcgcgtcggctgacaacacggcaaggaagacggtggacacgttcgggcagcgcacgtcgatttaccgtggcgtgacaaggcatagatggactgggagatatgaggcacatctttgggataacagttgcagaagggaagggcaaactcgtaagggtcgtcaagtctatttaggtggctatgataaagaggagaaagctgctagggcttatgatcttgctgctctgaagtactggggtgccacaacaacaacaaattttccagtgagtaactacgaaaaggagctcgaggacatgaagcacatgacaaggcaggagtttgtagcgtctctgagaaggaagagcagtggtttctccagaggtgcatccatttacaggggagtgactaggcatcaccaacatggaagatggcaagcacggattggacgagttgcagggaacaaggatctttacttgggcaccttcagcacccaggaggaggcagcggaggcgtacgacatcgcggcgatcaagttccgcggcctcaacgccgtcaccaacttcgacatgagccgctacgacgtgaagagcatcctggacagcagcgccctccccatcggcagcgccgccaagcgcctcaaggaggccgaggccgcagcgtccgcgcagcaccaccacgccggcgtggtgagctacgacgtcggccgcatcgcctcgcagctcggcgacggcggagccctggcggcggcgtacggcgcgcactaccacggcgccgcctggccgaccatcgcgttccagccgggcgccgccagcacaggcctgtaccacccgtacgcgcagcagccaatgcgcggcggcgggtggtgcaagcaggagcaggaccacgcggtgatcgcggccgcgcacagcctgcaggacctccaccacctgaacctgggcgcggccggcgcgcacgactttttctcggcagggcagcaggccgccgccgctgcgatgcacggcctgggtagcatcgacagtgcgtcgctcgagcacagcaccggctccaactccgtcgtctacaacggcggggtcggcgacagcaacggcgccagcgccgtcggcggcagtggcggtggctacatgatgccgatgagcgctgccggagcaaccactacatcggcaatggtgagccacgagcaggtgcatgcacgggcctacgacgaagccaagcaggctgctcagatggggtacgagagctacctggtgaacgcggagaacaatggtggcggaaggatgtctgcatgggggactgtcgtgtctgcagccgcggcggcagcagcaagcagcaacgacaacatggccgccgacgtcgggcatggcggcgcgcagctcttcagtgtctggaacgacacttaagcgtacgtgccggcctggctctccgaaagggcgtattccagcacactggcggccgttactagacccaacctagacttgtccatcttctggattggccaacttaattaatgtatgaaataaaaggatgcacacatagtgacatgctaatcactataatgtgggcatcaaagttgtgtgttatgtgtaattactagttatctgaataaaagagaaagagatcatccatatttcttatcctaaatgaatgtcacgtgtctttataattctttgatgaaccagatgcatttcattaaccaaatccatatacatataaatattaatcatatataattaatatcaattgggttagcaaaacaaatctagtctaggtgtgttttgcgaatgcggcctccgggcacccagctttcttgtacaaagtggccgttaacggatcggccagaatggcccggaccgggttaccgaattcgagctcggtaccctggttcacaaactcaatacaacacacagtggagtagggtattacgctccggcggcccgaaccactctaaatccttgtgtcctcgtgtgctcttccaccattaatgactgtaattgcagggacacgaagagttgtagcgcttttgccaacaagatccgctatatgctagtagagtggaacctgcacagcaacaagcatccaataatctgagaataagaattatgtgtggtgatggttctcatctctgcaactcgccattttcgcgagagaaccaaatccaagttggtgaagatcatgatttgggctcatgggctggcatagtagctattacctttgcaattgtggttcgaatctatccgatattctccttttcagggagagctaatgcttatgcttattgggtattttggtttgacactgcttcacgcccaaaaaaaggcaactatgtctgagttggatatggcccaaaaaaaggcagctatgtctgagttggatatggaagtcttctttcgtttagggtgaagtaagaccaagctcatgagcttattatcttaggtcggaacaaattagttgataggcatggcacatttatcaaattataatgattttaacagaaaagcaacacctctttttcagcagcaccagctttgcaagctgcaattgacactccaagcatagtatttgctccaaactcagcctgcatttcgcacaatatcatatctatttccatttggataaaatatattttccagaaatatgggaacagaatcaagatacagaaaaaagttgtggtagtagtggtaagtggaaacacaagtacagtgaaaagatagcattatttctgaacagtcaaattaaccgaaataagtagtatcacatactgcccctaaattgactacacccaatgtaaagaattgcttgagcatattgagccatcagttgtttgtttgtgtaacggatttgacaatgcagagttcaggagcaaaaaaccgcaaaggagagaaagagggaaaggatctcctagtatcccaccttgtggcgcgccctgtcaagtgcatgatggcctggtcgatctgcgtctgctgctgcggttccatcccaacgagtgcctccgacaccttgtcgttgatcacccgcaccgcgtaggcgacccccctggcgaggaacttccgcctctcggaggccccggccgcgtcggcggcggcgccctcgagcgcgcccacgctagccgtagatgctcggtgcacggccttgttggtgtgcaactcgacctcaacggccggtgcgctacgcccgtcaaggatctggcgcgcccgcaccctcgtgatcacggtgggcgcctcccgcctcatgtggccgacgatgaaaagcgccgggttaggggccttggcgcgcaccgccgtattcagggcctcctcgctcttgcgcgagagcaggtgcttccccaggtactcctgcactgacaaggctgccacagcggtggaatttgtcctcacgacttcgccacgtcgtcctcacctccctggcttcccacgactccgccgtatcgaggtgctcggtgggtcgtcttaatccgaagtccgaactaggaagacgagacagagaggtctgaggaatgggcctcgtttgatgttgagctgaattatttttccagcataagcccaggtcttggtccatgaacaaaattactagaaacccagcccagtactacgatctaaaagagggactgccactggatagctctctctagcattctccacgctccaatacagcggcgtcgtgtctatccgggtctatccgcgaacacgtgagaactctccagaaactgctttctcctccacttcatctctctcgctttccctctataaaaagaccccttctaggaattgagggagacagcaagcaccaagcagcgatccgaagctcaatcaattcactcaaacctcttccccaaatcttcgattagatcttcgttgacaagaagactagaaccgaacctgacatgtccaacctgctcacggttcaccagaaccttccggctcttccagtggacgcgacgtccgatgaagtcaggaagaacctcatggacatgttccgcgacaggcaagcgttcagcgagcacacctggaagatgctgctctccgtctgccgctcctgggctgcatggtgcaagctgaacaacaggaagtggttccccgctgagcccgaggacgtgagggattaccttctgtacctgcaagcgcgaggtttgtttctgcttctacctttgatatatatataataattatcattaattagtagtaatataatatttcaaatatttttttcaaaataaaagaatgtagtatatagcaattgcttttctgtagtttataagtgtgtatattttaatttataacttttctaatatatgaccaaaacatggtgatgcctaggtctggcagtgaagaccatccagcaacaccttggacaactgaacatgcttcacaggcgctccggcctcccgcgccccagcgactcgaacgccgtgagcctcgtcatgcgccgcatcaggaaggaaaacgtcgatgccggcgaaagggcaaagcaggccctcgcgttcgagaggaccgatttcgaccaggtccgcagcctgatggagaacagcgacaggtgccaggacattaggaacctggcgttcctcggaattgcatacaacacgctcctcaggatcgcggaaattgcccgcattcgcgtgaaggacattagccgcaccgacggcggcaggatgcttatccacattggcaggaccaagacgctcgtttccaccgcaggcgtcgaaaaggccctcagcctcggagtgaccaagctcgtcgaacgctggatctccgtgtccggcgtcgcggacgacccaaacaactacctcttctgccgcgtccgcaagaacggggtggctgcccctagcgccaccagccaactcagcacgagggccttggaaggtattttcgaggccacccaccgcctgatctacggcgcgaaggatgacagcggtcaacgctacctcgcatggtccgggcactccgcccgcgttggagctgctagggacatggcccgcgccggtgtttccatccccgaaatcatgcaggcgggtggatggacgaacgtgaacattgtcatgaactacattcgcaaccttgacagcgagacgggcgcaatggttcgcctcctggaagatggtgactgaggtacccaacctagacttgtccatcttctggattggccaacttaattaatgtatgaaataaaaggatgcacacatagtgacatgctaatcactataatgtgggcatcaaagttgtgtgttatgtgtaattactagttatctgaataaaagagaaagagatcatccatatttcttatcctaaatgaatgtcacgtgtctttataattctttgatgaaccagatgcatttcattaaccaaatccatatacatataaatattaatcatatataattaatatcaattgggttagcaaaacaaatctagtctaggtgtgttttgcgatccgatatcgaattggccacggtaccagctgctgctgttctagggttcacaagtctgcctatttgtcttccccaatggagctatggttgtctggtctggtccttggtcgtgtcccgtttcattgtgtactatttacctgtaatgtgtatccttaagtctggtttgatggtgtctgaaacgttttgctgtggtagagcagcatggaagaactataatgaataagtgatccctaatcattgtgtccaaattttgcttctgctatacccttttgtgctgtttcttatgttttgcttaaaaatttgatctgacaaacaaatttgtctaaattatgctcttgttctgactgtgtactgtacacatttgtattgctaccggtttggcacatagttttctctttgattgcagatcaaacccttctgattgcagattgcttggctatggctgatgtgctcactgttcttctttagcttgtatattgctgatggtggcttggctacggctgaaaaagttgctgctgcgccgacttggcaactgttgctccagtaatgctttgtcctctcttcctagccgccgacttggcacttggcagctgttgctcctgtaatgcgttgttatctcttatctcttgagatgtactatgattttgaggctgtttgacttgtgccagattgccagtgctgatgctatattatctcaggtttttatgctagtatatgttttactgtgtgctgcctgtgtcgagttacgtaatctattgaaccgctatgcgtgttgatgccctgttgttgcttgccagattgatgcccctgttgcttgcagcttgcaagctgtagtgaaatcctaaaattccaaaccaaatctattctgaacttttgaagatctgtgatgtccggaagaaaagattcaaacagataaacgggactctccagaatctataaaataaatgatcgacaaacgctttgctttggtaggcttcaagcttggtcacccggtccgggcctagaaggccagcttcggccgccccgggcaactttattatacaaagttgatagataaatcagatatctggttcctaaggacccggcggaccgattaaactgattcggtccgacgcgttacctaataacttcgtatagcatacattatacgaagttattagctaactaactagtaagcttaagccatgggtcgacggatccgttaactagcgtggcatttggcaccgccgcacactatgcgagctaggagtgctagtttacagatgaaactatgaaaccaagaaaacacaattgtccgtagctagcgcgtggcgtcgtgtcaagcttcacacagtatcttcgttcttcactataaatcgcgcctgttgttcgtgagacccaccaccgtggataacagtcccctaataataagcgatcaacagcactgctgatggctgaacaccgaggcgccgccgcgcgtaaccatccgccggagcagcccgtcgtgccggcgaacgacgccttccccgaccgcgcccagcagctctgcctcgacgccgggcgcgcgctcgcgatgtgcggcgtgctcgtcgccgtccctcccgcattttacgcgtcgacgtcgcggacgacaccgcacttgccttcgtcggcttcgtcctctggatcatcggtgcgtggctgtgcctcctggcgctcacgcccttggctccacgggcggtgagggcgggcggggccgccgccagcaccttgctgatcaggtgcctgtccctttcatgaactactagcgcccgcgcccgcggccgccgggcacaagagaacacatcgatgttcgctgcgtacgtcagcaataaggcactctttgtcagtagtcgagtgcatatgttgggtgtttgccctgggagatttcaagtgttgtggccattatcccgcaggataaaaaatcggcggcttttggattgatacggaaaataacgatgtttcatgctcgtgttgtgtgtgtgacatcttgtcagccaagtttttaaccgttgctactccccctctgtgggctcagtgtgtggaccggaatacgtcgtacataggccgtagcctaagcccaatatgccgtttttcaggttggcctgtgtgacgacaagcgggtctcaaaagcccatcacgcaactggcctgcaattattggaggagagcgcgtcgagttggttccagaggctgcgtggtggggccggactctgcgacgacctctcgttcgcgtccgatttggttgccgtgagccgtgacgtaacgcctccttccgttcctccctatataagttccacccccgggtccggtttccccaagccccagtgacccccgatcccgatcgcgaaatctccgcacccgccggcaagggaccgaagcaagcctctctcccgaccgtcgcatcaaggtacgcgtccgctcgatctgtcctcttccttctcgatttgacttgctgtggtgcccgatcacgggatcagaatcgcaccagtgtagatttcgcatgttctaagatgtgttagtttccaggctaatccagttctcttgacgcccgatccgatcgagctccgtgtttatttcagcctaatcgtagtattcccctaaaatttcctcattagggggttcgcaagattgttggtcgacaggttcacttatgctcgatcgcttacttttagtcgattcatgctgcgtactattgttgccccccgtggttttatcttttctcgtgtgaaatccagtagatatagtagatatcgtagcattaggttttaattcaatcgattgattattgtatcatcaaaattgagaagttcgaatcatgcctatcatgctgcctcaaccgaaatcctgtatattgaagtttcaattcaattgattgatcattcattagattcaaccaaaatctagaaggttagatgacgcatgtcatgctgcctgcgtagtttacctttgatctgtttatgattaccttatcagtaggatatttgtgattttgggaagtagcactaactgattcatgctgacatgatgttccctttcagattatactgttgagtcctatctaattgatgctttgtatgctatatgaatacgtcatggtaaattagcagttaattagcatattagcaattgggcgtacctcatcaggattgctcttgtagatgtgtgtggtgatgtttcttgttcaattcatgttctgctttaaaagtatgtgttctctgtttgttaattaagattcatggttataatgatttggacctaattaatcagggttgcccttttagatgcgtggttacttgttgagttcatttttttcctgctatagttgtatgcgtttgttcattcatggttagatttgatttgtttcttctctattccatgccttccatatacttcaattgtagcttaacatgagatttctgtatatgcaggtcgaccgccggggatccacacgacaccatggcccagtccaagcacggcctgaccaaggagatgaccatgaagtaccgcatggagggctgcgtggacggccacaagttcgtgatcaccggcgagggcatcggctaccccttcaagggcaagcaggccatcaacctgtgcgtggtggagggcggccccttgcccttcgccgaggacatcttgtccgccgccttcatgtacggcaaccgcgtgttcaccgagtacccccaggacatcgtcgactacttcaagaactcctgccccgccggctacacctgggaccgctccttcctgttcgaggacggcgccgtgtgcatctgcaacgccgacatcaccgtgagcgtggaggagaactgcatgtaccacgagtccaagttctacggcgtgaacttccccgccgacggccccgtgatgaagaagatgaccgacaactgggagccctcctgcgagaagatcatccccgtgcccaagcagggcatcttgaagggcgacgtgagcatgtacctgctgctgaaggacggtggccgcttgcgctgccagttcgacaccgtgtacaaggccaagtccgtgccccgcaagatgcccgactggcacttcatccagcacaagctgacccgcgaggaccgcagcgacgccaagaaccagaagtggcacctgaccgagcacgccatcgcctccggctccgccttgccctccggactcagatctcgatagagtcaacctagacttgtccatcttctggattggccaacttaattaatgtatgaaataaaaggatgcacacatagtgacatgctaatcactataatgtgggcatcaaagttgtgtgttatgtgtaattactagttatctgaataaaagagaaagagatcatccatatttcttatcctaaatgaatgtcacgtgtctttataattctttgatgaaccagatgcatttcattaaccaaatccatatacatataaatattaatcatatataattaatatcaattgggttagcaaaacaaatctagtctaggtgtgttttgcgaattgcggcgcccttactttaacgcctctaaccaacacccctttatctttataaggaacaataaacagaatttgccccactgttctaaatcacctaataatatccccagctaaaaacaataaaggtttcctagaattaagacaagcatgactgttcctccaggagggtttggaacattgttgcagtcttgcagatacgggcgaagggtgagaaacagagcggagggctggaggtgacctcggtagtcgacgccggagttgagcttgacaacgacggggcggcccctgatggacttgaggaagtccgatggcgtcttcaccgtcccgccggcgcccgaggcgggcctgtcgctgccgccgccgccgctgctcatcttgcgcgctgtgcccccggcggtgtccctgtgttgcggatcgcgggtgggccaggtggatgcgagggcgacccgtttggactccggccggagccgccggatccctggtcggtgtcagtgccgtttactctgggccccacgtgtcagtaccgtctgtagatgacaacaacccgtcgtccacagtcatgtccaaaatatcctttcttcttttttttcgattcggatatctatcttccttttttttttccaaaaatcttcttgacgcaccagcgcgcacgtttgtggtaaacgccgacacgtcggtcccacgtcgatagaccccacccaccagtgagtagcgtgtacgtattcgggggtgacggacgtgtcgccgtcgtcttgctagtcccattcccatctgagccacacatctctgaacaaaaaaaaggagggaggcctccacgcacatccccctccgtgccacccgccccaaaccctcgcgccgcctccgagacagccgccgcaaccatggccaccgccgccgccgcgtctaccgcgctcactggcgccactaccgctgcgcccaaggcgaggcgccgggcgcacctcctggccacccgccgcgccctcgccgcgcccatcaggtgctcagcggcgtcacccgccatgccgatggctcccccggccaccccgctccggccgtggggccccaccgagccccgcaagggtgctgacatcctcgtcgagtccctcgagcgctgcggcgtccgcgacgtcttcgcctaccccggcggcgcgtccatggagatccaccaggcactcacccgctcccccgtcatcgccaaccacctcttccgccacgagcaaggggaggcctttgccgcctccggctacgcgcgctcctcgggccgcgtcggcgtctgcatcgccacctccggccccggcgccaccaacctagtctccgcgctcgccgacgcgctgctcgattccgtccccatggtcgccatcacgggacaggtggcgcgacgcatgattggcaccgacgccttccaggagacgcccatcgtcgaggtcacccgctccatcaccaagcacaactacctggtcctcgacgtcgacgacatcccccgcgtcgtgcaggaggctttcttcctcgcctcctctggtcgaccagggccggtgcttgtcgacatccccaaggacatccagcagcagatggcggtgcctgtctgggacaagcccatgagtctgcctgggtacattgcgcgccttcccaagccccctgcgactgagttgcttgagcaggtgctgcgtcttgttggtgaatcgcggcgccctgttctttatgtgggcggtggctgcgcagcatctggtgaggagttgcgacgctttgtggagctgactggaatcccggtcacaactactcttatgggcctcggcaacttccccagcgacgacccactgtctctgcgcatgctaggtatgcatgggacggtgtatgcaaattatgcagtggataaggccgatctgttgcttgcacttggtgtgcggtttgatgatcgcgtgacagggaagattgaggcttttgcaagcagggctaagattgtgcacgttgatattgatccggctgagattggcaagaacaagcagccacatgtgtccatctgtgcagatgttaagcttgctttgcagggcatgaatgctcttcttgaaggaagcacatcaaagaagagctttgactttggctcatggaacgatgagttggatcagcagaagagggaattcccccttgggtataaaacatctaatgaggagatccagccacaatatgctattcaggttcttgatgagctgacgaaaggcgaggccatcatcggcacaggtgttgggcagcaccagatgtgggcggcacagtactacacttacaagcggccaaggcagtggttgtcttcagctggtcttggggctatgggatttggtttgccggctgctgctggtgcttctgtggcaaacccaggtgtcactgttgttgacatcgatggagatggtagctttctcatgaacgttcaggagctagctatgatccgaattgagaacctcccagtgaaggtctttgtgctaaacaaccagcacctggggatggtggtgcagttggaggacaggttctataaggccaacagagcgcacacatacttgggaaacccagagaatgaaagtgagatatatccagatttcgtgacgatcgccaaagggttcaacattccagcggtccgtgtgacaaagaagaacgaagtccgcgcagcgataaagaagatgctcgagactccagggccgtacctcttggatataatcgtcccacaccaggagcatgtgttgcctatgatccctagtggtggggctttcaaggatatgatcctggatggtgatggcaggactgtgtactgactagctagtcagttaacagatctgccagatcctcggtgtacaaataacccgtcttatcctatgagacgggccggcgtcagtgtgttctggaggaatttttatgtcagagcctttttctttgtgtgcttgatgtagatgccaagggaagcttattggctgttgaagcttgatgcaaaataaattatggaactctgttttttgtttatctaataataactagcaaatatgcttccattgcattgaaactaacagccttttgtgtttccaagttttattttgtgacaatgtcatctatttcaattagttgtggaatcggaaacttgcaggactaacttggaaactccaatccctcagcatcctggactttttcctggtgtaatccatgtagatattattttaatcatcattttagttctggaggtttttccatctccggttttgctcccctttcttcaaaaaaaaaaaaaaaatgccgtaggcgccgcaacgcccacctgttgttcaaactcatgggcacgagtggctcgaagattttatacaacaattgctgtagtttcaccgttgctggtgaagaagcatttttttaaaaaaatatagtggtattcattttaattagtttagttgtgcagcgagcaaaatttggacatgctctgctcggaatctgatcgacctagacacagattagcagcagtagctttgtcatctgttccaagagttgcgatctgatagaagaaaaaaaaaccttcccttcaatgtaaaaccgaaactaacaagaaagaagcacagtgccgtttaggcaagtatggagtacgtattaagcatgtagaaggccatgcatgaaccactaacaagaaagaagcgcagtgccattcaggcaagcataagcatgtagattggcatgcatgaacaactaacagtagatcgtctctggtctgattagaagttttttgggaagccaagaaatcatgtacaactggttccatctcaaattccgtggcaaaaagaggcctaagcaacatacctcgagtagatcacattcaagcttggtcacccggtccgtcaatattctgattccgatgacttcgtaggttcctagctcaagccgctcgtgtccaagcgtcacttacgattagctaatgattacggcatctaggaccgactagtggcgcgccgactagctagctaaggtaccgagctcgaattcattccgattaatcgtggcctcttgctcttcaggatgaagagctatgtttaaacgtgcaagcgctactagacaattcagtacattaaaaacgtccgcaatgtgttattaagttgtctaagcgtcaatttgtttacaccacaatatatcctgccaccagccagccaacagctccccgaccggcagctcggcacaaaatcaccactcgatacaggcagcccatcagtccgggacggcgtcagcgggagagccgttgtaaggcggcagactttgctcatgttaccgatgctattcggaagaacggcaactaagctgccgggtttgaaacacggatgatctcgcggagggtagcatgttgattgtaacgatgacagagcgttgctgcctgtgatcaaatatcatctccctcgcagagatccgaattatcagccttcttattcatttctcgcttaaccgtgacaggctgtcgatcttgagaactatgccgacataataggaaatcgctggataaagccgctgaggaagctgagtggcgctatttctttagaagtgaacgttgacgatcgtcgggcccaggtagaatccgcctgagtcgcaagggtgacttcgcctatattggacgacggcgcgcagagggcgacctctttttgggttacgattgtaggattatcactaaaacaatacatgaacatattcaaatggcaatctctctaaggcattggaaataaatacaaataacagttgggtggagtttttcgacctgtgggcgttaaccttctgttaacctaaaagctcttgcccaaacagcagaatcggcgctaattgccagcggcggaacttttccagtttcgcgaaaaatatcgccactggcaaggaatgggtttgagatggcgaagtctgtcctaaaagcagcgcctgtagttgtagggttgacggccttgatggagcgtcatgccgatgccctctcgagccaacttcaagcacatcatcttaaggttttcccgccgcattccgagaagggcattcgaacattcgggccatcggaggcgtccaagctgctcggcgttggcgagtcatatttacggcagaccgcgtctgagatgccagagttgaatgttagcatgagcccgggtggcaggcgaatgttctcaattgaagatatccatgcgattcggaagtatatggatcaggtcggccgcgggaaccggcgctacctgccacatcgtcgaggcggcgagcagcttcaggttatctctgtgatgaatttcaaaggtgggtcgggtaagaccaccaccgccgcgcatctggcgcagtacctcgctatgcgcggatatcgagtcttggccattgatctcgatcctcaagcgagcctttctgcactctttgggagccaaccggagacggacgttggcccgaacgaaacgctctacggcgctataaggtatgatgatgagcaggtggcaatcgaacgagtcgtccgagggacttacattcccgacctccacctgattcctggtaatcttgagctgatggagt

SEQ ID NO: 49 - DNA, 23255 bp, Artificial sequence
  PHP95394
gtttacccgccaatatatcctgtcaaacactgatagtttaaactgaaggcgggaaacgacaatctgatcatgagcggagaattaagggagtcacgttatgacccccgccgatgacgcgggacaagccgttttacgtttggaactgacagaaccgcaacgttgaaggagccactcagcaagctggtacgattgtaatacgactcactatagggcgaattgagcgctgtttaaacgctcttcaactggaagagcggttacgctgtttaaacgctcttcaactggaagagcggttactaccggttcactagctagctgctaatcgagctagttaccctatgaggtgacatgaagcgctcacggttactatgacggttagcttcacgactgttggtggcagtagcgtacgacttagctatagttccggacttacccttaagcgatttaaatctgcggttaccgaattcgagctcggtacctagtacccttgtacttttggtttcacctgcatagagaaaacccacaagaatatgacagtctgatttgtcagtctcattctcaagcaacatttctctatccgttactttcatggtgaataacacaatccatcatcaatactttgtgttactcagaaactgaaagttattccgagtcttgcatatctttggacctactcgtttttctaccattattgctgattgttaagctctcgctacttgaatcggcattgttggagtgggaaggttcaaaaaattggagttatgactagttgtctctttctatgtacgatggagaaaatgaataaacaactgagaaaatggctcttgtttagttgatgatgctcttaagctttccactggttgccatatatgatttgggcatttcactttgatcttaatgggccttgtaaagcccaagactcatgattatctttagttgatgctcttaattaggtgtgggcaaataattcaaactgtatgtacccgaccaaaaccaaagcaaaaataatcgaaccaaaccgaaaatttaaaaataaccgaatgaaaactaaatcctataactgaaagaactgaaaccgaatcaaaatatttaatgtaaccaaaaatatccgaaatataattatattgtcaaaaatattaataatttctagattaaataattaaaaatacttaaaaatttatataaaatagtaaaaatactcgaaaataaccacaaatattcaaaaacaaccgaaatatcccaaaatattcaaagcaaaataaccgaatggataccaaattttaaaaccgaaaaaactggaacaaaaccaaaatcgaaccaaaatttcaaaaatcgaataaatactaaactttagaacaaaaaaaaacgataaccgaatgtatacgaaccaaagccgaattagataaccgaacgtccaggactactcttaatctttccgccacttatgatttgggctattactttgtttataatgagccttttcaagctcaagttcatgattgtccgtgagatgagaaactgacttgttggattcgaaaccctagctagtattggttaatacttaatacataaatgacctgcattgacatcatcatccaagaaaataaaaattgtatgcttgagatatttagttttcctagctaggttttctttattttagtaccgaatctttaggtgtgccacgttaatttagacccattttttcatacttaccaactgagtctagtttaatcatgactataatcgtataaaatgattcagtcgacgtcattgcgaacgtatataaaatcatccaaattgacgtcattccaaagaggtaagcatgcttatctaagagtccgagcatactaaacaagacgacattttatttgcactccaaatcaaattttgtattgcctaaagaaaaacaatcaaactcaagtttcttaaaattaatttcattcaaactaatcactttcaatatctcacatattattcatgccatttctatttgtctaaacatgatttaaaaaaaaaagtaaaatacaaagattactatgcaaaaactctataaaaaaaaattcaaatttcttatttatttgtgacatcaaattttcaaaataatttttttaattatcggttgatccggtcagtcgataaaaacataaactttcagcgaccgttaaaactttcctactaccgatttagagaaaatcttagcttgaaacgtaattgtaacctgccttcatgcaagtcgcaagatatgtcatcctaagttgtatatgttttctcaaaagatgtatttacttgagaaaatacgtttcaacgttgatggacaaccaattaagaatcaagcacctttcgtaatcaatttaggcttatcgtctaaggtatactgatttacgacagttgactagacttataaggaacaaaataatagaatagtttctaaacacttcacctaatcatagagactaagatggtaattcgtaaacgacaaagcctagtgacactgtccattgtaaaattccacatcatattagtattaaacatatacatgtagtttcctgaacacatgtagtatcaaacacacttcgtggcttcttcctcgaaacctgcggccgcgctatagttccggacttacccttaagataacttcgtatagcatacattatacgaagttatgggcccacgcgtgaagagcggttaccagagctggtcacctttgtccaccaagatggaactgtcttcggccagaatggccatctggattcagcaggcctagaaggccatttatcgctatcaactttgtatagaaaagttgggccgaattcgagctcggtacggccagaatggcccggaccgaagcttcggccgcacactgatagtttaaacgcacaaaatacataaaactagattagaaaaggaagagaatacgccaaattgcagcttaatcaattagacgatttagtcctgtttttacgaaacaattgtttaagataacattaggacatgtacaatatgtgtctttggatgtgtttaaggagtaaatgtaaaaaaaatagatacgtctcttaacgaagtcattgtgtcttggctctatgctcgagacggagaaatagctaattgattaatttaatttattgaatgttcttattggtgtaatgaatatagtaaggcactggccttatacttggagtttggcatgtcttatgctatgttgcaaacaggcccggtcttgacatttcgggggccctaagagaaaatttatatagaggtcctatacgaaaatttgagtctgttattttttcaacttttaaataatatatgaaaaataaaaaattgatgatttacataattttattcaaaatgatatgactggaaatattgttacagtattttatgagtcgtaaaattatataaattatgtaatatacatttgttttgacttttgagagagtatttttacttttaatttgtcaaactagcctaaaccttaaaatacacagtaaaccaaatctaaatacattagatcaaattttctgaaaataaagttcagcaaactaaactaggattaatcaatgtaggttattagggtcgacccttcggtaggctagaattaagcaacgcgataggcacaggtgtacaacacctttcgtccttcccacgtcaattttagggcctgtttggttcacggctaattatgccacactttgcctaaggttagtcgtccgaattgaagaactaaccttatgcagaaaagttaggcaaagtatggcaagttaggtagtaaaccaaacaggccaaagtatttgtcatcaagcagacggttgcgcgacctcaaagagatgattgctagaaaataaagagacgcaacaaaagaatgaaaatatagatttatctataacttatatgcatttgatataagatagataaatgggagccctacgaaccttgaggctctgagcagtcgcatatcctgcacacccttggcgccggccctggttgcaaatatgcaattgtgtccttatccgcgactggtcacgaggctaggattgatcgaaagctgccgatgagaaatggcaagggcggcatgctgtggccttttttttacggtctgtcaggacaactgaaaagttacaaatttatagtggttgtaaacagcaacacgttaaaaagtcgattatcagtttcacagaaagaggtcgttaaaaccgccagcaagcttgtttcactatcagtctgtcgctaagacaatctctttcaccaaaaatacaatttgctttcttgccgttgcttcaagtgaaaatcttaatgttttaaattaaaatatgtggctctacgtaggaaaaaataattcaatcgagtctcatttcataaaaaaaatttggtcaaaaaattatacaccatctcgctcaagtgactcaaatatactaaacggtactgagctgtcttataatataaatttgatttactgttagaatatgatgttttatgagtgcactaaattctataaaatatatttatttttaaattataagatatttttataggtctgctcttagagagagctaaaaaagagagaggctgtctgaagaaaaatccataaccaacgcaaaatcccgggcgcccaatcagccttctccgcggagattcctagcctcagccagagctacctcatctgcgtgaggctccggtggcgccaagtgttccggcatcccggacgcaccaatggcatccgagcaacagatcttttctgcaacaacgcttcgcgtcgcggcggtgtttccctccatctgctctgctctttaaatacctccgtcgtctcctcgtctccacagcatctcaagtcttcacactcctcgccatcacataaaaccagtgcaagcagaagcagcgcatcccgggggatctcgactctagaggatcgctcaggaaggccgctgagatagaggcatggcggccaatgcgggcggcggtggagcgggaggaggcagcggcagcggcagcgtggctgcgccggcggtgtgccgccccagcggctcgcggtggacgccgacgccggagcagatcaggatgctgaaggagctctactacggctgcggcatccggtcgcccagctcggagcagatccagcgcatcaccgccatgctgcggcagcacggcaagatcgagggcaagaacgtcttctactggttccagaaccacaaggcccgcgagcgccagaagcgccgcctcaccagcctcgacgtcaacgtgcccgccgccggcgcggccgacgccaccaccagccaactcggcgtcctctcgctgtcgtcgccgccgccttcaggcgcggcgcctccctcgcccaccctcggcttctacgccgccggcaatggcggcggatcggctgtgctgctggacacgagttccgactggggcagcagcggcgctgccatggccaccgagacatgcttcctgcaggactacatgggcgtgacggacacgggcagctcgtcgcagtggccacgcttctcgtcgtcggacacgataatggcggcggccgcggcgcgggcggcgacgacgcgggcgcccgagacgctccctctcttcccgacctgcggcgacgacggcggcagcggtagcagcagctacttgccgttctggggtgccgcgtccacaactgccggcgccacttcttccgttgcgatccagcagcaacaccagctgcaggagcagtacagcttttacagcaacagcaacagcacccagctggccggcaccggcaaccaagacgtatcggcaacagcagcagcagccgccgccctggagctgagcctcagctcatggtgctccccttaccctgctgcagggagtatgtgagagcaacgcgagctgccactgctcttcactgatgtctctggaatggaaggaggaggaagtgagcatagcgttggtgcgttgctgtcaagggcgaattcacatggttaacctagacttgtccatcttctggattggccaacttaattaatgtatgaaataaaaggatgcacacatagtgacatgctaatcactataatgtgggcatcaaagttgtgtgttatgtgtaattactagttatctgaataaaagagaaagagatcatccatatttcttatcctaaatgaatgtcacgtgtctttataattctttgatgaaccagatgcatttcattaaccaaatccatatacatataaatattaatcatatataattaatatcaattgggttagcaaaacaaatctagtctaggtgtgttttgcgaatgcggccgccaccgcggtggagctcgaattccggtccgggcctagaaggccagcttcaagtttgtacaaaaaagcaggctccggccagaatggcccggaccgggttaccgaattcgagctcggtaccatttaaattgcgcccgccacggccgtggaggtcgtattccggtcagcttgcatccctgcagtgcagcgtgacccggtcgtgcccctctctagagataatgagcattgcatgtctaagttataaaaaattaccacatattttttttgtcacacttgtttgaagtgcagtttatctatctttatacatatatttaaactttactctacgaataatataatctatagtactacaataatatcagtgttttagagaatcatataaatgaacagttagacatggtctaaaggacaattgagtattttgacaacaggactctacagttttatctttttagtgtgcatgtgttctcctttttttttgcaaatagcttcacctatataatacttcatccattttattagtacatccatttagggtttagggttaatggtttttatagactaatttttttagtacatctattttattctattttagcctctaaattaagaaaactaaaactctattttagtttttttatttaataatttagatataaaatagaataaaataaagtgactaaaaattaaacaaataccctttaagaaattaaaaaaactaaggaaacatttttcttgtttcgagtagataatgccagcctgttaaacgccgtcgacgagtctaacggacaccaaccagcgaaccagcagcgtcgcgtcgggccaagcgaagcagacggcacggcatctctgtcgctgcctctggacccctctcgagagttccgctccaccgttggacttgctccgctgtcggcatccagaaattgcgtggcggagcggcagacgtgagccggcacggcaggcggcctcctcctcctctcacggcaccggcagctacgggggattcctttcccaccgctccttcgctttcccttcctcgcccgccgtaataaatagacaccccctccacaccctctttccccaacctcgtgttgttcggagcgcacacacacacaaccagatctcccccaaatccacccgtcggcacctccgcttcaaggtacgccgctcgtcctcccccccccccctctctaccttctctagatcggcgttccggtccatgcatggttagggcccggtagttctacttctgttcatgtttgtgttagatccgtgtttgtgttagatccgtgctgctagcgttcgtacacggatgcgacctgtacgtcagacacgttctgattgctaacttgccagtgtttctctttggggaatcctgggatggctctagccgttccgcagacgggatcgatttcatgattttttttgtttcgttgcatagggtttggtttgcccttttcctttatttcaatatatgccgtgcacttgtttgtcgggtcatcttttcatgcttttttttgtcttggttgtgatgatgtggtctggttgggcggtcgttctagatcggagtagaattctgtttcaaactacctggtggatttattaattttggatctgtatgtgtgtgccatacatattcatagttacgaattgaagatgatggatggaaatatcgatctaggataggtatacatgttgatgcgggttttactgatgcatatacagagatgctttttgttcgcttggttgtgatgatgtggtgtggttgggcggtcgttcattcgttctagatcggagtagaatactgtttcaaactacctggtgtatttattaattttggaactgtatgtgtgtgtcatacatcttcatagttacgagtttaagatggatggaaatatcgatctaggataggtatacatgttgatgtgggttttactgatgcatatacatgatggcatatgcagcatctattcatatgctctaaccttgagtacctatctattataataaacaagtatgttttataattattttgatcttgatatacttggatgatggcatatgcagcagctatatgtggatttttttagccctgccttcatacgctatttatttgcttggtactgtttcttttgtcgatgctcaccctgttgtttggtgttacttctgcaggtcgactctagaggatccatggccactgtgaacaactggctcgctttctccctctccccgcaggagctgccgccctcccagacgacggactccacactcatctcggccgccaccgccgaccatgtctccggcgatgtctgcttcaacatcccccaagattggagcatgaggggatcagagctttcggcgctcgtcgcggagccgaagctggaggacttcctcggcggcatctccttctccgagcagcatcacaaggccaactgcaacatgatacccagcactagcagcacagtttgctacgcgagctcaggtgctagcaccggctaccatcaccagctgtaccaccagcccaccagctcagcgctccacttcgcggactccgtaatggtggcttcctcggccggtgtccacgacggcggtgccatgctcagcgcggccgccgctaacggtgtcgctggcgctgccagtgccaacggcggcggcatcgggctgtccatgattaagaactggctgcggagccaaccggcgcccatgcagccgagggtggcggcggctgagggcgcgcaggggctctctttgtccatgaacatggcggggacgacccaaggcgctgctggcatgccacttctcgctggagagcgcgcacgggcgcccgagagtgtatcgacgtcagcacagggtggagccgtcgtcgtcacggcgccgaaggaggatagcggtggcagcggtgttgccggcgctctagtagccgtgagcacggacacgggtggcagcggcggcgcgtcggctgacaacacggcaaggaagacggtggacacgttcgggcagcgcacgtcgatttaccgtggcgtgacaaggcatagatggactgggagatatgaggcacatctttgggataacagttgcagaagggaagggcaaactcgtaagggtcgtcaagtctatttaggtggctatgataaagaggagaaagctgctagggcttatgatcttgctgctctgaagtactggggtgccacaacaacaacaaattttccagtgagtaactacgaaaaggagctcgaggacatgaagcacatgacaaggcaggagtttgtagcgtctctgagaaggaagagcagtggtttctccagaggtgcatccatttacaggggagtgactaggcatcaccaacatggaagatggcaagcacggattggacgagttgcagggaacaaggatctttacttgggcaccttcagcacccaggaggaggcagcggaggcgtacgacatcgcggcgatcaagttccgcggcctcaacgccgtcaccaacttcgacatgagccgctacgacgtgaagagcatcctggacagcagcgccctccccatcggcagcgccgccaagcgcctcaaggaggccgaggccgcagcgtccgcgcagcaccaccacgccggcgtggtgagctacgacgtcggccgcatcgcctcgcagctcggcgacggcggagccctggcggcggcgtacggcgcgcactaccacggcgccgcctggccgaccatcgcgttccagccgggcgccgccagcacaggcctgtaccacccgtacgcgcagcagccaatgcgcggcggcgggtggtgcaagcaggagcaggaccacgcggtgatcgcggccgcgcacagcctgcaggacctccaccacctgaacctgggcgcggccggcgcgcacgactttttctcggcagggcagcaggccgccgccgctgcgatgcacggcctgggtagcatcgacagtgcgtcgctcgagcacagcaccggctccaactccgtcgtctacaacggcggggtcggcgacagcaacggcgccagcgccgtcggcggcagtggcggtggctacatgatgccgatgagcgctgccggagcaaccactacatcggcaatggtgagccacgagcaggtgcatgcacgggcctacgacgaagccaagcaggctgctcagatggggtacgagagctacctggtgaacgcggagaacaatggtggcggaaggatgtctgcatgggggactgtcgtgtctgcagccgcggcggcagcagcaagcagcaacgacaacatggccgccgacgtcgggcatggcggcgcgcagctcttcagtgtctggaacgacacttaagcgtacgtgccggcctggctctccgaaagggcgtattccagcacactggcggccgttactagacccaacctagacttgtccatcttctggattggccaacttaattaatgtatgaaataaaaggatgcacacatagtgacatgctaatcactataatgtgggcatcaaagttgtgtgttatgtgtaattactagttatctgaataaaagagaaagagatcatccatatttcttatcctaaatgaatgtcacgtgtctttataattctttgatgaaccagatgcatttcattaaccaaatccatatacatataaatattaatcatatataattaatatcaattgggttagcaaaacaaatctagtctaggtgtgttttgcgaatgcggcctccgggcacccagctttcttgtacaaagtggccgttaacggatcggccagaatggcccggaccgggttaccgaattcgagctcggtaccctggttcacaaactcaatacaacacacagtggagtagggtattacgctccggcggcccgaaccactctaaatccttgtgtcctcgtgtgctcttccaccattaatgactgtaattgcagggacacgaagagttgtagcgcttttgccaacaagatccgctatatgctagtagagtggaacctgcacagcaacaagcatccaataatctgagaataagaattatgtgtggtgatggttctcatctctgcaactcgccattttcgcgagagaaccaaatccaagttggtgaagatcatgatttgggctcatgggctggcatagtagctattacctttgcaattgtggttcgaatctatccgatattctccttttcagggagagctaatgcttatgcttattgggtattttggtttgacactgcttcacgcccaaaaaaaggcaactatgtctgagttggatatggcccaaaaaaaggcagctatgtctgagttggatatggaagtcttctttcgtttagggtgaagtaagaccaagctcatgagcttattatcttaggtcggaacaaattagttgataggcatggcacatttatcaaattataatgattttaacagaaaagcaacacctctttttcagcagcaccagctttgcaagctgcaattgacactccaagcatagtatttgctccaaactcagcctgcatttcgcacaatatcatatctatttccatttggataaaatatattttccagaaatatgggaacagaatcaagatacagaaaaaagttgtggtagtagtggtaagtggaaacacaagtacagtgaaaagatagcattatttctgaacagtcaaattaaccgaaataagtagtatcacatactgcccctaaattgactacacccaatgtaaagaattgcttgagcatattgagccatcagttgtttgtttgtgtaacggatttgacaatgcagagttcaggagcaaaaaaccgcaaaggagagaaagagggaaaggatctcctagtatcccaccttgtggcgcgccctgtcaagtgcatgatggcctggtcgatctgcgtctgctgctgcggttccatcccaacgagtgcctccgacaccttgtcgttgatcacccgcaccgcgtaggcgacccccctggcgaggaacttccgcctctcggaggccccggccgcgtcggcggcggcgccctcgagcgcgcccacgctagccgtagatgctcggtgcacggccttgttggtgtgcaactcgacctcaacggccggtgcgctacgcccgtcaaggatctggcgcgcccgcaccctcgtgatcacggtgggcgcctcccgcctcatgtggccgacgatgaaaagcgccgggttaggggccttggcgcgcaccgccgtattcagggcctcctcgctcttgcgcgagagcaggtgcttccccaggtactcctgcactgacaaggctgccacagcggtggaatttgtcctcacgacttcgccacgtcgtcctcacctccctggcttcccacgactccgccgtatcgaggtgctcggtgggtcgtcttaatccgaagtccgaactaggaagacgagacagagaggtctgaggaatgggcctcgtttgatgttgagctgaattatttttccagcataagcccaggtcttggtccatgaacaaaattactagaaacccagcccagtactacgatctaaaagagggactgccactggatagctctctctagcattctccacgctccaatacagcggcgtcgtgtctatccgggtctatccgcgaacacgtgagaactctccagaaactgctttctcctccacttcatctctctcgctttccctctataaaaagaccccttctaggaattgagggagacagcaagcaccaagcagcgatccgaagctcaatcaattcactcaaacctcttccccaaatcttcgattagatcttcgttgacaagaagactagaaccgaacctgacatgtccaacctgctcacggttcaccagaaccttccggctcttccagtggacgcgacgtccgatgaagtcaggaagaacctcatggacatgttccgcgacaggcaagcgttcagcgagcacacctggaagatgctgctctccgtctgccgctcctgggctgcatggtgcaagctgaacaacaggaagtggttccccgctgagcccgaggacgtgagggattaccttctgtacctgcaagcgcgaggtttgtttctgcttctacctttgatatatatataataattatcattaattagtagtaatataatatttcaaatatttttttcaaaataaaagaatgtagtatatagcaattgcttttctgtagtttataagtgtgtatattttaatttataacttttctaatatatgaccaaaacatggtgatgcctaggtctggcagtgaagaccatccagcaacaccttggacaactgaacatgcttcacaggcgctccggcctcccgcgccccagcgactcgaacgccgtgagcctcgtcatgcgccgcatcaggaaggaaaacgtcgatgccggcgaaagggcaaagcaggccctcgcgttcgagaggaccgatttcgaccaggtccgcagcctgatggagaacagcgacaggtgccaggacattaggaacctggcgttcctcggaattgcatacaacacgctcctcaggatcgcggaaattgcccgcattcgcgtgaaggacattagccgcaccgacggcggcaggatgcttatccacattggcaggaccaagacgctcgtttccaccgcaggcgtcgaaaaggccctcagcctcggagtgaccaagctcgtcgaacgctggatctccgtgtccggcgtcgcggacgacccaaacaactacctcttctgccgcgtccgcaagaacggggtggctgcccctagcgccaccagccaactcagcacgagggccttggaaggtattttcgaggccacccaccgcctgatctacggcgcgaaggatgacagcggtcaacgctacctcgcatggtccgggcactccgcccgcgttggagctgctagggacatggcccgcgccggtgtttccatccccgaaatcatgcaggcgggtggatggacgaacgtgaacattgtcatgaactacattcgcaaccttgacagcgagacgggcgcaatggttcgcctcctggaagatggtgactgaggtacccaacctagacttgtccatcttctggattggccaacttaattaatgtatgaaataaaaggatgcacacatagtgacatgctaatcactataatgtgggcatcaaagttgtgtgttatgtgtaattactagttatctgaataaaagagaaagagatcatccatatttcttatcctaaatgaatgtcacgtgtctttataattctttgatgaaccagatgcatttcattaaccaaatccatatacatataaatattaatcatatataattaatatcaattgggttagcaaaacaaatctagtctaggtgtgttttgcgatccgatatcgaattggccacggtaccagctgctgctgttctagggttcacaagtctgcctatttgtcttccccaatggagctatggttgtctggtctggtccttggtcgtgtcccgtttcattgtgtactatttacctgtaatgtgtatccttaagtctggtttgatggtgtctgaaacgttttgctgtggtagagcagcatggaagaactataatgaataagtgatccctaatcattgtgtccaaattttgcttctgctatacccttttgtgctgtttcttatgttttgcttaaaaatttgatctgacaaacaaatttgtctaaattatgctcttgttctgactgtgtactgtacacatttgtattgctaccggtttggcacatagttttctctttgattgcagatcaaacccttctgattgcagattgcttggctatggctgatgtgctcactgttcttctttagcttgtatattgctgatggtggcttggctacggctgaaaaagttgctgctgcgccgacttggcaactgttgctccagtaatgctttgtcctctcttcctagccgccgacttggcacttggcagctgttgctcctgtaatgcgttgttatctcttatctcttgagatgtactatgattttgaggctgtttgacttgtgccagattgccagtgctgatgctatattatctcaggtttttatgctagtatatgttttactgtgtgctgcctgtgtcgagttacgtaatctattgaaccgctatgcgtgttgatgccctgttgttgcttgccagattgatgcccctgttgcttgcagcttgcaagctgtagtgaaatcctaaaattccaaaccaaatctattctgaacttttgaagatctgtgatgtccggaagaaaagattcaaacagataaacgggactctccagaatctataaaataaatgatcgacaaacgctttgctttggtaggcttcaagcttggtcacccggtccgggcctagaaggccagcttcggccgccccgggcaactttattatacaaagttgatagataaatcagatatctggttcctaaggacccggcggaccgattaaactgattcggtccgacgcgttacctaataacttcgtatagcatacattatacgaagttattagctaactaactagtaagcttaagccatgggtcgacggatccgttaactagcgtggcatttggcaccgccgcacactatgcgagctaggagtgctagtttacagatgaaactatgaaaccaagaaaacacaattgtccgtagctagcgcgtggcgtcgtgtcaagcttcacacagtatcttcgttcttcactataaatcgcgcctgttgttcgtgagacccaccaccgtggataacagtcccctaataataagcgatcaacagcactgctgatggctgaacaccgaggcgccgccgcgcgtaaccatccgccggagcagcccgtcgtgccggcgaacgacgccttccccgaccgcgcccagcagctctgcctcgacgccgggcgcgcgctcgcgatgtgcggcgtgctcgtcgccgtccctcccgcattttacgcgtcgacgtcgcggacgacaccgcacttgccttcgtcggcttcgtcctctggatcatcggtgcgtggctgtgcctcctggcgctcacgcccttggctccacgggcggtgagggcgggcggggccgccgccagcaccttgctgatcaggtgcctgtccctttcatgaactactagcgcccgcgcccgcggccgccgggcacaagagaacacatcgatgttcgctgcgtacgtcagcaataaggcactctttgtcagtagtcgagtgcatatgttgggtgtttgccctgggagatttcaagtgttgtggccattatcccgcaggataaaaaatcggcggcttttggattgatacggaaaataacgatgtttcatgctcgtgttgtgtgtgtgacatcttgtcagccaagtttttaaccgttgctactccccctctgtgggctcagtgtgtggaccggaatacgtcgtacataggccgtagcctaagcccaatatgccgtttttcaggttggcctgtgtgacgacaagcgggtctcaaaagcccatcacgcaactggcctgcaattattggaggagagcgcgtcgagttggttccagaggctgcgtggtggggccggactctgcgacgacctctcgttcgcgtccgatttggttgccgtgagccgtgacgtaacgcctccttccgttcctccctatataagttccacccccgggtccggtttccccaagccccagtgacccccgatcccgatcgcgaaatctccgcacccgccggcaagggaccgaagcaagcctctctcccgaccgtcgcatcaaggtacgcgtccgctcgatctgtcctcttccttctcgatttgacttgctgtggtgcccgatcacgggatcagaatcgcaccagtgtagatttcgcatgttctaagatgtgttagtttccaggctaatccagttctcttgacgcccgatccgatcgagctccgtgtttatttcagcctaatcgtagtattcccctaaaatttcctcattagggggttcgcaagattgttggtcgacaggttcacttatgctcgatcgcttacttttagtcgattcatgctgcgtactattgttgccccccgtggttttatcttttctcgtgtgaaatccagtagatatagtagatatcgtagcattaggttttaattcaatcgattgattattgtatcatcaaaattgagaagttcgaatcatgcctatcatgctgcctcaaccgaaatcctgtatattgaagtttcaattcaattgattgatcattcattagattcaaccaaaatctagaaggttagatgacgcatgtcatgctgcctgcgtagtttacctttgatctgtttatgattaccttatcagtaggatatttgtgattttgggaagtagcactaactgattcatgctgacatgatgttccctttcagattatactgttgagtcctatctaattgatgctttgtatgctatatgaatacgtcatggtaaattagcagttaattagcatattagcaattgggcgtacctcatcaggattgctcttgtagatgtgtgtggtgatgtttcttgttcaattcatgttctgctttaaaagtatgtgttctctgtttgttaattaagattcatggttataatgatttggacctaattaatcagggttgcccttttagatgcgtggttacttgttgagttcatttttttcctgctatagttgtatgcgtttgttcattcatggttagatttgatttgtttcttctctattccatgccttccatatacttcaattgtagcttaacatgagatttctgtatatgcaggtcgaccgccggggatccacacgacaccatggcccagtccaagcacggcctgaccaaggagatgaccatgaagtaccgcatggagggctgcgtggacggccacaagttcgtgatcaccggcgagggcatcggctaccccttcaagggcaagcaggccatcaacctgtgcgtggtggagggcggccccttgcccttcgccgaggacatcttgtccgccgccttcatgtacggcaaccgcgtgttcaccgagtacccccaggacatcgtcgactacttcaagaactcctgccccgccggctacacctgggaccgctccttcctgttcgaggacggcgccgtgtgcatctgcaacgccgacatcaccgtgagcgtggaggagaactgcatgtaccacgagtccaagttctacggcgtgaacttccccgccgacggccccgtgatgaagaagatgaccgacaactgggagccctcctgcgagaagatcatccccgtgcccaagcagggcatcttgaagggcgacgtgagcatgtacctgctgctgaaggacggtggccgcttgcgctgccagttcgacaccgtgtacaaggccaagtccgtgccccgcaagatgcccgactggcacttcatccagcacaagctgacccgcgaggaccgcagcgacgccaagaaccagaagtggcacctgaccgagcacgccatcgcctccggctccgccttgccctccggactcagatctcgatagagtcaacctagacttgtccatcttctggattggccaacttaattaatgtatgaaataaaaggatgcacacatagtgacatgctaatcactataatgtgggcatcaaagttgtgtgttatgtgtaattactagttatctgaataaaagagaaagagatcatccatatttcttatcctaaatgaatgtcacgtgtctttataattctttgatgaaccagatgcatttcattaaccaaatccatatacatataaatattaatcatatataattaatatcaattgggttagcaaaacaaatctagtctaggtgtgttttgcgaattgcggcgcccttactttaacgcctctaaccaacacccctttatctttataaggaacaataaacagaatttgccccactgttctaaatcacctaataatatccccagctaaaaacaataaaggtttcctagaattaagacaagcatgactgttcctccaggagggtttggaacattgttgcagtcttgcagatacgggcgaagggtgagaaacagagcggagggctggaggtgacctcggtagtcgacgccggagttgagcttgacaacgacggggcggcccctgatggacttgaggaagtccgatggcgtcttcaccgtcccgccggcgcccgaggcgggcctgtcgctgccgccgccgccgctgctcatcttgcgcgctgtgcccccggcggtgtccctgtgttgcggatcgcgggtgggccaggtggatgcgagggcgacccgtttggactccggccggagccgccggatccctggtcggtgtcagtgccgtttactctgggccccacgtgtcagtaccgtctgtagatgacaacaacccgtcgtccacagtcatgtccaaaatatcctttcttcttttttttcgattcggatatctatcttccttttttttttccaaaaatcttcttgacgcaccagcgcgcacgtttgtggtaaacgccgacacgtcggtcccacgtcgatagaccccacccaccagtgagtagcgtgtacgtattcgggggtgacggacgtgtcgccgtcgtcttgctagtcccattcccatctgagccacacatctctgaacaaaaaaaaggagggaggcctccacgcacatccccctccgtgccacccgccccaaaccctcgcgccgcctccgagacagccgccgcaaccatggccaccgccgccgccgcgtctaccgcgctcactggcgccactaccgctgcgcccaaggcgaggcgccgggcgcacctcctggccacccgccgcgccctcgccgcgcccatcaggtgctcagcggcgtcacccgccatgccgatggctcccccggccaccccgctccggccgtggggccccaccgagccccgcaagggtgctgacatcctcgtcgagtccctcgagcgctgcggcgtccgcgacgtcttcgcctaccccggcggcgcgtccatggagatccaccaggcactcacccgctcccccgtcatcgccaaccacctcttccgccacgagcaaggggaggcctttgccgcctccggctacgcgcgctcctcgggccgcgtcggcgtctgcatcgccacctccggccccggcgccaccaacctagtctccgcgctcgccgacgcgctgctcgattccgtccccatggtcgccatcacgggacaggtggcgcgacgcatgattggcaccgacgccttccaggagacgcccatcgtcgaggtcacccgctccatcaccaagcacaactacctggtcctcgacgtcgacgacatcccccgcgtcgtgcaggaggctttcttcctcgcctcctctggtcgaccagggccggtgcttgtcgacatccccaaggacatccagcagcagatggcggtgcctgtctgggacaagcccatgagtctgcctgggtacattgcgcgccttcccaagccccctgcgactgagttgcttgagcaggtgctgcgtcttgttggtgaatcgcggcgccctgttctttatgtgggcggtggctgcgcagcatctggtgaggagttgcgacgctttgtggagctgactggaatcccggtcacaactactcttatgggcctcggcaacttccccagcgacgacccactgtctctgcgcatgctaggtatgcatgggacggtgtatgcaaattatgcagtggataaggccgatctgttgcttgcacttggtgtgcggtttgatgatcgcgtgacagggaagattgaggcttttgcaagcagggctaagattgtgcacgttgatattgatccggctgagattggcaagaacaagcagccacatgtgtccatctgtgcagatgttaagcttgctttgcagggcatgaatgctcttcttgaaggaagcacatcaaagaagagctttgactttggctcatggaacgatgagttggatcagcagaagagggaattcccccttgggtataaaacatctaatgaggagatccagccacaatatgctattcaggttcttgatgagctgacgaaaggcgaggccatcatcggcacaggtgttgggcagcaccagatgtgggcggcacagtactacacttacaagcggccaaggcagtggttgtcttcagctggtcttggggctatgggatttggtttgccggctgctgctggtgcttctgtggcaaacccaggtgtcactgttgttgacatcgatggagatggtagctttctcatgaacgttcaggagctagctatgatccgaattgagaacctcccagtgaaggtctttgtgctaaacaaccagcacctggggatggtggtgcagttggaggacaggttctataaggccaacagagcgcacacatacttgggaaacccagagaatgaaagtgagatatatccagatttcgtgacgatcgccaaagggttcaacattccagcggtccgtgtgacaaagaagaacgaagtccgcgcagcgataaagaagatgctcgagactccagggccgtacctcttggatataatcgtcccacaccaggagcatgtgttgcctatgatccctagtggtggggctttcaaggatatgatcctggatggtgatggcaggactgtgtactgactagctagtcagttaacagatctgccagatcctcggtgtacaaataacccgtcttatcctatgagacgggccggcgtcagtgtgttctggaggaatttttatgtcagagcctttttctttgtgtgcttgatgtagatgccaagggaagcttattggctgttgaagcttgatgcaaaataaattatggaactctgttttttgtttatctaataataactagcaaatatgcttccattgcattgaaactaacagccttttgtgtttccaagttttattttgtgacaatgtcatctatttcaattagttgtggaatcggaaacttgcaggactaacttggaaactccaatccctcagcatcctggactttttcctggtgtaatccatgtagatattattttaatcatcattttagttctggaggtttttccatctccggttttgctcccctttcttcaaaaaaaaaaaaaaaatgccgtaggcgccgcaacgcccacctgttgttcaaactcatgggcacgagtggctcgaagattttatacaacaattgctgtagtttcaccgttgctggtgaagaagcatttttttaaaaaaatatagtggtattcattttaattagtttagttgtgcagcgagcaaaatttggacatgctctgctcggaatctgatcgacctagacacagattagcagcagtagctttgtcatctgttccaagagttgcgatctgatagaagaaaaaaaaaccttcccttcaatgtaaaaccgaaactaacaagaaagaagcacagtgccgtttaggcaagtatggagtacgtattaagcatgtagaaggccatgcatgaaccactaacaagaaagaagcgcagtgccattcaggcaagcataagcatgtagattggcatgcatgaacaactaacagtagatcgtctctggtctgattagaagttttttgggaagccaagaaatcatgtacaactggttccatctcaaattccgtggcaaaaagaggcctaagcaacatacctcgagtagatcacattcaagcttggtcacccggtccgtcaatattctgattccgatgacttcgtaggttcctagctcaagccgctcgtgtccaagcgtcacttacgattagctaatgattacggcatctaggaccgactagtggcgcgccgactagctagctaaggtaccgagctcgaattcattccgattaatcgtggcctcttgctcttcaggatgaagagctatgtttaaacgtgcaagcgctactagacaattcagtacattaaaaacgtccgcaatgtgttattaagttgtctaagcgtcaatttgtttacaccacaatatatcctgcca

SEQ ID NO: 50 - DNA, 21169 bp, Artificial sequence
  PHP95499
gtttacccgccaatatatcctgtcaaacactgcggccgcacttgaccgcggatggagccggagctgtggtgaggccatcgacgggaggtgggggagaacacagtctcagtgttctttgtgagtccgcaaggtttttagcttttctgtattaattaaggttgctgttggctgtagaatacggtcgtggaagagctgtatcggtagctactacgtaagctattatatactggaagtctggagctcgtcgatctccggtcgtcttcctccatttctcctcgtcttgctttgactgctgctaccatttgcttctgttttctgatgaagcatgccatgtcggccaccagtgtttgtgtggtttttgcagggaatggctttcaagtgctgtgattgaatggccctcgtcgtcctcggctgagctcacatggacgcgtcatgtgagtgagatatatgatcatatgatgagtggggttcgggtgagtgcgtacttgaagtaggatcccgctttcactcattcattcattggcctttaaaccgggaaattttcgcgaggagatggagggaagcaagcagggtgacgagtgcagagtgccgcgagcgctttgtcaaaaggcaccgccgtaggcaaaaaaatcaatggccctgactgactcgatggtagtactactgtagagactagagagggttgctccccatatcttcgtgtgacttttactccagcattgcatttccgtcattgagacgttaattaatagcagctttcgggacagatgactgtggccatgtttcgtcacggccgcttcgtgccagctgggggtactatagtactgtgattttgttagtaaaaactttcattaggccaccattgacgaccgggccttcgcttttgctgcgctaattaaccatttcccggcgaccgaagggaacatgaacatgccccgacacatgagggcatgaggactagtgttctccctgtcgttcgttgacttgactagtgatagtttaaacgctcttcaactggaagagcggttactaccggttcactagctagctgctaatcgagctagttaccctatgaggtgacatgaagcgctcacggttactatgacggttagcttcacgactgttggtggcagtagcgtacgacttagctatagttccggacttacctagctaataacttcgtatagcatacattatacgaagttatggttaccgaattcgagctcggtaccctggttcacaaactcaatacaacacacagtggagtagggtattacgctccggcggcccgaaccactctaaatccttgtgtcctcgtgtgctcttccaccattaatgactgtaattgcagggacacgaagagttgtagcgcttttgccaacaagatccgctatatgctagtagagtggaacctgcacagcaacaagcatccaataatctgagaataagaattatgtgtggtgatggttctcatctctgcaactcgccattttcgcgagagaaccaaatccaagttggtgaagatcatgatttgggctcatgggctggcatagtagctattacctttgcaattgtggttcgaatctatccgatattctccttttcagggagagctaatgcttatgcttattgggtattttggtttgacactgcttcacgcccaaaaaaaggcaactatgtctgagttggatatggcccaaaaaaaggcagctatgtctgagttggatatggaagtcttctttcgtttagggtgaagtaagaccaagctcatgagcttattatcttaggtcggaacaaattagttgataggcatggcacatttatcaaattataatgattttaacagaaaagcaacacctctttttcagcagcaccagctttgcaagctgcaattgacactccaagcatagtatttgctccaaactcagcctgcatttcgcacaatatcatatctatttccatttggataaaatatattttccagaaatatgggaacagaatcaagatacagaaaaaagttgtggtagtagtggtaagtggaaacacaagtacagtgaaaagatagcattatttctgaacagtcaaattaaccgaaataagtagtatcacatactgcccctaaattgactacacccaatgtaaagaattgcttgagcatattgagccatcagttgtttgtttgtgtaacggatttgacaatgcagagttcaggagcaaaaaaccgcaaaggagagaaagagggaaaggatctcctagtatcccaccttgtggcgcgccctgtcaagtgcatgatggcctggtcgatctgcgtctgctgctgcggttccatcccaacgagtgcctccgacaccttgtcgttgatcacccgcaccgcgtaggcgacccccctggcgaggaacttccgcctctcggaggccccggccgcgtcggcggcggcgccctcgagcgcgcccacgctagccgtagatgctcggtgcacggccttgttggtgtgcaactcgacctcaacggccggtgcgctacgcccgtcaaggatctggcgcgcccgcaccctcgtgatcacggtgggcgcctcccgcctcatgtggccgacgatgaaaagcgccgggttaggggccttggcgcgcaccgccgtattcagggcctcctcgctcttgcgcgagagcaggtgcttccccaggtactcctgcactgacaaggctgccacagcggtggaatttgtcctcacgacttcgccacgtcgtcctcacctccctggcttcccacgactccgccgtatcgaggtgctcggtgggtcgtcttaatccgaagtccgaactaggaagacgagacagagaggtctgaggaatgggcctcgtttgatgttgagctgaattatttttccagcataagcccaggtcttggtccatgaacaaaattactagaaacccagcccagtactacgatctaaaagagggactgccactggatagctctctctagcattctccacgctccaatacagcggcgtcgtgtctatccgggtctatccgcgaacacgtgagaactctccagaaactgctttctcctccacttcatctctctcgctttccctctataaaaagaccccttctaggaattgagggagacagcaagcaccaagcagcgatccgaagctcaatcaattcactcaaacctcttccccaaatcttcgattagatcttcgttgacaagaagactagaaccgaacctgacatgtccaacctgctcacggttcaccagaaccttccggctcttccagtggacgcgacgtccgatgaagtcaggaagaacctcatggacatgttccgcgacaggcaagcgttcagcgagcacacctggaagatgctgctctccgtctgccgctcctgggctgcatggtgcaagctgaacaacaggaagtggttccccgctgagcccgaggacgtgagggattaccttctgtacctgcaagcgcgaggtttgtttctgcttctacctttgatatatatataataattatcattaattagtagtaatataatatttcaaatatttttttcaaaataaaagaatgtagtatatagcaattgcttttctgtagtttataagtgtgtatattttaatttataacttttctaatatatgaccaaaacatggtgatgcctaggtctggcagtgaagaccatccagcaacaccttggacaactgaacatgcttcacaggcgctccggcctcccgcgccccagcgactcgaacgccgtgagcctcgtcatgcgccgcatcaggaaggaaaacgtcgatgccggcgaaagggcaaagcaggccctcgcgttcgagaggaccgatttcgaccaggtccgcagcctgatggagaacagcgacaggtgccaggacattaggaacctggcgttcctcggaattgcatacaacacgctcctcaggatcgcggaaattgcccgcattcgcgtgaaggacattagccgcaccgacggcggcaggatgcttatccacattggcaggaccaagacgctcgtttccaccgcaggcgtcgaaaaggccctcagcctcggagtgaccaagctcgtcgaacgctggatctccgtgtccggcgtcgcggacgacccaaacaactacctcttctgccgcgtccgcaagaacggggtggctgcccctagcgccaccagccaactcagcacgagggccttggaaggtattttcgaggccacccaccgcctgatctacggcgcgaaggatgacagcggtcaacgctacctcgcatggtccgggcactccgcccgcgttggagctgctagggacatggcccgcgccggtgtttccatccccgaaatcatgcaggcgggtggatggacgaacgtgaacattgtcatgaactacattcgcaaccttgacagcgagacgggcgcaatggttcgcctcctggaagatggtgactgagctagacccagctttcttgtacaaagtggccgttaacggatgcagacttgtccatcttctggattggccaacttaattaatgtatgaaataaaaggatgcacacatagtgacatgctaatcactataatgtgggcatcaaagttgtgtgttatgtgtaattactagttatctgaataaaagagaaagagatcatccatatttcttatcctaaatgaatgtcacgtgtctttataattctttgatgaaccagatgcatttcattaaccaaatccatatacatataaatattaatcatatataattaatatcaattgggttagcaaaacaaatctagtctaggtgtgttttgcgaattgcggcaaggttgcgcccgccccagcttggtcagccgctccgggcttagaaggccgatctcgcgggcacccagctttcttctacaaagtggccgtttacggatcggctagaatgtcccgcaccggcttaccgatttgcacctcgctaccctgggttcgaccgaagctgaccgatgcttgcgcccgctcgcgaggccggccaagcttgatatcgaattcctgcagcccatccctcagccgcctttcactatcttttttgcccgagtcattgtcatgtgaaccttggcatgtataatcggtgaattgcgtcgattttcctcttataggtgggccaatgaatccgtgtgatcgcgtctgattggctagagatatgtttcttccttgttggatgtattttcatacataatcatatgcatacaaatatttcattacactttatagaaatggtcagtaataaaccctatcactatgtctggtgtttcattttatttgcttttaaacgaaaattgacttcctgattcaatatttaaggatcgtcaacggtgtgcagttactaaattctggtttgtaggaactatagtaaactattcaagtcttcacttattgtgcactcacctctcgccacatcaccacagatgttattcacgtcttaaatttgaactacacatcatattgacacaatattttttttaaataagcgattaaaacctagcctctatgtcaacaatggtgtacataaccagcgaagtttagggagtaaaaaacatcgccttacacaaagttcgctttaaaaaataaagagtaaattttactttggaccacccttcaaccaatgtttcactttagaacgagtaattttattattgtcactttggaccaccctcaaatcttttttccatctacatccaatttatcatgtcaaagaaatggtctacatacagctaaggagatttatcgacgaatagtagctagcatactcgaggtcattcatatgcttgagaagagagtcgggatagtccaaaataaaacaaaggtaagattacctggtcaaaagtgaaaacatcagttaaaaggtggtataaagtaaaatatcggtaataaaaggtggcccaaagtgaaatttactcttttctactattataaaaattgaggatgtttttgtcggtactttgatacgtcatttttgtatgaattggtttttaagtttattcgcttttggaaatgcatatctgtatttgagtcgggttttaagttcgtttgcttttgtaaatacagagggatttgtataagaaatatctttaaaaaaacccatatgctaatttgacataatttttgagaaaaatatatattcaggcgaattctcacaatgaacaataataagattaaaatagctttcccccgttgcagcgcatgggtattttttctagtaaaaataaaagataaacttagactcaaaacatttacaaaaacaacccctaaagttcctaaagcccaaagtgctatccacgatccatagcaagcccagcccaacccaacccaacccaacccaccccagtccagccaactggacaatagtctccacacccccccactatcaccgtgagttgtccgcacgcaccgcacgtctcgcagccaaaaaaaaaaaaagaaagaaaaaaaagaaaaagaaaaaacagcaggtgggtccgggtcgtgggggccggaaacgcgaggaggatcgcgagccagcgacgaggccggccctccctccgcttccaaagaaacgccccccatcgccactatatacatacccccccctctcctcccatccccccaaccctaccaccaccaccaccaccacctccacctcctcccccctcgctgccggacgacgagctcctcccccctccccctccgccgccgccgcgccggtaaccaccccgcccctctcctctttctttctccgttttttttttccgtcacggtctcgatctttggccttggtagtttgggtgggcgagaggcggcttcgtgcgcgcccagatcggtgcgcgggaggggcgggatctcgcggctggggctctcgccggcgtggatcaggcccggatctcgcggggaatggggctctcggatgtagatctgcgatccgccgttgttgggggagatgatggggggtttaaaatttccgccatgctaaacaagatcaggaagaggggaaaagggcactatggtttatatttttatatatttctgctgcttcgtcaggcttagatgtgctagatctttctttcttctttttgtgggtagaatttgaatccctcagcattgttcatcggtagtttttcttttcatgatttgtgacaaatgcagcctcgtgcggagcttttttgtaggtagaaggatccgcccatggcggccaatgcgggcggcggtggagcgggaggaggcagcggcagcggcagcgtggctgcgccggcggtgtgccgccccagcggctcgcggtggacgccgacgccggagcagatcaggatgctgaaggagctctactacggctgcggcatccggtcgcccagctcggagcagatccagcgcatcaccgccatgctgcggcagcacggcaagatcgagggcaagaacgtcttctactggttccagaaccacaaggcccgcgagcgccagaagcgccgcctcaccagcctcgacgtcaacgtgcccgccgccggcgcggccgacgccaccaccagccaactcggcgtcctctcgctgtcgtcgccgccgccttcaggcgcggcgcctccctcgcccaccctcggcttctacgccgccggcaatggcggcggatcggctgtgctgctggacacgagttccgactggggcagcagcggcgctgctatggccaccgagacatgcttcctgcaggactacatgggcgtgacggacacgggcagctcgtcgcagtggccacgcttctcgtcgtcggacacgataatggcggcggccgcggcgcgggcggcgacgacgcgggcgcccgagacgctccctctcttcccgacctgcggcgacgacggcggcagcggtagcagcagctacttgccgttctggggtgccgcgtccacaactgccggcgccacttcttccgttgcgatccaacagcaacaccagctgcaggagcagtacagcttttacagcaacagcaacagcacccagctggccggcaccggcaaccaagacgtatcggcaacagcagcagcagccgccgccctggagctgagcctcagctcatggtgctccccttaccctgctgcagggagtatgtgagagcaacgcgagctgccactgctcttcactgatgtctctggaatggaaggaggaggaagtgagaacagatcattcgacaaagcagcattagtccgttgatcggtggaagaccactcgtcagtgttgagttgaatgtttgatcaataaaatacggcaatgctgtaagggttgttttttatgccattgataatacactgtactgttcagttgttgaactctatttcttagccatgccaagtgcttttcttattttgaataacattacagcaaaaagttgaaagacaaaaaaaaaaacccccgaacagagtgctttgggtcccaagcttctttagactgtgttcggcgttccccctaaatttctccccctatatctcactcacttgtcacatcagcgttctctttccccctatatctccacgctctacagcagttccacctatatcaaacctctataccccaccacaacaatattatatactttcatcttcaactaactcatgtaccttccaatttttttctactaataattatttacgtgcacagaaacttagcaaggagagagagagcgggaatttaaatgctcggcgttaggcttttagtccgctaggtggctagaccgaggttaggacgctagttcactaggggcctagtggtgttttaagacgtcacggtcaccacgcgtggaccgaagcttgcatgcctgcagtgcagcgtgacccggtcgtgcccctctctagagataatgagcattgcatgtctaagttataaaaaattaccacatattttttttgtcacacttgtttgaagtgcagtttatctatctttatacatatatttaaactttactctacgaataatataatctatagtactacaataatatcagtgttttagagaatcatataaatgaacagttagacatggtctaaaggacaattgagtattttgacaacaggactctacagttttatctttttagtgtgcatgtgttctcctttttttttgcaaatagcttcacctatataatacttcatccattttattagtacatccatttagggtttagggttaatggtttttatagactaatttttttagtacatctattttattctattttagcctctaaattaagaaaactaaaactctattttagtttttttatttaataatttagatataaaatagaataaaataaagtgactaaaaattaaacaaataccctttaagaaattaaaaaaactaaggaaacatttttcttgtttcgagtagataatgccagcctgttaaacgccgtcgacgagtctaacggacaccaaccagcgaaccagcagcgtcgcgtcgggccaagcgaagcagacggcacggcatctctgtcgctgcctctggacccctctcgagagttccgctccaccgttggacttgctccgctgtcggcatccagaaattgcgtggcggagcggcagacgtgagccggcacggcaggcggcctcctcctcctctcacggcaccggcagctacgggggattcctttcccaccgctccttcgcacgtaagcgcttacgcaccgaacaacgtaagcgcttacgcaccgaacaacgtaagcgcttacgctttcccttcctcgcccgccgtaataaatagacaccccctccacaccctctttccccaacctcgtgttgttcggagcgcacacacacacaaccagatctcccccaaatccacccgtcggcacctccgcttcaaggtacgccgctcgtcctcccccccccccctctctaccttctctagatcggcgttccggtccatgcatggttagggcccggtagttctacttctgttcatgtttgtgttagatccgtgtttgtgttagatccgtgctgctagcgttcgtacacggatgcgacctgtacgtcagacacgttctgattgctaacttgccagtgtttctctttggggaatcctgggatggctctagccgttccgcagacgggatcgatttcatgattttttttgtttcgttgcatagggtttggtttgcccttttcctttatttcaatatatgccgtgcacttgtttgtcgggtcatcttttcatgcttttttttgtcttggttgtgatgatgtggtctggttgggcggtcgttctagatcggagtagaattctgtttcaaactacctggtggatttattaattttggatctgtatgtgtgtgccatacatattcatagttacgaattgaagatgatggatggaaatatcgatctaggataggtatacatgttgatgcgggttttactgatgcatatacagagatgctttttgttcgcttggttgtgatgatgtggtgtggttgggcggtcgttcattcgttctagatcggagtagaatactgtttcaaactacctggtgtatttattaattttggaactgtatgtgtgtgtcatacatcttcatagttacgagtttaagatggatggaaatatcgatctaggataggtatacatgttgatgtgggttttactgatgcatatacatgatggcatatgcagcatctattcatatgctctaaccttgagtacctatctattataataaacaagtatgttttataattattttgatcttgatatacttggatgatggcatatgcagcagctatatgtggatttttttagccctgccttcatacgctatttatttgcttggtactgtttcttttgtcgatgctcaccctgttgtttggtgttacttctgcaggtcgactttaacttagcctaggatccatggccactgtgaacaactggctcgctttctccctctccccgcaggagctgccgccctcccagacgacggactccacactcatctcggccgccaccgccgaccatgtctccggcgatgtctgcttcaacatcccccaagattggagcatgaggggatcagagctttcggcgctcgtcgcggagccgaagctggaggacttcctcggcggcatctccttctccgagcagcatcacaaggccaactgcaacatgatacccagcactagcagcacagtttgctacgcgagctcaggtgctagcaccggctaccatcaccagctgtaccaccagcccaccagctcagcgctccacttcgcggactccgtaatggtggcttcctcggccggtgtccacgacggcggtgccatgctcagcgcggccgccgctaacggtgtcgctggcgctgccagtgccaacggcggcggcatcgggctgtccatgattaagaactggctgcggagccaaccggcgcccatgcagccgagggtggcggcggctgagggcgcgcaggggctctctttgtccatgaacatggcggggacgacccaaggcgctgctggcatgccacttctcgctggagagcgcgcacgggcgcccgagagtgtatcgacgtcagcacagggtggagccgtcgtcgtcacggcgccgaaggaggatagcggtggcagcggtgttgccggcgctctagtagccgtgagcacggacacgggtggcagcggcggcgcgtcggctgacaacacggcaaggaagacggtggacacgttcgggcagcgcacgtcgatttaccgtggcgtgacaaggcatagatggactgggagatatgaggcacatctttgggataacagttgcagaagggaagggcaaactcgtaagggtcgtcaagtctatttaggtggctatgataaagaggagaaagctgctagggcttatgatcttgctgctctgaagtactggggtgccacaacaacaacaaattttccagtgagtaactacgaaaaggagctcgaggacatgaagcacatgacaaggcaggagtttgtagcgtctctgagaaggaagagcagtggtttctccagaggtgcatccatttacaggggagtgactaggcatcaccaacatggaagatggcaagcacggattggacgagttgcagggaacaaggatctttacttgggcaccttcagcacccaggaggaggcagcggaggcgtacgacatcgcggcgatcaagttccgcggcctcaacgccgtcaccaacttcgacatgagccgctacgacgtgaagagcatcctggacagcagcgccctccccatcggcagcgccgccaagcgcctcaaggaggccgaggccgcagcgtccgcgcagcaccaccacgccggcgtggtgagctacgacgtcggccgcatcgcctcgcagctcggcgacggcggagccctggcggcggcgtacggcgcgcactaccacggcgccgcctggccgaccatcgcgttccagccgggcgccgccagcacaggcctgtaccacccgtacgcgcagcagccaatgcgcggcggcgggtggtgcaagcaggagcaggaccacgcggtgatcgcggccgcgcacagcctgcaggacctccaccacctgaacctgggcgcggccggcgcgcacgactttttctcggcagggcagcaggccgccgccgctgcgatgcacggcctgggtagcatcgacagtgcgtcgctcgagcacagcaccggctccaactccgtcgtctacaacggcggggtcggcgacagcaacggcgccagcgccgtcggcggcagtggcggtggctacatgatgccgatgagcgctgccggagcaaccactacatcggcaatggtgagccacgagcaggtgcatgcacgggcctacgacgaagccaagcaggctgctcagatggggtacgagagctacctggtgaacgcggagaacaatggtggcggaaggatgtctgcatgggggactgtcgtgtctgcagccgcggcggcagcagcaagcagcaacgacaacatggccgccgacgtcgggcatggcggcgcgcagctcttcagtgtctggaacgacacttaagcgtacctagtggtacctgacatcttatagtctgcaacctctcgtgtctgaattcctatctttatcaagtgttattgcttccacgactataggacagctttcgtcgaaagcttttgctcatgtgatctcgaaggattcatctagtctgatttttcgtgacttgtatcggttttattggattcatccaacatatatcaataaaaaatgagttgtgtttcctttcttcctagttcagttaaaattatttccctcctgcgcttgtgctgtaattgtctgtgtacctgttgtttgtgactgtgttagttcccttggatatgatttcgtatttgatatgtacatggagatagcttagcttcattattggagtatgaagttagtatgacatagtcactctcctggaaaattgacactgcaaaccatatttttattctgaaccacaaatcctagtcagtccgctggcatatgccgtccgtttgctgaatccagaacgtgggtttggagatgtacggctgagatgcctctatgcgaaggggatttcgtggtgaaacgagatgggagtagagcaacgcccgtggaagatgcttcaaacttccacacttttgagcaacgatcggcagtagtaaggtagacgatttcaagatcaaagcatatgaagataaacaacatcaacaacaaaatttgttggggttctatagagagaaacagagctacatacatacactgttttgtatctaccatctgagatgatgaaaagatgaaaaactaaagaatgccccggcgccaacgccaggacacgccgcgcgcgcgtcacccgagccatctcttgacccagccggcgctgtatatttacacacgttgcagcatcgatcaccacctgttcgatcgcgtcgccgtcaccggcgcgccgcgacttattgaactagtctagggcgcggctaacaacctagcttagattgccttgtctaaacccttaggctaacgcgccactctagacgtgcgcacgataacttcgtatagcatacattatacgaagttataacagcggaccgggttaccgaattcctgcccttaaggccaattgttcaagattcattcaacaattgaaacatctcccatgattaaatcagtataaggttgctatggtcttgcttgacaaagtttttttttgagggaatttcaactaaatttttgagtgaaactatcaaatactgattttaaaaaatttttataaaaggaagcgcagagataaaaggccatctatgctacaaaagtacccaaaaatgtaatcctaaagtatgaattgcattttttttttgtttggacgaaaggaaaggagtattaccacaagaatgatatcatcttcatatttagatcttttttgggtaaagcttgagattctctaaatatagagaaatcagaagaaaaaaaaaccgtgttttggtggttttgatttctagcctccacaataactttgacggcgtcgacaagtctaacggacaccaagcagcgaaccaccagcgccgagccaagcgaagcagacggccgagacgttgacaccttcggcgcggcatctctcgagagttccgctccggcgctccacctccaccgctggcggtttcttattccgttccgttccgcctcctgctctgctcctctccacaccacacggcacgaaaccgttacggcaccggcagcacccagcacgggagaggggattcctttcccaccgttccttccctttccgccccgccgctataaatagccagccccatccccagcttttttccccaatctcatctcctctctcctgttgttcggagcacacgcacaatccgatcgatccccaaatccccttcgtctctcctcgcgagcctcgtggatcccagcttcaaggtacggcgatcgatcatcccccctccttctctctaccttcttttctctagactacatcggatggcgatccatggttagggcctgctagtttcccttcctgttttgtcgatggctgcgaggcacaatagatctgatggcgttatgacggctaacttgtcatgttgttgcgatttatagtccctttaggagatcagtttaatttctcggatggttcgagatcggtggtccatggttagtaccctaagatccgcgctgttagggttcgtagatggaggcgacctgttctgattgttaacttgtcagtacctgggaaatcctgggatggttctagctcgtccgcagatgagatcgatttcatgatcctctgtatcttgtttcgttgcctaggttccgtctaatctatccgtggtatgatgtagatgttttgatcgtgctaactacgtcttgtaaagttaattgtcaggtcataatttttagcatgcctttttttttgtttggttttgtctaattgggctgtcgttctagatcagagtagaagactgttccaaactacctgctggatttattgaacttggatctgtatgtgtgtcacatatcttcataaattcatgattaagatggattgaaatatcttttatctttttggtatggatagttctatatgttggtgtggctttgttagatgtatacatgcttagatacatgaagcaacgtgctgctactgtttagtaattgctgttcatttgtctaataaacagataaggatatgtatttatgttgctgttggttttgctggtactttgttggatacaaatgcttcaatacagaaaacagcatgctgctacgatttaccatttatctaatcttatcatatgtctaatctaataaacaaacatgcttttaaattatcttcatatgcttggatgatggcatacacagcggctatgtgtggttttttaaatacccagcatcatgggcatgcatgacactgctttaatatgctttttatttgcttgagactgtttcttttgtttatactgaccctttagttcggtgactcttctgcaggtcgactttaacttagcctaggatccatggcccagtccaagcacggcctgaccaaggagatgaccatgaagtaccgcatggagggctgcgtggacggccacaagttcgtgatcaccggcgagggcatcggctaccccttcaagggcaagcaggccatcaacctgtgcgtggtggagggcggccccttgcccttcgccgaggacatcttgtccgccgccttcatgtacggcaaccgcgtgttcaccgagtacccccaggacatcgtcgactacttcaagaactcctgccccgccggctacacctgggaccgctccttcctgttcgaggacggcgccgtgtgcatctgcaacgccgacatcaccgtgagcgtggaggagaactgcatgtaccacgagtccaagttctacggcgtgaacttccccgccgacggccccgtgatgaagaagatgaccgacaactgggagccctcctgcgagaagatcatccccgtgcccaagcagggcatcttgaagggcgacgtgagcatgtacctgctgctgaaggacggtggccgcttgcgctgccagttcgacaccgtgtacaaggccaagtccgtgccccgcaagatgcccgactggcacttcatccagcacaagctgacccgcgaggaccgcagcgacgccaagaaccagaagtggcacctgaccgagcacgccatcgcctccggctccgccttgccctccggactcagatctcgatagggtaccaatggccagttaacagatccagctgctgctgttctagggttcacaagtctgcctatttgtcttccccaatggagctatggttgtctggtctggtccttggtcgtgtcccgtttcattgtgtactatttacctgtaatgtgtatccttaagtctggtttgatggtgtctgaaacgttttgctgtggtagagcagcatggaagaactataatgaataagtgatccctaatcattgtgtccaaattttgcttctgctatacccttttgtgctgtttcttatgttttgcttaaaaatttgatctgacaaacaaatttgtctaaattatgctcttgttctgactgtgtactgtacacatttgtattgctaccggtttggcacatagttttctctttgattgcagatcaaacccttctgattgcagattgcttggctatggctgatgtgctcactgttcttctttagcttgtatattgctgatggtggcttggctacggctgaaaaagttgctgctgcgccgacttggcaactgttgctccagtaatgctttgtcctctcttcctagccgccgacttggcacttggcagctgttgctcctgtaatgcgttgttatctcttatctcttgagatgtactatgattttgaggctgtttgacttgtgccagattgccagtgctgatgctatattatctcaggtttttatgctagtatatgttttactgtgtgctgcctgtgtcgagttacgtaatctattgaaccgctatgcgtgttgatgccctgttgttgcttgccagattgatgcccctgttgcttgcagcttgcaagctgtagtgaaatcctaaaattcgaaaccaaatctattctgaacttttgaagatctgtgatgtccggaagaaaagattcaaacagataaacgggactctccagaatctataaaataaatgatcgacaaacgctttgctttggtaggcttcctagttagttagcggaccgggatccgacggcgtcttcaccgccccgccgccgcccgagccggacttgtcgctgccgccgccgctgctcatcttgcgcgcttgtgtccctccctcagtccctgcgttcgcggatcgcgggcgggtgcgacccgtttggactccggccggtagccttcgtgccgacctcgctcggtccaccggtttgtcggggacccacatgtcagtgaaggtacgcgtccacgtccacagaccctactaccccagacgagtccaaatcgctgttccctcacactctcgtgtaccagcgcgcggcggaaagcacctttccaacaaccgccgacacgtcggtcccacgtcggcatgctccaccggtcagtgtttggcgtgtacggctcccggcgacgaacgagtgtggcctaagctttcctactcccatcccatctgagccacacatctctctcacgccacgcgcacaaaacagccaggctcccacgcgcatcaaccggctctccctttccgtgccactcgcccccaagccccaaaccctcgccgccgcctccgagacagccgccgccacctaggccatggccaccgccgccgccgcgtctaccgcgctcactggcgccactaccgctgcgcccaaggcgaggcgccgggcgcacctcctggccacccgccgcgccctcgccgcgcccatcaggtgctcagcggcgtcacccgccatgccgatggctcccccggccaccccgctccggccgtggggccccaccgagccccgcaagggtgctgacatcctcgtcgagtccctcgagcgctgcggcgtccgcgacgtcttcgcctaccccggcggcgcgtcgatggagatccaccaggcactcacccgctcccccgtcatcgccaaccacctcttccgccacgagcaaggggaggcctttgccgcctccggctacgcgcgctcctcgggccgcgtcggcgtctgcatcgccacctccggccccggcgccaccaacctagtctccgcgctcgccgacgcgctgctcgattccgtcccgatggtcgccatcacgggacaggtggcgcgacgcatgattggcaccgacgccttccaggagacgcccatcgtcgaggtcacgcgctccatcaccaagcacaactacctggtcctcgacgtcgacgacatcccccgcgtcgtgcaggaggctttcttcctcgcctcctctggtcgaccagggccggtgcttgtcgacatccccaaggacatccagcagcagatggcggtgcctgtctgggacaagcccatgagtctgcctgggtacattgcgcgccttcccaagccccctgcgactgagttgcttgagcaggtgctgcgtcttgttggtgaatcgcggcgccctgttctttatgtgggcggtggctgcgcagcatctggtgaggagttgcgacgctttgtggagctgactggaatcccggtcacaactactcttatgggcctcggcaacttccccagcgacgacccactgtctctgcgcatgctaggtatgcatgggacggtgtatgcaaattatgcagtggataaggccgatctgttgcttgcacttggtgtgcggtttgatgatcgcgtgacagggaagattgaggcttttgcaagcagggctaagattgtgcacgttgatattgatccggctgagattggcaagaacaagcagccacatgtgtccatctgtgcagatgttaagcttgctttgcagggcatgaatgctcttcttgaaggaagcacatcaaagaagagctttgactttggctcatggaacgatgagttggatcagcagaagagggaattcccccttgggtataaaacatctaatgaggagatccagccacaatatgctattcaggttcttgatgagctgacgaaaggcgaggccatcatcggcacaggtgttgggcagcaccagatgtgggcggcacagtactacacttacaagcggccaaggcagtggttgtcttcagctggtcttggggctatgggatttggtttgccggctgctgctggtgcttctgtggcaaacccaggtgtcactgttgttgacatcgatggagatggtagctttctcatgaacgttcaggagctagctatgatccgaattgagaacctcccagtgaaggtctttgtgctaaacaaccagcacctggggatggtggtgcagttggaggacaggttctataaggccaacagagcgcacacatacttgggaaacccagagaatgaaagtgagatatatccagatttcgtgacgatcgccaaagggttcaacattccagccgtccgtgtgacaaagaagaacgaagtccgcgcagcgataaagaagatgctcgagactccagggccgtacctcttggatataatcgtcccacaccaggagcatgtgttgcctatgatccctagtggtggggctttcaaggatatgatcctggatggtgatggcaggactgtgtactgacttcgaataggtacccggggatcctctagtgccgtgggtcgtttaagctgccgctgtacctgtgtcgtctggtgccttctggtgtacctgggaggttgtcgtctatcaagtatctgtggttggtgtcatgagtcagtgagtcccaatactgttcgtgtcctgtgtgcattatacccaaaactgttatgggcaaatcatgaataagcttgatgttcgaacttaaaagtctctgctcaatatggtattatggttgtttttgttcgtctcctaatatttgcctgggatcaaattttattggctggtgttcatttgacctccatgttcttgctaggctccattttttactctacagccataatatgtttgattgtttggtttgttctttgttgtacacctggttctgtcgagcttagttttcgacactggcttacagcttaacatgttgctattttattgggttctgattgctattttattgggttctgattgctagtttttgctgaatccaaaaaccatgttatttatttaagcgatccaggttattattatgatggtggctaagtttttttttttccaagggtaaattttctggattctccagtgtttctgtggccgaattcaatcactagagtcgacctgcaaagcttcggtccgggcctagaaggcccgcgccacttacgcttgattccgatgacttcgtaggttcctagctcaagccgctcgtgtccaagcgtcacttacgattagctaatgattacggcatctaggaccgactagctagctagctaagagctcggtaccgagctcgaattcattccgattaatcgtggcctcttgctcttcaggatgaagagctatgtttaaacgtgcaagcgctactagacaattcagtacattaaaaacgtccgcaatgtgttattaagttgtctaagcgtcaatttgtttacaccacaatatatcctgcca

SEQ ID NO: 51 - DNA, 20416 bp, Artificial sequence
  PHP95502
gtttacccgccaatatatcctgtcaaacactgcggccgcacttgaccgcggatggagccggagctgtggtgaggccatcgacgggaggtgggggagaacacagtctcagtgttctttgtgagtccgcaaggtttttagcttttctgtattaattaaggttgctgttggctgtagaatacggtcgtggaagagctgtatcggtagctactacgtaagctattatatactggaagtctggagctcgtcgatctccggtcgtcttcctccatttctcctcgtcttgctttgactgctgctaccatttgcttctgttttctgatgaagcatgccatgtcggccaccagtgtttgtgtggtttttgcagggaatggctttcaagtgctgtgattgaatggccctcgtcgtcctcggctgagctcacatggacgcgtcatgtgagtgagatatatgatcatatgatgagtggggttcgggtgagtgcgtacttgaagtaggatcccgctttcactcattcattcattggcctttaaaccgggaaattttcgcgaggagatggagggaagcaagcagggtgacgagtgcagagtgccgcgagcgctttgtcaaaaggcaccgccgtaggcaaaaaaatcaatggccctgactgactcgatggtagtactactgtagagactagagagggttgctccccatatcttcgtgtgacttttactccagcattgcatttccgtcattgagacgttaattaatagcagctttcgggacagatgactgtggccatgtttcgtcacggccgcttcgtgccagctgggggtactatagtactgtgattttgttagtaaaaactttcattaggccaccattgacgaccgggccttcgcttttgctgcgctaattaaccatttcccggcgaccgaagggaacatgaacatgccccgacacatgagggcatgaggactagtgttctccctgtcgttcgttgacttgactagtgatagtttaaacgctcttcaactggaagagcggttactaccggttcactagctagctgctaatcgagctagttaccctatgaggtgacatgaagcgctcacggttactatgacggttagcttcacgactgttggtggcagtagcgtacgacttagctatagttccggacttacctagctaataacttcgtatagcatacattatacgaagttatggttaccgagctccaccttgctagttggatattacctcttctcttcaaagtatccttgaacgctcaccggttatcaaatctctacactatagctctgtagtcttgctagatagttagttctttagctctctctagaggttcacaaactcaatacaacacacagtggagtagggtattacgctccggcggcccgaaccactctaaatccttgtgtcctcgtgtgctcttccaccattaatgactgtaattgcagggacacgaagagttgtagcgcttttgccaacaagatccgctatatgctagtagagtggaacctgcacagcaacaagcatccaataatctgagaataagaattatgtgtggtgatggttctcatctctgcaactcgccattttcgcgagagaaccaaatccaagttggtgaagatcatgatttgggctcatgggctggcatagtagctattacctttgcaattgtggttcgaatctatccgatattctccttttcagggagagctaatgcttatgcttattgggtattttggtttgacactgcttcacgcccaaaaaaaggcaactatgtctgagttggatatggcccaaaaaaaggcagctatgtctgagttggatatggaagtcttctttcgtttagggtgaagtaagaccaagctcatgagcttattatcttaggtcggaacaaattagttgataggcatggcacatttatcaaattataatgattttaacagaaaagcaacacctctttttcagcagcaccagctttgcaagctgcaattgacactccaagcatagtatttgctccaaactcagcctgcatttcgcacaatatcatatctatttccatttggataaaatatattttccagaaatatgggaacagaatcaagatacagaaaaaagttgtggtagtagtggtaagtggaaacacaagtacagtgaaaagatagcattatttctgaacagtcaaattaaccgaaataagtagtatcacatactgcccctaaattgactacacccaatgtaaagaattgcttgagcatattgagccatcagttgtttgtttgtgtaacggatttgacaatgcagagttcaggagcaaaaaaccgcaaaggagagaaagagggaaaggatctcctagtatcccaccttgtggcgcgccctgtcaagtgcatgatggcctggtcgatctgcgtctgctgctgcggttccatcccaacgagtgcctccgacaccttgtcgttgatcacccgcaccgcgtaggcgacccccctggcgaggaacttccgcctctcggaggccccggccgcgtcggcggcggcgccctcgagcgcgcccacgctagccgtagatgctcggtgcacggccttgttggtgtgcaactcgacctcaacggccggtgcgctacgcccgtcaaggatctggcgcgcccgcaccctcgtgatcacggtgggcgcctcccgcctcatgtggccgacgatgaaaagcgccgggttaggggccttggcgcgcaccgccgtattcagggcctcctcgctcttgcgcgagagcaggtgcttccccaggtactcctgcactgacaaggctgccacagcggtggaatttgtcctcacgacttcgccacgtcgtcctcacctccctggcttcccacgactccgccgtatcgaggtgctcggtgggtcgtcttaatccgaagtccgaactaggaagacgagacagagaggtctgaggaatgggcctcgtttgatgttgagctgaattatttttccagcataagcccaggtcttggtccatgaacaaaattactagaaacccagcccagtactacgatctaaaagagggactgccactggatagctctctctagcattctccacgctccaatacagcggcgtcgtgtctatccgggtctatccgcgaacacgtgagaactctccagaaactgctttctcctccacttcatctctctcgctttccctctataaaaagaccccttctaggaattgagggagacagcaagcaccaagcagcgatccgaagctcaatcaattcactcaaacctcttccccaaatcttcgattagatcttcgttgacaagaagactagaaccgaacctgacatgtccaacctgctcacggttcaccagaaccttccggctcttccagtggacgcgacgtccgatgaagtcaggaagaacctcatggacatgttccgcgacaggcaagcgttcagcgagcacacctggaagatgctgctctccgtctgccgctcctgggctgcatggtgcaagctgaacaacaggaagtggttccccgctgagcccgaggacgtgagggattaccttctgtacctgcaagcgcgaggtttgtttctgcttctacctttgatatatatataataattatcattaattagtagtaatataatatttcaaatatttttttcaaaataaaagaatgtagtatatagcaattgcttttctgtagtttataagtgtgtatattttaatttataacttttctaatatatgaccaaaacatggtgatgcctaggtctggcagtgaagaccatccagcaacaccttggacaactgaacatgcttcacaggcgctccggcctcccgcgccccagcgactcgaacgccgtgagcctcgtcatgcgccgcatcaggaaggaaaacgtcgatgccggcgaaagggcaaagcaggccctcgcgttcgagaggaccgatttcgaccaggtccgcagcctgatggagaacagcgacaggtgccaggacattaggaacctggcgttcctcggaattgcatacaacacgctcctcaggatcgcggaaattgcccgcattcgcgtgaaggacattagccgcaccgacggcggcaggatgcttatccacattggcaggaccaagacgctcgtttccaccgcaggcgtcgaaaaggccctcagcctcggagtgaccaagctcgtcgaacgctggatctccgtgtccggcgtcgcggacgacccaaacaactacctcttctgccgcgtccgcaagaacggggtggctgcccctagcgccaccagccaactcagcacgagggccttggaaggtattttcgaggccacccaccgcctgatctacggcgcgaaggatgacagcggtcaacgctacctcgcatggtccgggcactccgcccgcgttggagctgctagggacatggcccgcgccggtgtttccatccccgaaatcatgcaggcgggtggatggacgaacgtgaacattgtcatgaactacattcgcaaccttgacagcgagacgggcgcaatggttcgcctcctggaagatggtgactgaggtacccaacctagacttgtccatcttctggattggccaacttaattaatgtatgaaataaaaggatgcacacatagtgacatgctaatcactataatgtgggcatcaaagttgtgtgttatgtgtaattactagttatctgaataaaagagaaagagatcatccatatttcttatcctaaatgaatgtcacgtgtctttataattctttgatgaaccagatgcatttcattaaccaaatccatatacatataaatattaatcatatataattaatatcaattgggttagcaaaacaaatctagtctaggtgtgttttgcgatccgatatcgatcaccttgctagttggatattacctcttctcttcaaagtatccttgaacgctcaccggttatcaaatctctacactatagctctgtagtcttgctagatagttagttctttagctctcgggccctggccgaagcttacactgatagtttaaactgaaggcgggaaacgacaatctgatcatgagcggagaattaagggagtcacgttatgacccccgccgatgacgcgggacaagccgttttacgtttggaactgacagaaccgcaacgattgaaggagccactcagccgcgggtttctggagtttaatgagctaagcacatacgtcagaaaccattattgcgcgttcaaaagtcgcctaaggtcactatcagctagcaaatatttcttgtcaaaaatgctccactgacgttccataaattcccctcggtatccaattagagtctcatattcactctcccggcggatctcgactctagaggatcgctcaggaaggccgctgagatagagccatggcggccaatgcgggcggcggtggagcgggaggaggcagcggcagcggcagcgtggctgcgccggcggtgtgccgccccagcggctcgcggtggacgccgacgccggagcagatcaggatgctgaaggagctctactacggctgcggcatccggtcgcccagctcggagcagatccagcgcatcaccgccatgctgcggcagcacggcaagatcgagggcaagaacgtcttctactggttccagaaccacaaggcccgcgagcgccagaagcgccgcctcaccagcctcgacgtcaacgtgcccgccgccggcgcggccgacgccaccaccagccaactcggcgtcctctcgctgtcgtcgccgccgccttcaggcgcggcgcctccctcgcccaccctcggcttctacgccgccggcaatggcggcggatcggctgtgctgctggacacgagttccgactggggcagcagcggcgctgctatggccaccgagacatgcttcctgcaggactacatgggcgtgacggacacgggcagctcgtcgcagtggccacgcttctcgtcgtcggacacgataatggcggcggccgcggcgcgggcggcgacgacgcgggcgcccgagacgctccctctcttcccgacctgcggcgacgacggcggcagcggtagcagcagctacttgccgttctggggtgccgcgtccacaactgccggcgccacttcttccgttgcgatccaacagcaacaccagctgcaggagcagtacagcttttacagcaacagcaacagcacccagctggccggcaccggcaaccaagacgtatcggcaacagcagcagcagccgccgccctggagctgagcctcagctcatggtgctccccttaccctgctgcagggagtatgtgagagcaacgcgagctgccactgctcttcactgatgtctctggaatggaaggaggaggaagtgagaacagatcattcgacaaagcagcattagtccgttgatcggtggaagaccactcgtcagtgttgagttgaatgtttgatcaataaaatacggcaatgctgtaagggttgttttttatgccattgataatacactgtactgttcagttgttgaactctatttcttagccatgccaagtgcttttcttattttgaataacattacagcaaaaagttgaaagacaaaaaaaaaaacccccgaacagagtgctttgggtcccaagcttctttagactgtgttcggcgttccccctaaatttctccccctatatctcactcacttgtcacatcagcgttctctttccccctatatctccacgctctacagcagttccacctatatcaaacctctataccccaccacaacaatattatatactttcatcttcaactaactcatgtaccttccaatttttttctactaataattatttacgtgcacagaaacttagcaaggagagagagagcgggaatttaaatgctcggcgttaggcttttagtccgctaggtggctagaccgaggttaggacgctagttcactaggggcctagtggtgttttaagacgtcacggtcacccggtccgggcctagaaggccagcttcaagtttgtacaaaaaagcaggctccggccagaatggcccggaccgaagcttgcatgcctgcagtgcagcgtgacccggtcgtgcccctctctagagataatgagcattgcatgtctaagttataaaaaattaccacatattttttttgtcacacttgtttgaagtgcagtttatctatctttatacatatatttaaactttactctacgaataatataatctatagtactacaataatatcagtgttttagagaatcatataaatgaacagttagacatggtctaaaggacaattgagtattttgacaacaggactctacagttttatctttttagtgtgcatgtgttctcctttttttttgcaaatagcttcacctatataatacttcatccattttattagtacatccatttagggtttagggttaatggtttttatagactaatttttttagtacatctattttattctattttagcctctaaattaagaaaactaaaactctattttagtttttttatttaataatttagatataaaatagaataaaataaagtgactaaaaattaaacaaataccctttaagaaattaaaaaaactaaggaaacatttttcttgtttcgagtagataatgccagcctgttaaacgccgtcgacgagtctaacggacaccaaccagcgaaccagcagcgtcgcgtcgggccaagcgaagcagacggcacggcatctctgtcgctgcctctggacccctctcgagagttccgctccaccgttggacttgctccgctgtcggcatccagaaattgcgtggcggagcggcagacgtgagccggcacggcaggcggcctcctcctcctctcacggcaccggcagctacgggggattcctttcccaccgctccttcgcacgtaagcgcttacgcaccgaacaacgtaagcgcttacgcaccgaacaacgtaagcgcttacgctttcccttcctcgcccgccgtaataaatagacaccccctccacaccctctttccccaacctcgtgttgttcggagcgcacacacacacaaccagatctcccccaaatccacccgtcggcacctccgcttcaaggtacgccgctcgtcctcccccccccccctctctaccttctctagatcggcgttccggtccatgcatggttagggcccggtagttctacttctgttcatgtttgtgttagatccgtgtttgtgttagatccgtgctgctagcgttcgtacacggatgcgacctgtacgtcagacacgttctgattgctaacttgccagtgtttctctttggggaatcctgggatggctctagccgttccgcagacgggatcgatttcatgattttttttgtttcgttgcatagggtttggtttgcccttttcctttatttcaatatatgccgtgcacttgtttgtcgggtcatcttttcatgcttttttttgtcttggttgtgatgatgtggtctggttgggcggtcgttctagatcggagtagaattctgtttcaaactacctggtggatttattaattttggatctgtatgtgtgtgccatacatattcatagttacgaattgaagatgatggatggaaatatcgatctaggataggtatacatgttgatgcgggttttactgatgcatatacagagatgctttttgttcgcttggttgtgatgatgtggtgtggttgggcggtcgttcattcgttctagatcggagtagaatactgtttcaaactacctggtgtatttattaattttggaactgtatgtgtgtgtcatacatcttcatagttacgagtttaagatggatggaaatatcgatctaggataggtatacatgttgatgtgggttttactgatgcatatacatgatggcatatgcagcatctattcatatgctctaaccttgagtacctatctattataataaacaagtatgttttataattattttgatcttgatatacttggatgatggcatatgcagcagctatatgtggatttttttagccctgccttcatacgctatttatttgcttggtactgtttcttttgtcgatgctcaccctgttgtttggtgttacttctgcaggtcgactttaacttagcctaggatccatggccactgtgaacaactggctcgctttctccctctccccgcaggagctgccgccctcccagacgacggactccacactcatctcggccgccaccgccgaccatgtctccggcgatgtctgcttcaacatcccccaagattggagcatgaggggatcagagctttcggcgctcgtcgcggagccgaagctggaggacttcctcggcggcatctccttctccgagcagcatcacaaggccaactgcaacatgatacccagcactagcagcacagtttgctacgcgagctcaggtgctagcaccggctaccatcaccagctgtaccaccagcccaccagctcagcgctccacttcgcggactccgtaatggtggcttcctcggccggtgtccacgacggcggtgccatgctcagcgcggccgccgctaacggtgtcgctggcgctgccagtgccaacggcggcggcatcgggctgtccatgattaagaactggctgcggagccaaccggcgcccatgcagccgagggtggcggcggctgagggcgcgcaggggctctctttgtccatgaacatggcggggacgacccaaggcgctgctggcatgccacttctcgctggagagcgcgcacgggcgcccgagagtgtatcgacgtcagcacagggtggagccgtcgtcgtcacggcgccgaaggaggatagcggtggcagcggtgttgccggcgctctagtagccgtgagcacggacacgggtggcagcggcggcgcgtcggctgacaacacggcaaggaagacggtggacacgttcgggcagcgcacgtcgatttaccgtggcgtgacaaggcatagatggactgggagatatgaggcacatctttgggataacagttgcagaagggaagggcaaactcgtaagggtcgtcaagtctatttaggtggctatgataaagaggagaaagctgctagggcttatgatcttgctgctctgaagtactggggtgccacaacaacaacaaattttccagtgagtaactacgaaaaggagctcgaggacatgaagcacatgacaaggcaggagtttgtagcgtctctgagaaggaagagcagtggtttctccagaggtgcatccatttacaggggagtgactaggcatcaccaacatggaagatggcaagcacggattggacgagttgcagggaacaaggatctttacttgggcaccttcagcacccaggaggaggcagcggaggcgtacgacatcgcggcgatcaagttccgcggcctcaacgccgtcaccaacttcgacatgagccgctacgacgtgaagagcatcctggacagcagcgccctccccatcggcagcgccgccaagcgcctcaaggaggccgaggccgcagcgtccgcgcagcaccaccacgccggcgtggtgagctacgacgtcggccgcatcgcctcgcagctcggcgacggcggagccctggcggcggcgtacggcgcgcactaccacggcgccgcctggccgaccatcgcgttccagccgggcgccgccagcacaggcctgtaccacccgtacgcgcagcagccaatgcgcggcggcgggtggtgcaagcaggagcaggaccacgcggtgatcgcggccgcgcacagcctgcaggacctccaccacctgaacctgggcgcggccggcgcgcacgactttttctcggcagggcagcaggccgccgccgctgcgatgcacggcctgggtagcatcgacagtgcgtcgctcgagcacagcaccggctccaactccgtcgtctacaacggcggggtcggcgacagcaacggcgccagcgccgtcggcggcagtggcggtggctacatgatgccgatgagcgctgccggagcaaccactacatcggcaatggtgagccacgagcaggtgcatgcacgggcctacgacgaagccaagcaggctgctcagatggggtacgagagctacctggtgaacgcggagaacaatggtggcggaaggatgtctgcatgggggactgtcgtgtctgcagccgcggcggcagcagcaagcagcaacgacaacatggccgccgacgtcgggcatggcggcgcgcagctcttcagtgtctggaacgacacttaagcgtacctagtggtacctgacatcttatagtctgcaacctctcgtgtctgaattcctatctttatcaagtgttattgcttccacgactataggacagctttcgtcgaaagcttttgctcatgtgatctcgaaggattcatctagtctgatttttcgtgacttgtatcggttttattggattcatccaacatatatcaataaaaaatgagttgtgtttcctttcttcctagttcagttaaaattatttccctcctgcgcttgtgctgtaattgtctgtgtacctgttgtttgtgactgtgttagttcccttggatatgatttcgtatttgatatgtacatggagatagcttagcttcattattggagtatgaagttagtatgacatagtcactctcctggaaaattgacactgcaaaccatatttttattctgaaccacaaatcctagtcagtccgctggcatatgccgtccgtttgctgaatccagaacgtgggtttggagatgtacggctgagatgcctctatgcgaaggggatttcgtggtgaaacgagatgggagtagagcaacgcccgtggaagatgcttcaaacttccacacttttgagcaacgatcggcagtagtaaggtagacgatttcaagatcaaagcatatgaagataaacaacatcaacaacaaaatttgttggggttctatagagagaaacagagctacatacatacactgttttgtatctaccatctgagatgatgaaaagatgaaaaactaaagaatgccccggcgccaacgccaggacacgccgcgcgcgcgtcacccgagccatctcttgacccagccggcgctgtatatttacacacgttgcagcatcgatcaccacctgttcgatcgcgtcgccgtcaccggcgcgccgcgacttattgaactagtctagggcgcggctaacaacctagcttagattgccttgtctaaacccttaggctaacgcgccactctagacgtgcgcacgataacttcgtatagcatacattatacgaagttataacagcggaccgggttaccgaattcctgcccttaaggccaattgttcaagattcattcaacaattgaaacatctcccatgattaaatcagtataaggttgctatggtcttgcttgacaaagtttttttttgagggaatttcaactaaatttttgagtgaaactatcaaatactgattttaaaaaatttttataaaaggaagcgcagagataaaaggccatctatgctacaaaagtacccaaaaatgtaatcctaaagtatgaattgcattttttttttgtttggacgaaaggaaaggagtattaccacaagaatgatatcatcttcatatttagatcttttttgggtaaagcttgagattctctaaatatagagaaatcagaagaaaaaaaaaccgtgttttggtggttttgatttctagcctccacaataactttgacggcgtcgacaagtctaacggacaccaagcagcgaaccaccagcgccgagccaagcgaagcagacggccgagacgttgacaccttcggcgcggcatctctcgagagttccgctccggcgctccacctccaccgctggcggtttcttattccgttccgttccgcctcctgctctgctcctctccacaccacacggcacgaaaccgttacggcaccggcagcacccagcacgggagaggggattcctttcccaccgttccttccctttccgccccgccgctataaatagccagccccatccccagcttttttccccaatctcatctcctctctcctgttgttcggagcacacgcacaatccgatcgatccccaaatccccttcgtctctcctcgcgagcctcgtggatcccagcttcaaggtacggcgatcgatcatcccccctccttctctctaccttcttttctctagactacatcggatggcgatccatggttagggcctgctagtttcccttcctgttttgtcgatggctgcgaggcacaatagatctgatggcgttatgacggctaacttgtcatgttgttgcgatttatagtccctttaggagatcagtttaatttctcggatggttcgagatcggtggtccatggttagtaccctaagatccgcgctgttagggttcgtagatggaggcgacctgttctgattgttaacttgtcagtacctgggaaatcctgggatggttctagctcgtccgcagatgagatcgatttcatgatcctctgtatcttgtttcgttgcctaggttccgtctaatctatccgtggtatgatgtagatgttttgatcgtgctaactacgtcttgtaaagttaattgtcaggtcataatttttagcatgcctttttttttgtttggttttgtctaattgggctgtcgttctagatcagagtagaagactgttccaaactacctgctggatttattgaacttggatctgtatgtgtgtcacatatcttcataaattcatgattaagatggattgaaatatcttttatctttttggtatggatagttctatatgttggtgtggctttgttagatgtatacatgcttagatacatgaagcaacgtgctgctactgtttagtaattgctgttcatttgtctaataaacagataaggatatgtatttatgttgctgttggttttgctggtactttgttggatacaaatgcttcaatacagaaaacagcatgctgctacgatttaccatttatctaatcttatcatatgtctaatctaataaacaaacatgcttttaaattatcttcatatgcttggatgatggcatacacagcggctatgtgtggttttttaaatacccagcatcatgggcatgcatgacactgctttaatatgctttttatttgcttgagactgtttcttttgtttatactgaccctttagttcggtgactcttctgcaggtcgactttaacttagcctaggatccatggcccagtccaagcacggcctgaccaaggagatgaccatgaagtaccgcatggagggctgcgtggacggccacaagttcgtgatcaccggcgagggcatcggctaccccttcaagggcaagcaggccatcaacctgtgcgtggtggagggcggccccttgcccttcgccgaggacatcttgtccgccgccttcatgtacggcaaccgcgtgttcaccgagtacccccaggacatcgtcgactacttcaagaactcctgccccgccggctacacctgggaccgctccttcctgttcgaggacggcgccgtgtgcatctgcaacgccgacatcaccgtgagcgtggaggagaactgcatgtaccacgagtccaagttctacggcgtgaacttccccgccgacggccccgtgatgaagaagatgaccgacaactgggagccctcctgcgagaagatcatccccgtgcccaagcagggcatcttgaagggcgacgtgagcatgtacctgctgctgaaggacggtggccgcttgcgctgccagttcgacaccgtgtacaaggccaagtccgtgccccgcaagatgcccgactggcacttcatccagcacaagctgacccgcgaggaccgcagcgacgccaagaaccagaagtggcacctgaccgagcacgccatcgcctccggctccgccttgccctccggactcagatctcgatagggtaccaatggccagttaacagatccagctgctgctgttctagggttcacaagtctgcctatttgtcttccccaatggagctatggttgtctggtctggtccttggtcgtgtcccgtttcattgtgtactatttacctgtaatgtgtatccttaagtctggtttgatggtgtctgaaacgttttgctgtggtagagcagcatggaagaactataatgaataagtgatccctaatcattgtgtccaaattttgcttctgctatacccttttgtgctgtttcttatgttttgcttaaaaatttgatctgacaaacaaatttgtctaaattatgctcttgttctgactgtgtactgtacacatttgtattgctaccggtttggcacatagttttctctttgattgcagatcaaacccttctgattgcagattgcttggctatggctgatgtgctcactgttcttctttagcttgtatattgctgatggtggcttggctacggctgaaaaagttgctgctgcgccgacttggcaactgttgctccagtaatgctttgtcctctcttcctagccgccgacttggcacttggcagctgttgctcctgtaatgcgttgttatctcttatctcttgagatgtactatgattttgaggctgtttgacttgtgccagattgccagtgctgatgctatattatctcaggtttttatgctagtatatgttttactgtgtgctgcctgtgtcgagttacgtaatctattgaaccgctatgcgtgttgatgccctgttgttgcttgccagattgatgcccctgttgcttgcagcttgcaagctgtagtgaaatcctaaaattcgaaaccaaatctattctgaacttttgaagatctgtgatgtccggaagaaaagattcaaacagataaacgggactctccagaatctataaaataaatgatcgacaaacgctttgctttggtaggcttcctagttagttagcggaccgaagcttcggtccgggcctagaaggccagcttcggccgcccctcggtaccctgggatctgcccttactttaacgcctctaaccaacacccctttatctttataaggaacaataaacagaatttgccccactgttctaaatcacctaataatatccccagctaaaaacaataaaggtttcctagaattaagacaagcatgactgttcctccaggagggtttggaacattgttgcagtcttgcagatacgggcgaagggtgagaaacagagcggagggctggaggtgacctcggtagtcgacgccggagttgagcttgacaacgacggggcggcccctgatggacttgaggaagtccgatggcgtcttcaccgtcccgccggcgcccgaggcgggcctgtcgctgccgccgccgccgctgctcatcttgcgcgctgtgcccccggcggtgtccctgtgttgcggatcgcgggtgggccaggtggatgcgagggcgacccgtttggactccggccggagccgccggatccctggtcggtgtcagtgccgtttactctgggccccacgtgtcagtaccgtctgtagatgacaacaacccgtcgtccacagtcatgtccaaaatatcctttcttcttttttttcgattcggatatctatcttccttttttttttccaaaaatcttcttgacgcaccagcgcgcacgtttgtggtaaacgccgacacgtcggtcccacgtcgatagaccccacccaccagtgagtagcgtgtacgtattcgggggtgacggacgtgtcgccgtcgtcttgctagtcccattcccatctgagccacacatctctgaacaaaaaaaaggagggaggcctccacgcacatccccctccgtgccacccgccccaaaccctcgcgccgcctccgagacagccgccgcaaccatggccaccgccgccgccgcgtctaccgcgctcactggcgccactaccgctgcgcccaaggcgaggcgccgggcgcacctcctggccacccgccgcgccctcgccgcgcccatcaggtgctcagcggcgtcacccgccatgccgatggctcccccggccaccccgctccggccgtggggccccaccgagccccgcaagggtgctgacatcctcgtcgagtccctcgagcgctgcggcgtccgcgacgtcttcgcctaccccggcggcgcgtcgatggagatccaccaggcactcacccgctcccccgtcatcgccaaccacctcttccgccacgagcaaggggaggcctttgccgcctccggctacgcgcgctcctcgggccgcgtcggcgtctgcatcgccacctccggccccggcgccaccaacctagtctccgcgctcgccgacgcgctgctcgattccgtcccgatggtcgccatcacgggacaggtggcgcgacgcatgattggcaccgacgccttccaggagacgcccatcgtcgaggtcacgcgctccatcaccaagcacaactacctggtcctcgacgtcgacgacatcccccgcgtcgtgcaggaggctttcttcctcgcctcctctggtcgaccagggccggtgcttgtcgacatccccaaggacatccagcagcagatggcggtgcctgtctgggacaagcccatgagtctgcctgggtacattgcgcgccttcccaagccccctgcgactgagttgcttgagcaggtgctgcgtcttgttggtgaatcgcggcgccctgttctttatgtgggcggtggctgcgcagcatctggtgaggagttgcgacgctttgtggagctgactggaatcccggtcacaactactcttatgggcctcggcaacttccccagcgacgacccactgtctctgcgcatgctaggtatgcatgggacggtgtatgcaaattatgcagtggataaggccgatctgttgcttgcacttggtgtgcggtttgatgatcgcgtgacagggaagattgaggcttttgcaagcagggctaagattgtgcacgttgatattgatccggctgagattggcaagaacaagcagccacatgtgtccatctgtgcagatgttaagcttgctttgcagggcatgaatgctcttcttgaaggaagcacatcaaagaagagctttgactttggctcatggaacgatgagttggatcagcagaagagggaattcccccttgggtataaaacatctaatgaggagatccagccacaatatgctattcaggttcttgatgagctgacgaaaggcgaggccatcatcggcacaggtgttgggcagcaccagatgtgggcggcacagtactacacttacaagcggccaaggcagtggttgtcttcagctggtcttggggctatgggatttggtttgccggctgctgctggtgcttctgtggcaaacccaggtgtcactgttgttgacatcgatggagatggtagctttctcatgaacgttcaggagctagctatgatccgaattgagaacctcccagtgaaggtctttgtgctaaacaaccagcacctggggatggtggtgcagttggaggacaggttctataaggccaacagagcgcacacatacttgggaaacccagagaatgaaagtgagatatatccagatttcgtgacgatcgccaaagggttcaacattccagccgtccgtgtgacaaagaagaacgaagtccgcgcagcgataaagaagatgctcgagactccagggccgtacctcttggatataatcgtcccacaccaggagcatgtgttgcctatgatccctagtggtggggctttcaaggatatgatcctggatggtgatggcaggactgtgtactgacttcgaataggtacccggggatcctctagtgccgtgggtcgtttaagctgccgctgtacctgtgtcgtctggtgccttctggtgtacctgggaggttgtcgtctatcaagtatctgtggttggtgtcatgagtcagtgagtcccaatactgttcgtgtcctgtgtgcattatacccaaaactgttatgggcaaatcatgaataagcttgatgttcgaacttaaaagtctctgctcaatatggtattatggttgtttttgttcgtctcctaatatttgcctgggatcaaattttattggctggtgttcatttgacctccatgttcttgctaggctccattttttactctacagccataatatgtttgattgtttggtttgttctttgttgtacacctggttctgtcgagcttagttttcgacactggcttacagcttaacatgttgctattttattgggttctgattgctattttattgggttctgattgctagtttttgctgaatccaaaaaccatgttatttatttaagcgatccaggttattattatgatggtggctaagtttttttttttccaagggtaaattttctggattctccagtgtttctgtggccgaattcaatcactagagtcgacctgcaaagcttcggtccgggcctagaaggcccgcgccacttacgcttgattccgatgacttcgtaggttcctagctcaagccgctcgtgtccaagcgtcacttacgattagctaatgattacggcatctaggaccgactagttcttatgtgcttctagtctccaaatgtggttgatagttattttgctctaagatcaacagtaatgaagtataaatcatcgttgtggtgtgctactcggttaattgagcattaacacacacaaacatgacgaggatggtataatctccaaaaatgtgtactttgttaggtgggaccctatagccttgattaatgtgctatgttaggcatgcctggaaacgtgtgacgcatatgttttgtgaacctgttgatattatatgtgcttttatattaccatattttattaaaatactaatatttattactagtaagatataacattctatctagcttaaaaactaaccataaatattccataataactagatttaccaaactaatatactaaatatacataataaatacaaaattaacaagacaataatcaatatttatgagcttaatatatttagacattatggttggtcgacgataatcatgctaacttttcgtaattgcttgattgaaatatgcttagaataatgcctctttgttctacatggcaaatagggaccattatggtgtaacaccctgggaaccacaaacaccccgaaatgctactaaactacacaactaaccttcatatataaaatttcgacagcatctcctttgaaaatttgcatagacgtggaagcaacagagtataaacagatctgcgtttaaacgtgcaagcgctactagacaattcagtacattaaaaacgtccgcaatgtgttattaagttgtctaagcgtcaatttgtttacaccacaatatatcctgcca

SEQ ID NO: 52 - DNA, 20423 bp, Artificial sequence
  PHP95503
gtttacccgccaatatatcctgtcaaacactgcggccgcacttgaccgcggatggagccggagctgtggtgaggccatcgacgggaggtgggggagaacacagtctcagtgttctttgtgagtccgcaaggtttttagcttttctgtattaattaaggttgctgttggctgtagaatacggtcgtggaagagctgtatcggtagctactacgtaagctattatatactggaagtctggagctcgtcgatctccggtcgtcttcctccatttctcctcgtcttgctttgactgctgctaccatttgcttctgttttctgatgaagcatgccatgtcggccaccagtgtttgtgtggtttttgcagggaatggctttcaagtgctgtgattgaatggccctcgtcgtcctcggctgagctcacatggacgcgtcatgtgagtgagatatatgatcatatgatgagtggggttcgggtgagtgcgtacttgaagtaggatcccgctttcactcattcattcattggcctttaaaccgggaaattttcgcgaggagatggagggaagcaagcagggtgacgagtgcagagtgccgcgagcgctttgtcaaaaggcaccgccgtaggcaaaaaaatcaatggccctgactgactcgatggtagtactactgtagagactagagagggttgctccccatatcttcgtgtgacttttactccagcattgcatttccgtcattgagacgttaattaatagcagctttcgggacagatgactgtggccatgtttcgtcacggccgcttcgtgccagctgggggtactatagtactgtgattttgttagtaaaaactttcattaggccaccattgacgaccgggccttcgcttttgctgcgctaattaaccatttcccggcgaccgaagggaacatgaacatgccccgacacatgagggcatgaggactagtgttctccctgtcgttcgttgacttgactagtgatagtttaaacgctcttcaactggaagagcggttactaccggttcactagctagctgctaatcgagctagttaccctatgaggtgacatgaagcgctcacggttactatgacggttagcttcacgactgttggtggcagtagcgtacgacttagctatagttccggacttacctagctaataacttcgtatagcatacattatacgaagttatggttaccgccctggccgaagcttacactgatagtttaaactgaaggcgggaaacgacaatctgatcatgagcggagaattaagggagtcacgttatgacccccgccgatgacgcgggacaagccgttttacgtttggaactgacagaaccgcaacgattgaaggagccactcagccgcgggtttctggagtttaatgagctaagcacatacgtcagaaaccattattgcgcgttcaaaagtcgcctaaggtcactatcagctagcaaatatttcttgtcaaaaatgctccactgacgttccataaattcccctcggtatccaattagagtctcatattcactctcccggcggatctcgactctagaggatcgctcaggaaggccgctgagatagagccatggcggccaatgcgggcggcggtggagcgggaggaggcagcggcagcggcagcgtggctgcgccggcggtgtgccgccccagcggctcgcggtggacgccgacgccggagcagatcaggatgctgaaggagctctactacggctgcggcatccggtcgcccagctcggagcagatccagcgcatcaccgccatgctgcggcagcacggcaagatcgagggcaagaacgtcttctactggttccagaaccacaaggcccgcgagcgccagaagcgccgcctcaccagcctcgacgtcaacgtgcccgccgccggcgcggccgacgccaccaccagccaactcggcgtcctctcgctgtcgtcgccgccgccttcaggcgcggcgcctccctcgcccaccctcggcttctacgccgccggcaatggcggcggatcggctgtgctgctggacacgagttccgactggggcagcagcggcgctgctatggccaccgagacatgcttcctgcaggactacatgggcgtgacggacacgggcagctcgtcgcagtggccacgcttctcgtcgtcggacacgataatggcggcggccgcggcgcgggcggcgacgacgcgggcgcccgagacgctccctctcttcccgacctgcggcgacgacggcggcagcggtagcagcagctacttgccgttctggggtgccgcgtccacaactgccggcgccacttcttccgttgcgatccaacagcaacaccagctgcaggagcagtacagcttttacagcaacagcaacagcacccagctggccggcaccggcaaccaagacgtatcggcaacagcagcagcagccgccgccctggagctgagcctcagctcatggtgctccccttaccctgctgcagggagtatgtgagagcaacgcgagctgccactgctcttcactgatgtctctggaatggaaggaggaggaagtgagaacagatcattcgacaaagcagcattagtccgttgatcggtggaagaccactcgtcagtgttgagttgaatgtttgatcaataaaatacggcaatgctgtaagggttgttttttatgccattgataatacactgtactgttcagttgttgaactctatttcttagccatgccaagtgcttttcttattttgaataacattacagcaaaaagttgaaagacaaaaaaaaaaacccccgaacagagtgctttgggtcccaagcttctttagactgtgttcggcgttccccctaaatttctccccctatatctcactcacttgtcacatcagcgttctctttccccctatatctccacgctctacagcagttccacctatatcaaacctctataccccaccacaacaatattatatactttcatcttcaactaactcatgtaccttccaatttttttctactaataattatttacgtgcacagaaacttagcaaggagagagagagcgggaatttaaatgctcggcgttaggcttttagtccgctaggtggctagaccgaggttaggacgctagttcactaggggcctagtggtgttttaagacgtcacggtcacccggtccgggcctagaaggccagcttcaagtttgtacaaaaaagcaggctccggccagaatggcccggaccgaagcttgcatgcctgcagtgcagcgtgacccggtcgtgcccctctctagagataatgagcattgcatgtctaagttataaaaaattaccacatattttttttgtcacacttgtttgaagtgcagtttatctatctttatacatatatttaaactttactctacgaataatataatctatagtactacaataatatcagtgttttagagaatcatataaatgaacagttagacatggtctaaaggacaattgagtattttgacaacaggactctacagttttatctttttagtgtgcatgtgttctcctttttttttgcaaatagcttcacctatataatacttcatccattttattagtacatccatttagggtttagggttaatggtttttatagactaatttttttagtacatctattttattctattttagcctctaaattaagaaaactaaaactctattttagtttttttatttaataatttagatataaaatagaataaaataaagtgactaaaaattaaacaaataccctttaagaaattaaaaaaactaaggaaacatttttcttgtttcgagtagataatgccagcctgttaaacgccgtcgacgagtctaacggacaccaaccagcgaaccagcagcgtcgcgtcgggccaagcgaagcagacggcacggcatctctgtcgctgcctctggacccctctcgagagttccgctccaccgttggacttgctccgctgtcggcatccagaaattgcgtggcggagcggcagacgtgagccggcacggcaggcggcctcctcctcctctcacggcaccggcagctacgggggattcctttcccaccgctccttcgcacgtaagcgcttacgcaccgaacaacgtaagcgcttacgcaccgaacaacgtaagcgcttacgctttcccttcctcgcccgccgtaataaatagacaccccctccacaccctctttccccaacctcgtgttgttcggagcgcacacacacacaaccagatctcccccaaatccacccgtcggcacctccgcttcaaggtacgccgctcgtcctcccccccccccctctctaccttctctagatcggcgttccggtccatgcatggttagggcccggtagttctacttctgttcatgtttgtgttagatccgtgtttgtgttagatccgtgctgctagcgttcgtacacggatgcgacctgtacgtcagacacgttctgattgctaacttgccagtgtttctctttggggaatcctgggatggctctagccgttccgcagacgggatcgatttcatgattttttttgtttcgttgcatagggtttggtttgcccttttcctttatttcaatatatgccgtgcacttgtttgtcgggtcatcttttcatgcttttttttgtcttggttgtgatgatgtggtctggttgggcggtcgttctagatcggagtagaattctgtttcaaactacctggtggatttattaattttggatctgtatgtgtgtgccatacatattcatagttacgaattgaagatgatggatggaaatatcgatctaggataggtatacatgttgatgcgggttttactgatgcatatacagagatgctttttgttcgcttggttgtgatgatgtggtgtggttgggcggtcgttcattcgttctagatcggagtagaatactgtttcaaactacctggtgtatttattaattttggaactgtatgtgtgtgtcatacatcttcatagttacgagtttaagatggatggaaatatcgatctaggataggtatacatgttgatgtgggttttactgatgcatatacatgatggcatatgcagcatctattcatatgctctaaccttgagtacctatctattataataaacaagtatgttttataattattttgatcttgatatacttggatgatggcatatgcagcagctatatgtggatttttttagccctgccttcatacgctatttatttgcttggtactgtttcttttgtcgatgctcaccctgttgtttggtgttacttctgcaggtcgactttaacttagcctaggatccatggccactgtgaacaactggctcgctttctccctctccccgcaggagctgccgccctcccagacgacggactccacactcatctcggccgccaccgccgaccatgtctccggcgatgtctgcttcaacatcccccaagattggagcatgaggggatcagagctttcggcgctcgtcgcggagccgaagctggaggacttcctcggcggcatctccttctccgagcagcatcacaaggccaactgcaacatgatacccagcactagcagcacagtttgctacgcgagctcaggtgctagcaccggctaccatcaccagctgtaccaccagcccaccagctcagcgctccacttcgcggactccgtaatggtggcttcctcggccggtgtccacgacggcggtgccatgctcagcgcggccgccgctaacggtgtcgctggcgctgccagtgccaacggcggcggcatcgggctgtccatgattaagaactggctgcggagccaaccggcgcccatgcagccgagggtggcggcggctgagggcgcgcaggggctctctttgtccatgaacatggcggggacgacccaaggcgctgctggcatgccacttctcgctggagagcgcgcacgggcgcccgagagtgtatcgacgtcagcacagggtggagccgtcgtcgtcacggcgccgaaggaggatagcggtggcagcggtgttgccggcgctctagtagccgtgagcacggacacgggtggcagcggcggcgcgtcggctgacaacacggcaaggaagacggtggacacgttcgggcagcgcacgtcgatttaccgtggcgtgacaaggcatagatggactgggagatatgaggcacatctttgggataacagttgcagaagggaagggcaaactcgtaagggtcgtcaagtctatttaggtggctatgataaagaggagaaagctgctagggcttatgatcttgctgctctgaagtactggggtgccacaacaacaacaaattttccagtgagtaactacgaaaaggagctcgaggacatgaagcacatgacaaggcaggagtttgtagcgtctctgagaaggaagagcagtggtttctccagaggtgcatccatttacaggggagtgactaggcatcaccaacatggaagatggcaagcacggattggacgagttgcagggaacaaggatctttacttgggcaccttcagcacccaggaggaggcagcggaggcgtacgacatcgcggcgatcaagttccgcggcctcaacgccgtcaccaacttcgacatgagccgctacgacgtgaagagcatcctggacagcagcgccctccccatcggcagcgccgccaagcgcctcaaggaggccgaggccgcagcgtccgcgcagcaccaccacgccggcgtggtgagctacgacgtcggccgcatcgcctcgcagctcggcgacggcggagccctggcggcggcgtacggcgcgcactaccacggcgccgcctggccgaccatcgcgttccagccgggcgccgccagcacaggcctgtaccacccgtacgcgcagcagccaatgcgcggcggcgggtggtgcaagcaggagcaggaccacgcggtgatcgcggccgcgcacagcctgcaggacctccaccacctgaacctgggcgcggccggcgcgcacgactttttctcggcagggcagcaggccgccgccgctgcgatgcacggcctgggtagcatcgacagtgcgtcgctcgagcacagcaccggctccaactccgtcgtctacaacggcggggtcggcgacagcaacggcgccagcgccgtcggcggcagtggcggtggctacatgatgccgatgagcgctgccggagcaaccactacatcggcaatggtgagccacgagcaggtgcatgcacgggcctacgacgaagccaagcaggctgctcagatggggtacgagagctacctggtgaacgcggagaacaatggtggcggaaggatgtctgcatgggggactgtcgtgtctgcagccgcggcggcagcagcaagcagcaacgacaacatggccgccgacgtcgggcatggcggcgcgcagctcttcagtgtctggaacgacacttaagcgtacctagtggtacctgacatcttatagtctgcaacctctcgtgtctgaattcctatctttatcaagtgttattgcttccacgactataggacagctttcgtcgaaagcttttgctcatgtgatctcgaaggattcatctagtctgatttttcgtgacttgtatcggttttattggattcatccaacatatatcaataaaaaatgagttgtgtttcctttcttcctagttcagttaaaattatttccctcctgcgcttgtgctgtaattgtctgtgtacctgttgtttgtgactgtgttagttcccttggatatgatttcgtatttgatatgtacatggagatagcttagcttcattattggagtatgaagttagtatgacatagtcactctcctggaaaattgacactgcaaaccatatttttattctgaaccacaaatcctagtcagtccgctggcatatgccgtccgtttgctgaatccagaacgtgggtttggagatgtacggctgagatgcctctatgcgaaggggatttcgtggtgaaacgagatgggagtagagcaacgcccgtggaagatgcttcaaacttccacacttttgagcaacgatcggcagtagtaaggtagacgatttcaagatcaaagcatatgaagataaacaacatcaacaacaaaatttgttggggttctatagagagaaacagagctacatacatacactgttttgtatctaccatctgagatgatgaaaagatgaaaaactaaagaatgccccggcgccaacgccaggacacgccgcgcgcgcgtcacccgagccatctcttgacccagccggcgctgtatatttacacacgttgcagcatcgatcaccacctgttcgatcgcgtcgccgtcaccggcgcgccgcgacttattgaactagtctagggcgcggctaacaacctagcttagattgccttgtctaaacccttaggctaacgcgccactctagaagagctccaccttgctagttggatattacctcttctcttcaaagtatccttgaacgctcaccggttatcaaatctctacactatagctctgtagtcttgctagatagttagttctttagctctctctagaggttcacaaactcaatacaacacacagtggagtagggtattacgctccggcggcccgaaccactctaaatccttgtgtcctcgtgtgctcttccaccattaatgactgtaattgcagggacacgaagagttgtagcgcttttgccaacaagatccgctatatgctagtagagtggaacctgcacagcaacaagcatccaataatctgagaataagaattatgtgtggtgatggttctcatctctgcaactcgccattttcgcgagagaaccaaatccaagttggtgaagatcatgatttgggctcatgggctggcatagtagctattacctttgcaattgtggttcgaatctatccgatattctccttttcagggagagctaatgcttatgcttattgggtattttggtttgacactgcttcacgcccaaaaaaaggcaactatgtctgagttggatatggcccaaaaaaaggcagctatgtctgagttggatatggaagtcttctttcgtttagggtgaagtaagaccaagctcatgagcttattatcttaggtcggaacaaattagttgataggcatggcacatttatcaaattataatgattttaacagaaaagcaacacctctttttcagcagcaccagctttgcaagctgcaattgacactccaagcatagtatttgctccaaactcagcctgcatttcgcacaatatcatatctatttccatttggataaaatatattttccagaaatatgggaacagaatcaagatacagaaaaaagttgtggtagtagtggtaagtggaaacacaagtacagtgaaaagatagcattatttctgaacagtcaaattaaccgaaataagtagtatcacatactgcccctaaattgactacacccaatgtaaagaattgcttgagcatattgagccatcagttgtttgtttgtgtaacggatttgacaatgcagagttcaggagcaaaaaaccgcaaaggagagaaagagggaaaggatctcctagtatcccaccttgtggcgcgccctgtcaagtgcatgatggcctggtcgatctgcgtctgctgctgcggttccatcccaacgagtgcctccgacaccttgtcgttgatcacccgcaccgcgtaggcgacccccctggcgaggaacttccgcctctcggaggccccggccgcgtcggcggcggcgccctcgagcgcgcccacgctagccgtagatgctcggtgcacggccttgttggtgtgcaactcgacctcaacggccggtgcgctacgcccgtcaaggatctggcgcgcccgcaccctcgtgatcacggtgggcgcctcccgcctcatgtggccgacgatgaaaagcgccgggttaggggccttggcgcgcaccgccgtattcagggcctcctcgctcttgcgcgagagcaggtgcttccccaggtactcctgcactgacaaggctgccacagcggtggaatttgtcctcacgacttcgccacgtcgtcctcacctccctggcttcccacgactccgccgtatcgaggtgctcggtgggtcgtcttaatccgaagtccgaactaggaagacgagacagagaggtctgaggaatgggcctcgtttgatgttgagctgaattatttttccagcataagcccaggtcttggtccatgaacaaaattactagaaacccagcccagtactacgatctaaaagagggactgccactggatagctctctctagcattctccacgctccaatacagcggcgtcgtgtctatccgggtctatccgcgaacacgtgagaactctccagaaactgctttctcctccacttcatctctctcgctttccctctataaaaagaccccttctaggaattgagggagacagcaagcaccaagcagcgatccgaagctcaatcaattcactcaaacctcttccccaaatcttcgattagatcttcgttgacaagaagactagaaccgaacctgacatgtccaacctgctcacggttcaccagaaccttccggctcttccagtggacgcgacgtccgatgaagtcaggaagaacctcatggacatgttccgcgacaggcaagcgttcagcgagcacacctggaagatgctgctctccgtctgccgctcctgggctgcatggtgcaagctgaacaacaggaagtggttccccgctgagcccgaggacgtgagggattaccttctgtacctgcaagcgcgaggtttgtttctgcttctacctttgatatatatataataattatcattaattagtagtaatataatatttcaaatatttttttcaaaataaaagaatgtagtatatagcaattgcttttctgtagtttataagtgtgtatattttaatttataacttttctaatatatgaccaaaacatggtgatgcctaggtctggcagtgaagaccatccagcaacaccttggacaactgaacatgcttcacaggcgctccggcctcccgcgccccagcgactcgaacgccgtgagcctcgtcatgcgccgcatcaggaaggaaaacgtcgatgccggcgaaagggcaaagcaggccctcgcgttcgagaggaccgatttcgaccaggtccgcagcctgatggagaacagcgacaggtgccaggacattaggaacctggcgttcctcggaattgcatacaacacgctcctcaggatcgcggaaattgcccgcattcgcgtgaaggacattagccgcaccgacggcggcaggatgcttatccacattggcaggaccaagacgctcgtttccaccgcaggcgtcgaaaaggccctcagcctcggagtgaccaagctcgtcgaacgctggatctccgtgtccggcgtcgcggacgacccaaacaactacctcttctgccgcgtccgcaagaacggggtggctgcccctagcgccaccagccaactcagcacgagggccttggaaggtattttcgaggccacccaccgcctgatctacggcgcgaaggatgacagcggtcaacgctacctcgcatggtccgggcactccgcccgcgttggagctgctagggacatggcccgcgccggtgtttccatccccgaaatcatgcaggcgggtggatggacgaacgtgaacattgtcatgaactacattcgcaaccttgacagcgagacgggcgcaatggttcgcctcctggaagatggtgactgaggtacccaacctagacttgtccatcttctggattggccaacttaattaatgtatgaaataaaaggatgcacacatagtgacatgctaatcactataatgtgggcatcaaagttgtgtgttatgtgtaattactagttatctgaataaaagagaaagagatcatccatatttcttatcctaaatgaatgtcacgtgtctttataattctttgatgaaccagatgcatttcattaaccaaatccatatacatataaatattaatcatatataattaatatcaattgggttagcaaaacaaatctagtctaggtgtgttttgcgatccgatatcgatcaccttgctagttggatattacctcttctcttcaaagtatccttgaacgctcaccggttatcaaatctctacactatagctctgtagtcttgctagatagttagttctttagctctcgggccctggccgaagcttataacttcgtatagcatacattatacgaagttataacagcggaccgggttaccgaattcctgcccttaaggccaattgttcaagattcattcaacaattgaaacatctcccatgattaaatcagtataaggttgctatggtcttgcttgacaaagtttttttttgagggaatttcaactaaatttttgagtgaaactatcaaatactgattttaaaaaatttttataaaaggaagcgcagagataaaaggccatctatgctacaaaagtacccaaaaatgtaatcctaaagtatgaattgcattttttttttgtttggacgaaaggaaaggagtattaccacaagaatgatatcatcttcatatttagatcttttttgggtaaagcttgagattctctaaatatagagaaatcagaagaaaaaaaaaccgtgttttggtggttttgatttctagcctccacaataactttgacggcgtcgacaagtctaacggacaccaagcagcgaaccaccagcgccgagccaagcgaagcagacggccgagacgttgacaccttcggcgcggcatctctcgagagttccgctccggcgctccacctccaccgctggcggtttcttattccgttccgttccgcctcctgctctgctcctctccacaccacacggcacgaaaccgttacggcaccggcagcacccagcacgggagaggggattcctttcccaccgttccttccctttccgccccgccgctataaatagccagccccatccccagcttttttccccaatctcatctcctctctcctgttgttcggagcacacgcacaatccgatcgatccccaaatccccttcgtctctcctcgcgagcctcgtggatcccagcttcaaggtacggcgatcgatcatcccccctccttctctctaccttcttttctctagactacatcggatggcgatccatggttagggcctgctagtttcccttcctgttttgtcgatggctgcgaggcacaatagatctgatggcgttatgacggctaacttgtcatgttgttgcgatttatagtccctttaggagatcagtttaatttctcggatggttcgagatcggtggtccatggttagtaccctaagatccgcgctgttagggttcgtagatggaggcgacctgttctgattgttaacttgtcagtacctgggaaatcctgggatggttctagctcgtccgcagatgagatcgatttcatgatcctctgtatcttgtttcgttgcctaggttccgtctaatctatccgtggtatgatgtagatgttttgatcgtgctaactacgtcttgtaaagttaattgtcaggtcataatttttagcatgcctttttttttgtttggttttgtctaattgggctgtcgttctagatcagagtagaagactgttccaaactacctgctggatttattgaacttggatctgtatgtgtgtcacatatcttcataaattcatgattaagatggattgaaatatcttttatctttttggtatggatagttctatatgttggtgtggctttgttagatgtatacatgcttagatacatgaagcaacgtgctgctactgtttagtaattgctgttcatttgtctaataaacagataaggatatgtatttatgttgctgttggttttgctggtactttgttggatacaaatgcttcaatacagaaaacagcatgctgctacgatttaccatttatctaatcttatcatatgtctaatctaataaacaaacatgcttttaaattatcttcatatgcttggatgatggcatacacagcggctatgtgtggttttttaaatacccagcatcatgggcatgcatgacactgctttaatatgctttttatttgcttgagactgtttcttttgtttatactgaccctttagttcggtgactcttctgcaggtcgactttaacttagcctaggatccatggcccagtccaagcacggcctgaccaaggagatgaccatgaagtaccgcatggagggctgcgtggacggccacaagttcgtgatcaccggcgagggcatcggctaccccttcaagggcaagcaggccatcaacctgtgcgtggtggagggcggccccttgcccttcgccgaggacatcttgtccgccgccttcatgtacggcaaccgcgtgttcaccgagtacccccaggacatcgtcgactacttcaagaactcctgccccgccggctacacctgggaccgctccttcctgttcgaggacggcgccgtgtgcatctgcaacgccgacatcaccgtgagcgtggaggagaactgcatgtaccacgagtccaagttctacggcgtgaacttccccgccgacggccccgtgatgaagaagatgaccgacaactgggagccctcctgcgagaagatcatccccgtgcccaagcagggcatcttgaagggcgacgtgagcatgtacctgctgctgaaggacggtggccgcttgcgctgccagttcgacaccgtgtacaaggccaagtccgtgccccgcaagatgcccgactggcacttcatccagcacaagctgacccgcgaggaccgcagcgacgccaagaaccagaagtggcacctgaccgagcacgccatcgcctccggctccgccttgccctccggactcagatctcgatagggtaccaatggccagttaacagatccagctgctgctgttctagggttcacaagtctgcctatttgtcttccccaatggagctatggttgtctggtctggtccttggtcgtgtcccgtttcattgtgtactatttacctgtaatgtgtatccttaagtctggtttgatggtgtctgaaacgttttgctgtggtagagcagcatggaagaactataatgaataagtgatccctaatcattgtgtccaaattttgcttctgctatacccttttgtgctgtttcttatgttttgcttaaaaatttgatctgacaaacaaatttgtctaaattatgctcttgttctgactgtgtactgtacacatttgtattgctaccggtttggcacatagttttctctttgattgcagatcaaacccttctgattgcagattgcttggctatggctgatgtgctcactgttcttctttagcttgtatattgctgatggtggcttggctacggctgaaaaagttgctgctgcgccgacttggcaactgttgctccagtaatgctttgtcctctcttcctagccgccgacttggcacttggcagctgttgctcctgtaatgcgttgttatctcttatctcttgagatgtactatgattttgaggctgtttgacttgtgccagattgccagtgctgatgctatattatctcaggtttttatgctagtatatgttttactgtgtgctgcctgtgtcgagttacgtaatctattgaaccgctatgcgtgttgatgccctgttgttgcttgccagattgatgcccctgttgcttgcagcttgcaagctgtagtgaaatcctaaaattcgaaaccaaatctattctgaacttttgaagatctgtgatgtccggaagaaaagattcaaacagataaacgggactctccagaatctataaaataaatgatcgacaaacgctttgctttggtaggcttcctagttagttagcggaccgaagcttcggtccgggcctagaaggccagcttcggccgcccctcggtaccctgggatctgcccttactttaacgcctctaaccaacacccctttatctttataaggaacaataaacagaatttgccccactgttctaaatcacctaataatatccccagctaaaaacaataaaggtttcctagaattaagacaagcatgactgttcctccaggagggtttggaacattgttgcagtcttgcagatacgggcgaagggtgagaaacagagcggagggctggaggtgacctcggtagtcgacgccggagttgagcttgacaacgacggggcggcccctgatggacttgaggaagtccgatggcgtcttcaccgtcccgccggcgcccgaggcgggcctgtcgctgccgccgccgccgctgctcatcttgcgcgctgtgcccccggcggtgtccctgtgttgcggatcgcgggtgggccaggtggatgcgagggcgacccgtttggactccggccggagccgccggatccctggtcggtgtcagtgccgtttactctgggccccacgtgtcagtaccgtctgtagatgacaacaacccgtcgtccacagtcatgtccaaaatatcctttcttcttttttttcgattcggatatctatcttccttttttttttccaaaaatcttcttgacgcaccagcgcgcacgtttgtggtaaacgccgacacgtcggtcccacgtcgatagaccccacccaccagtgagtagcgtgtacgtattcgggggtgacggacgtgtcgccgtcgtcttgctagtcccattcccatctgagccacacatctctgaacaaaaaaaaggagggaggcctccacgcacatccccctccgtgccacccgccccaaaccctcgcgccgcctccgagacagccgccgcaaccatggccaccgccgccgccgcgtctaccgcgctcactggcgccactaccgctgcgcccaaggcgaggcgccgggcgcacctcctggccacccgccgcgccctcgccgcgcccatcaggtgctcagcggcgtcacccgccatgccgatggctcccccggccaccccgctccggccgtggggccccaccgagccccgcaagggtgctgacatcctcgtcgagtccctcgagcgctgcggcgtccgcgacgtcttcgcctaccccggcggcgcgtcgatggagatccaccaggcactcacccgctcccccgtcatcgccaaccacctcttccgccacgagcaaggggaggcctttgccgcctccggctacgcgcgctcctcgggccgcgtcggcgtctgcatcgccacctccggccccggcgccaccaacctagtctccgcgctcgccgacgcgctgctcgattccgtcccgatggtcgccatcacgggacaggtggcgcgacgcatgattggcaccgacgccttccaggagacgcccatcgtcgaggtcacgcgctccatcaccaagcacaactacctggtcctcgacgtcgacgacatcccccgcgtcgtgcaggaggctttcttcctcgcctcctctggtcgaccagggccggtgcttgtcgacatccccaaggacatccagcagcagatggcggtgcctgtctgggacaagcccatgagtctgcctgggtacattgcgcgccttcccaagccccctgcgactgagttgcttgagcaggtgctgcgtcttgttggtgaatcgcggcgccctgttctttatgtgggcggtggctgcgcagcatctggtgaggagttgcgacgctttgtggagctgactggaatcccggtcacaactactcttatgggcctcggcaacttccccagcgacgacccactgtctctgcgcatgctaggtatgcatgggacggtgtatgcaaattatgcagtggataaggccgatctgttgcttgcacttggtgtgcggtttgatgatcgcgtgacagggaagattgaggcttttgcaagcagggctaagattgtgcacgttgatattgatccggctgagattggcaagaacaagcagccacatgtgtccatctgtgcagatgttaagcttgctttgcagggcatgaatgctcttcttgaaggaagcacatcaaagaagagctttgactttggctcatggaacgatgagttggatcagcagaagagggaattcccccttgggtataaaacatctaatgaggagatccagccacaatatgctattcaggttcttgatgagctgacgaaaggcgaggccatcatcggcacaggtgttgggcagcaccagatgtgggcggcacagtactacacttacaagcggccaaggcagtggttgtcttcagctggtcttggggctatgggatttggtttgccggctgctgctggtgcttctgtggcaaacccaggtgtcactgttgttgacatcgatggagatggtagctttctcatgaacgttcaggagctagctatgatccgaattgagaacctcccagtgaaggtctttgtgctaaacaaccagcacctggggatggtggtgcagttggaggacaggttctataaggccaacagagcgcacacatacttgggaaacccagagaatgaaagtgagatatatccagatttcgtgacgatcgccaaagggttcaacattccagccgtccgtgtgacaaagaagaacgaagtccgcgcagcgataaagaagatgctcgagactccagggccgtacctcttggatataatcgtcccacaccaggagcatgtgttgcctatgatccctagtggtggggctttcaaggatatgatcctggatggtgatggcaggactgtgtactgacttcgaataggtacccggggatcctctagtgccgtgggtcgtttaagctgccgctgtacctgtgtcgtctggtgccttctggtgtacctgggaggttgtcgtctatcaagtatctgtggttggtgtcatgagtcagtgagtcccaatactgttcgtgtcctgtgtgcattatacccaaaactgttatgggcaaatcatgaataagcttgatgttcgaacttaaaagtctctgctcaatatggtattatggttgtttttgttcgtctcctaatatttgcctgggatcaaattttattggctggtgttcatttgacctccatgttcttgctaggctccattttttactctacagccataatatgtttgattgtttggtttgttctttgttgtacacctggttctgtcgagcttagttttcgacactggcttacagcttaacatgttgctattttattgggttctgattgctattttattgggttctgattgctagtttttgctgaatccaaaaaccatgttatttatttaagcgatccaggttattattatgatggtggctaagtttttttttttccaagggtaaattttctggattctccagtgtttctgtggccgaattcaatcactagagtcgacctgcaaagcttcggtccgggcctagaaggcccgcgccacttacgcttgattccgatgacttcgtaggttcctagctcaagccgctcgtgtccaagcgtcacttacgattagctaatgattacggcatctaggaccgactagttcttatgtgcttctagtctccaaatgtggttgatagttattttgctctaagatcaacagtaatgaagtataaatcatcgttgtggtgtgctactcggttaattgagcattaacacacacaaacatgacgaggatggtataatctccaaaaatgtgtactttgttaggtgggaccctatagccttgattaatgtgctatgttaggcatgcctggaaacgtgtgacgcatatgttttgtgaacctgttgatattatatgtgcttttatattaccatattttattaaaatactaatatttattactagtaagatataacattctatctagcttaaaaactaaccataaatattccataataactagatttaccaaactaatatactaaatatacataataaatacaaaattaacaagacaataatcaatatttatgagcttaatatatttagacattatggttggtcgacgataatcatgctaacttttcgtaattgcttgattgaaatatgcttagaataatgcctctttgttctacatggcaaatagggaccattatggtgtaacaccctgggaaccacaaacaccccgaaatgctactaaactacacaactaaccttcatatataaaatttcgacagcatctcctttgaaaatttgcatagacgtggaagcaacagagtataaacagatctgcgtttaaacgtgcaagcgctactagacaattcagtacattaaaaacgtccgcaatgtgttattaagttgtctaagcgtcaatttgtttacaccacaatatatcctgcca

SEQ ID NO: 53 - DNA, 28597 bp, Artificial sequence
  PHP95881
gtttacccgccaatatatcctgtcaaacactgatagtttaaactgaaggcgggaaacgacaatctgatcatgagcggagaattaagggagtcacgttatgacccccgccgatgacgcgggacaagccgttttacgtttggaactgacagaaccgcaacgttgaaggagccactcagcaagctggtacgattgtaatacgactcactatagggcgaattgagcgctgtttaaacgctcttcaactggaagagcggttacgctgtttaaacgctcttcaactggaagagcggttactaccggttcactagctagctgctaatcgagctagttaccctatgaggtgacatgaagcgctcacggttactatgacggttagcttcacgactgttggtggcagtagcgtacgacttagctatagttccggacttacccttaagcgatttaaatctgcggttaccgaattcgagctcggtacctagtacccttgtacttttggtttcacctgcatagagaaaacccacaagaatatgacagtctgatttgtcagtctcattctcaagcaacatttctctatccgttactttcatggtgaataacacaatccatcatcaatactttgtgttactcagaaactgaaagttattccgagtcttgcatatctttggacctactcgtttttctaccattattgctgattgttaagctctcgctacttgaatcggcattgttggagtgggaaggttcaaaaaattggagttatgactagttgtctctttctatgtacgatggagaaaatgaataaacaactgagaaaatggctcttgtttagttgatgatgctcttaagctttccactggttgccatatatgatttgggcatttcactttgatcttaatgggccttgtaaagcccaagactcatgattatctttagttgatgctcttaattaggtgtgggcaaataattcaaactgtatgtacccgaccaaaaccaaagcaaaaataatcgaaccaaaccgaaaatttaaaaataaccgaatgaaaactaaatcctataactgaaagaactgaaaccgaatcaaaatatttaatgtaaccaaaaatatccgaaatataattatattgtcaaaaatattaataatttctagattaaataattaaaaatacttaaaaatttatataaaatagtaaaaatactcgaaaataaccacaaatattcaaaaacaaccgaaatatcccaaaatattcaaagcaaaataaccgaatggataccaaattttaaaaccgaaaaaactggaacaaaaccaaaatcgaaccaaaatttcaaaaatcgaataaatactaaactttagaacaaaaaaaaacgataaccgaatgtatacgaaccaaagccgaattagataaccgaacgtccaggactactcttaatctttccgccacttatgatttgggctattactttgtttataatgagccttttcaagctcaagttcatgattgtccgtgagatgagaaactgacttgttggattcgaaaccctagctagtattggttaatacttaatacataaatgacctgcattgacatcatcatccaagaaaataaaaattgtatgcttgagatatttagttttcctagctaggttttctttattttagtaccgaatctttaggtgtgccacgttaatttagacccattttttcatacttaccaactgagtctagtttaatcatgactataatcgtataaaatgattcagtcgacgtcattgcgaacgtatataaaatcatccaaattgacgtcattccaaagaggtaagcatgcttatctaagagtccgagcatactaaacaagacgacattttatttgcactccaaatcaaattttgtattgcctaaagaaaaacaatcaaactcaagtttcttaaaattaatttcattcaaactaatcactttcaatatctcacatattattcatgccatttctatttgtctaaacatgatttaaaaaaaaaagtaaaatacaaagattactatgcaaaaactctataaaaaaaaattcaaatttcttatttatttgtgacatcaaattttcaaaataatttttttaattatcggttgatccggtcagtcgataaaaacataaactttcagcgaccgttaaaactttcctactaccgatttagagaaaatcttagcttgaaacgtaattgtaacctgccttcatgcaagtcgcaagatatgtcatcctaagttgtatatgttttctcaaaagatgtatttacttgagaaaatacgtttcaacgttgatggacaaccaattaagaatcaagcacctttcgtaatcaatttaggcttatcgtctaaggtatactgatttacgacagttgactagacttataaggaacaaaataatagaatagtttctaaacacttcacctaatcatagagactaagatggtaattcgtaaacgacaaagcctagtgacactgtccattgtaaaattccacatcatattagtattaaacatatacatgtagtttcctgaacacatgtagtatcaaacacacttcgtggcttcttcctcgaaacctgcggccgcgctatagttccggacttacccttaagataacttcgtatagcatacattatacgaagttatgggcccacgcgtgaagagcggttaccagagctggtcacctttgtccaccaagatggaactgtcttcggccagaatggccatctggattcagcaggcctagaaggccatttatcgctatcaactttgtatagaaaagttgggccgagctcggtacggccagaatggcccggaccgggttaccaagcggccgcacactgatagtttaaactgaaggcgggaaacgacaatctgatcatgagcggagaattaagggagtcacgttatgacccccgccgatgacgcgggacaagccgttttacgtttggaactgacagaaccgcaacgattgaaggagccactcagccgcgggtttctggagtttaatgagctaagcacatacgtcagaaaccattattgcgcgttcaaaagtcgcctaaggtcactatcagctagcaaatatttcttgtcaaaaatgctccactgacgttccataaattcccctcggtatccaattagagtctcatattcactcccatggcggccaatgcgggcggcggtggagcgggaggaggcagcggcagcggcagcgtggctgcgccggcggtgtgccgccccagcggctcgcggtggacgccgacgccggagcagatcaggatgctgaaggagctctactacggctgcggcatccggtcgcccagctcggagcagatccagcgcatcaccgccatgctgcggcagcacggcaagatcgagggcaagaacgtcttctactggttccagaaccacaaggcccgcgagcgccagaagcgccgcctcaccagcctcgacgtcaacgtgcccgccgccggcgcggccgacgccaccaccagccaactcggcgtcctctcgctgtcgtcgccgccgccttcaggcgcggcgcctccctcgcccaccctcggcttctacgccgccggcaatggcggcggatcggctgtgctgctggacacgagttccgactggggcagcagcggcgctgctatggccaccgagacatgcttcctgcaggactacatgggcgtgacggacacgggcagctcgtcgcagtggccacgcttctcgtcgtcggacacgataatggcggcggccgcggcgcgggcggcgacgacgcgggcgcccgagacgctccctctcttcccgacctgcggcgacgacggcggcagcggtagcagcagctacttgccgttctggggtgccgcgtccacaactgccggcgccacttcttccgttgcgatccaacagcaacaccagctgcaggagcagtacagcttttacagcaacagcaacagcacccagctggccggcaccggcaaccaagacgtatcggcaacagcagcagcagccgccgccctggagctgagcctcagctcatggtgctccccttaccctgctgcagggagtatgtgagagcaacgcgagctgccactgctcttcactgatgtctctggaatggaaggaggaggaagtgagaacagatcattcgacaaagcagcattagtccgttgatcggtggaagaccactcgtcagtgttgagttgaatgtttgatcaataaaatacggcaatgctgtaagggttgttttttatgccattgataatacactgtactgttcagttgttgaactctatttcttagccatgccaagtgcttttcttattttgaataacattacagcaaaaagttgaaagacaaaaaaaaaaacccccgaacagagtgctttgggtcccaagcttctttagactgtgttcggcgttccccctaaatttctccccctatatctcactcacttgtcacatcagcgttctctttccccctatatctccacgctctacagcagttccacctatatcaaacctctataccccaccacaacaatattatatactttcatcttcaactaactcatgtaccttccaatttttttctactaataattatttacgtgcacagaaacttagcaaggagagagagagcgggaatttaaatgctcggcgttaggcttttagtccgctaggtggctagaccgaggttaggacgctagttcactaggggcctagtggtgttttaagacgtcacggtcaccacgcgtggaccgaagcttgcatgcctgcagtgcagcgtgacccggtcgtgcccctctctagagataatgagcattgcatgtctaagttataaaaaattaccacatattttttttgtcacacttgtttgaagtgcagtttatctatctttatacatatatttaaactttactctacgaataatataatctatagtactacaataatatcagtgttttagagaatcatataaatgaacagttagacatggtctaaaggacaattgagtattttgacaacaggactctacagttttatctttttagtgtgcatgtgttctcctttttttttgcaaatagcttcacctatataatacttcatccattttattagtacatccatttagggtttagggttaatggtttttatagactaatttttttagtacatctattttattctattttagcctctaaattaagaaaactaaaactctattttagtttttttatttaataatttagatataaaatagaataaaataaagtgactaaaaattaaacaaataccctttaagaaattaaaaaaactaaggaaacatttttcttgtttcgagtagataatgccagcctgttaaacgccgtcgacgagtctaacggacaccaaccagcgaaccagcagcgtcgcgtcgggccaagcgaagcagacggcacggcatctctgtcgctgcctctggacccctctcgagagttccgctccaccgttggacttgctccgctgtcggcatccagaaattgcgtggcggagcggcagacgtgagccggcacggcaggcggcctcctcctcctctcacggcaccggcagctacgggggattcctttcccaccgctccttcgctttcccttcctcgcccgccgtaataaatagacaccccctccacaccctctttccccaacctcgtgttgttcggagcgcacacacacacaaccagatctcccccaaatccacccgtcggcacctccgcttcaaggtacgccgctcgtcctcccccccccccctctctaccttctctagatcggcgttccggtccatgcatggttagggcccggtagttctacttctgttcatgtttgtgttagatccgtgtttgtgttagatccgtgctgctagcgttcgtacacggatgcgacctgtacgtcagacacgttctgattgctaacttgccagtgtttctctttggggaatcctgggatggctctagccgttccgcagacgggatcgatttcatgattttttttgtttcgttgcatagggtttggtttgcccttttcctttatttcaatatatgccgtgcacttgtttgtcgggtcatcttttcatgcttttttttgtcttggttgtgatgatgtggtctggttgggcggtcgttctagatcggagtagaattctgtttcaaactacctggtggatttattaattttggatctgtatgtgtgtgccatacatattcatagttacgaattgaagatgatggatggaaatatcgatctaggataggtatacatgttgatgcgggttttactgatgcatatacagagatgctttttgttcgcttggttgtgatgatgtggtgtggttgggcggtcgttcattcgttctagatcggagtagaatactgtttcaaactacctggtgtatttattaattttggaactgtatgtgtgtgtcatacatcttcatagttacgagtttaagatggatggaaatatcgatctaggataggtatacatgttgatgtgggttttactgatgcatatacatgatggcatatgcagcatctattcatatgctctaaccttgagtacctatctattataataaacaagtatgttttataattattttgatcttgatatacttggatgatggcatatgcagcagctatatgtggatttttttagcactgccttcatacgctatttatttgcttggtactgtttcttttgtcgatgctcaccctgttgtttggtgttacttctgcaggtcgactttaacttagcctaggatccatggccactgtgaacaactggctcgctttctccctctccccgcaggagctgccgccctcccagacgacggactccacactcatctcggccgccaccgccgaccatgtctccggcgatgtctgcttcaacatcccccaagattggagcatgaggggatcagagctttcggcgctcgtcgcggagccgaagctggaggacttcctcggcggcatctccttctccgagcagcatcacaaggccaactgcaacatgatacccagcactagcagcacagtttgctacgcgagctcaggtgctagcaccggctaccatcaccagctgtaccaccagcccaccagctcagcgctccacttcgcggactccgtaatggtggcttcctcggccggtgtccacgacggcggtgccatgctcagcgcggccgccgctaacggtgtcgctggcgctgccagtgccaacggcggcggcatcgggctgtccatgattaagaactggctgcggagccaaccggcgcccatgcagccgagggtggcggcggctgagggcgcgcaggggctctctttgtccatgaacatggcggggacgacccaaggcgctgctggcatgccacttctcgctggagagcgcgcacgggcgcccgagagtgtatcgacgtcagcacagggtggagccgtcgtcgtcacggcgccgaaggaggatagcggtggcagcggtgttgccggcgctctagtagccgtgagcacggacacgggtggcagcggcggcgcgtcggctgacaacacggcaaggaagacggtggacacgttcgggcagcgcacgtcgatttaccgtggcgtgacaaggcatagatggactgggagatatgaggcacatctttgggataacagttgcagaagggaagggcaaactcgtaagggtcgtcaagtctatttaggtggctatgataaagaggagaaagctgctagggcttatgatcttgctgctctgaagtactggggtgccacaacaacaacaaattttccagtgagtaactacgaaaaggagctcgaggacatgaagcacatgacaaggcaggagtttgtagcgtctctgagaaggaagagcagtggtttctccagaggtgcatccatttacaggggagtgactaggcatcaccaacatggaagatggcaagcacggattggacgagttgcagggaacaaggatctttacttgggcaccttcagcacccaggaggaggcagcggaggcgtacgacatcgcggcgatcaagttccgcggcctcaacgccgtcaccaacttcgacatgagccgctacgacgtgaagagcatcctggacagcagcgccctccccatcggcagcgccgccaagcgcctcaaggaggccgaggccgcagcgtccgcgcagcaccaccacgccggcgtggtgagctacgacgtcggccgcatcgcctcgcagctcggcgacggcggagccctggcggcggcgtacggcgcgcactaccacggcgccgcctggccgaccatcgcgttccagccgggcgccgccagcacaggcctgtaccacccgtacgcgcagcagccaatgcgcggcggcgggtggtgcaagcaggagcaggaccacgcggtgatcgcggccgcgcacagcctgcaggacctccaccacctgaacctgggcgcggccggcgcgcacgactttttctcggcagggcagcaggccgccgccgctgcgatgcacggcctgggtagcatcgacagtgcgtcgctcgagcacagcaccggctccaactccgtcgtctacaacggcggggtcggcgacagcaacggcgccagcgccgtcggcggcagtggcggtggctacatgatgccgatgagcgctgccggagcaaccactacatcggcaatggtgagccacgagcaggtgcatgcacgggcctacgacgaagccaagcaggctgctcagatggggtacgagagctacctggtgaacgcggagaacaatggtggcggaaggatgtctgcatgggggactgtcgtgtctgcagccgcggcggcagcagcaagcagcaacgacaacatggccgccgacgtcgggcatggcggcgcgcagctcttcagtgtctggaacgacacttaagcgtacctagtggtacctgacatcttatagtctgcaacctctcgtgtctgaattcctatctttatcaagtgttattgcttccacgactataggacagctttcgtcgaaagcttttgctcatgtgatctcgaaggattcatctagtctgatttttcgtgacttgtatcggttttattggattcatccaacatatatcaataaaaaatgagttgtgtttcctttcttcctagttcagttaaaattatttccctcctgcgcttgtgctgtaattgtctgtgtacctgttgtttgtgactgtgttagttcccttggatatgatttcgtatttgatatgtacatggagatagcttagcttcattattggagtatgaagttagtatgacatagtcactctcctggaaaattgacactgcaaaccatatttttattctgaaccacaaatcctagtcagtccgctggcatatgccgtccgtttgctgaatccagaacgtgggtttggagatgtacggctgagatgcctctatgcgaaggggatttcgtggtgaaacgagatgggagtagagcaacgcccgtggaagatgcttcaaacttccacacttttgagcaacgatcggcagtagtaaggtagacgatttcaagatcaaagcatatgaagataaacaacatcaacaacaaaatttgttggggttctatagagagaaacagagctacatacatacactgttttgtatctaccatctgagatgatgaaaagatgaaaaactaaagaatgccccggcgccaacgccaggacacgccgcgcgcgcgtcacccgagccatctcttgacccagccggcgctgtatatttacacacgttgcagcatcgatcaccacctgttcgatcgcgtcgccgtcaccggcgcgccgcgacttattgaactagtctagggcgcggctaacaacctagcttagattgccttgtctaaacccttaggctaacgcgccacggtaacccggtccgggcctagaaggccccagagctggtcaccccatacgattggaagcttcaagtttgtacaaaaaagcaggctccggccagagttacccggaccgaagcttgcatgcctgcagtgcagcgtgacccggtcgtgcccctctctagagataatgagcattgcatgtctaagttataaaaaattaccacatattttttttgtcacacttgtttgaagtgcagtttatctatctttatacatatatttaaactttactctacgaataatataatctatagtactacaataatatcagtgttttagagaatcatataaatgaacagttagacatggtctaaaggacaattgagtattttgacaacaggactctacagttttatctttttagtgtgcatgtgttctcctttttttttgcaaatagcttcacctatataatacttcatccattttattagtacatccatttagggtttagggttaatggtttttatagactaatttttttagtacatctattttattctattttagcctctaaattaagaaaactaaaactctattttagtttttttatttaataatttagatataaaatagaataaaataaagtgactaaaaattaaacaaataccctttaagaaattaaaaaaactaaggaaacatttttcttgtttcgagtagataatgccagcctgttaaacgccgtcgacgagtctaacggacaccaaccagcgaaccagcagcgtcgcgtcgggccaagcgaagcagacggcacggcatctctgtcgctgcctctggacccctctcgagagttccgctccaccgttggacttgctccgctgtcggcatccagaaattgcgtggcggagcggcagacgtgagccggcacggcaggcggcctcctcctcctctcacggcaccggcagctacgggggattcctttcccaccgctccttcgctttcccttcctcgcccgccgtaataaatagacaccccctccacaccctctttccccaacctcgtgttgttcggagcgcacacacacacaaccagatctcccccaaatccacccgtcggcacctccgcttcaaggtacgccgctcgtcctcccccccccccctctctaccttctctagatcggcgttccggtccatgcatggttagggcccggtagttctacttctgttcatgtttgtgttagatccgtgtttgtgttagatccgtgctgctagcgttcgtacacggatgcgacctgtacgtcagacacgttctgattgctaacttgccagtgtttctctttggggaatcctgggatggctctagccgttccgcagacgggatcgatttcatgattttttttgtttcgttgcatagggtttggtttgcccttttcctttatttcaatatatgccgtgcacttgtttgtcgggtcatcttttcatgcttttttttgtcttggttgtgatgatgtggtctggttgggcggtcgttctagatcggagtagaattctgtttcaaactacctggtggatttattaattttggatctgtatgtgtgtgccatacatattcatagttacgaattgaagatgatggatggaaatatcgatctaggataggtatacatgttgatgcgggttttactgatgcatatacagagatgctttttgttcgcttggttgtgatgatgtggtgtggttgggcggtcgttcattcgttctagatcggagtagaatactgtttcaaactacctggtgtatttattaattttggaactgtatgtgtgtgtcatacatcttcatagttacgagtttaagatggatggaaatatcgatctaggataggtatacatgttgatgtgggttttactgatgcatatacatgatggcatatgcagcatctattcatatgctctaaccttgagtacctatctattataataaacaagtatgttttataattattttgatcttgatatacttggatgatggcatatgcagcagctatatgtggatttttttagccctgccttcatacgctatttatttgcttggtactgtttcttttgtcgatgctcaccctgttgtttggtgttacttctgcaggtcgactttaacttagcctaggatggacaacttcctgccgttcccgagcagcaacgccaacagcgtgcaggagctgagcatggacccgaacaacaacaggagccacttcaccaccgtgccgacctacgaccaccaccaggcccagccgcaccacttcctgccgccgttcagctacccggtggagcagatggccgccgtgatgaacccgcagccggtgtacctgagcgagtgctacccgcagatcccggtgacccagaccggcagcgagttcggcagcctggtgggcaacccgtgcctgtggcaggagaggggcggcttcctggacccgaggatgaccaagatggccaggatcaacaggaagaacgccatgatgaggagcaggaacaacagcagcccgaacagcagcccgagcgagctggtggacagcaagaggcagctgatgatgctgaacctgaagaacaacgtgcagatcagcgacaagaaggacagctaccagcagagcaccttcgacaacaagaagctgagggtgctgtgcgagaaggagctgaagaacagcgacgtgggcagcctgggcaggatcgtgctgccgaagagggacgccgaggccaacctgccgaagctgagcgacaaggagggcatcgtggtgcagatgagggacgtgttcagcatgcagagctggagcttcaagtacaagttctggagcaacaacaagagcaggatgtacgtgctggagaacaccggcgagttcgtgaagcagaacggcgccgagatcggcgacttcctgaccatctacgaggacgagagcaagaacctgtacttcgccatgaacggcaacagcggcaagcagaacgagggcagggagaacgagagcagggagaggaaccactacgaggaggccatgctggactacatcccgagggacgaggaggaggccagcatcgccatgctgatcggcaacctgaacgaccactacccgatcccgaacgacctgatggacctgaccaccgacctgcagcaccaccaggccaccagcagcagcatgccgccggaggaccacgcctacgtgggcagcagcgacgaccaggtgagcttcaacgacttcgagtggtggtagggtaccgttaacagatctactaactatctatactgtaataatgttgtatagccgccggatagctagctagtttagtcattcagcggcgatgggtaataataaagtgtcatccatccatcaccatgcgtggcaacgtgagcaatgacctgattgaacaaattgaaatgaaaagaagaaatatgttatatgtcaacgagatttcctcataatgccactgacgacgtgtgtccaagaaatgtatcagtgatacgtatattcacaatttttttatgacttatactcacaatttgtttttttactacttatactcacaatttgttgtgcgtaccataacaatttcgatcgaatatatatcagaaagttgacgaaagtaagctcactcaaaaagttaaatgggctgcggaagctgcgtcaggcccaagttttggctattctatccggtatccacgattttgatggctgagggacatatgttcgcttaagcttcggtccgggcctagaaggccgatctcccgggcacccagctttcttgtacaaagtggccgttaacggatcggccagaatggcccggaccgggttaccgaattcgagctcggtaccctggttcacaaactcaatacaacacacagtggagtagggtattacgctccggcggcccgaaccactctaaatccttgtgtcctcgtgtgctcttccaccattaatgactgtaattgcagggacacgaagagttgtagcgcttttgccaacaagatccgctatatgctagtagagtggaacctgcacagcaacaagcatccaataatctgagaataagaattatgtgtggtgatggttctcatctctgcaactcgccattttcgcgagagaaccaaatccaagttggtgaagatcatgatttgggctcatgggctggcatagtagctattacctttgcaattgtggttcgaatctatccgatattctccttttcagggagagctaatgcttatgcttattgggtattttggtttgacactgcttcacgcccaaaaaaaggcaactatgtctgagttggatatggcccaaaaaaaggcagctatgtctgagttggatatggaagtcttctttcgtttagggtgaagtaagaccaagctcatgagcttattatcttaggtcggaacaaattagttgataggcatggcacatttatcaaattataatgattttaacagaaaagcaacacctctttttcagcagcaccagctttgcaagctgcaattgacactccaagcatagtatttgctccaaactcagcctgcatttcgcacaatatcatatctatttccatttggataaaatatattttccagaaatatgggaacagaatcaagatacagaaaaaagttgtggtagtagtggtaagtggaaacacaagtacagtgaaaagatagcattatttctgaacagtcaaattaaccgaaataagtagtatcacatactgcccctaaattgactacacccaatgtaaagaattgcttgagcatattgagccatcagttgtttgtttgtgtaacggatttgacaatgcagagttcaggagcaaaaaaccgcaaaggagagaaagagggaaaggatctcctagtatcccaccttgtggcgcgccctgtcaagtgcatgatggcctggtcgatctgcgtctgctgctgcggttccatcccaacgagtgcctccgacaccttgtcgttgatcacccgcaccgcgtaggcgacccccctggcgaggaacttccgcctctcggaggccccggccgcgtcggcggcggcgccctcgagcgcgcccacgctagccgtagatgctcggtgcacggccttgttggtgtgcaactcgacctcaacggccggtgcgctacgcccgtcaaggatctggcgcgcccgcaccctcgtgatcacggtgggcgcctcccgcctcatgtggccgacgatgaaaagcgccgggttaggggccttggcgcgcaccgccgtattcagggcctcctcgctcttgcgcgagagcaggtgcttccccaggtactcctgcactgacaaggctgccacagcggtggaatttgtcctcacgacttcgccacgtcgtcctcacctccctggcttcccacgactccgccgtatcgaggtgctcggtgggtcgtcttaatccgaagtccgaactaggaagacgagacagagaggtctgaggaatgggcctcgtttgatgttgagctgaattatttttccagcataagcccaggtcttggtccatgaacaaaattactagaaacccagcccagtactacgatctaaaagagggactgccactggatagctctctctagcattctccacgctccaatacagcggcgtcgtgtctatccgggtctatccgcgaacacgtgagaactctccagaaactgctttctcctccacttcatctctctcgctttccctctataaaaagaccccttctaggaattgagggagacagcaagcaccaagcagcgatccgaagctcaatcaattcactcaaacctcttccccaaatcttcgattagatcttcgttgacaagaagactagaaccgaacctgacatgtccaacctgctcacggttcaccagaaccttccggctcttccagtggacgcgacgtccgatgaagtcaggaagaacctcatggacatgttccgcgacaggcaagcgttcagcgagcacacctggaagatgctgctctccgtctgccgctcctgggctgcatggtgcaagctgaacaacaggaagtggttccccgctgagcccgaggacgtgagggattaccttctgtacctgcaagcgcgaggtttgtttctgcttctacctttgatatatatataataattatcattaattagtagtaatataatatttcaaatatttttttcaaaataaaagaatgtagtatatagcaattgcttttctgtagtttataagtgtgtatattttaatttataacttttctaatatatgaccaaaacatggtgatgcctaggtctggcagtgaagaccatccagcaacaccttggacaactgaacatgcttcacaggcgctccggcctcccgcgccccagcgactcgaacgccgtgagcctcgtcatgcgccgcatcaggaaggaaaacgtcgatgccggcgaaagggcaaagcaggccctcgcgttcgagaggaccgatttcgaccaggtccgcagcctgatggagaacagcgacaggtgccaggacattaggaacctggcgttcctcggaattgcatacaacacgctcctcaggatcgcggaaattgcccgcattcgcgtgaaggacattagccgcaccgacggcggcaggatgcttatccacattggcaggaccaagacgctcgtttccaccgcaggcgtcgaaaaggccctcagcctcggagtgaccaagctcgtcgaacgctggatctccgtgtccggcgtcgcggacgacccaaacaactacctcttctgccgcgtccgcaagaacggggtggctgcccctagcgccaccagccaactcagcacgagggccttggaaggtattttcgaggccacccaccgcctgatctacggcgcgaaggatgacagcggtcaacgctacctcgcatggtccgggcactccgcccgcgttggagctgctagggacatggcccgcgccggtgtttccatccccgaaatcatgcaggcgggtggatggacgaacgtgaacattgtcatgaactacattcgcaaccttgacagcgagacgggcgcaatggttcgcctcctggaagatggtgactgaggtacccaacctagacttgtccatcttctggattggccaacttaattaatgtatgaaataaaaggatgcacacatagtgacatgctaatcactataatgtgggcatcaaagttgtgtgttatgtgtaattactagttatctgaataaaagagaaagagatcatccatatttcttatcctaaatgaatgtcacgtgtctttataattctttgatgaaccagatgcatttcattaaccaaatccatatacatataaatattaatcatatataattaatatcaattgggttagcaaaacaaatctagtctaggtgtgttttgcgatccgatatcgaattggccacggtaccagctgctgctgttctagggttcacaagtctgcctatttgtcttccccaatggagctatggttgtctggtctggtccttggtcgtgtcccgtttcattgtgtactatttacctgtaatgtgtatccttaagtctggtttgatggtgtctgaaacgttttgctgtggtagagcagcatggaagaactataatgaataagtgatccctaatcattgtgtccaaattttgcttctgctatacccttttgtgctgtttcttatgttttgcttaaaaatttgatctgacaaacaaatttgtctaaattatgctcttgttctgactgtgtactgtacacatttgtattgctaccggtttggcacatagttttctctttgattgcagatcaaacccttctgattgcagattgcttggctatggctgatgtgctcactgttcttctttagcttgtatattgctgatggtggcttggctacggctgaaaaagttgctgctgcgccgacttggcaactgttgctccagtaatgctttgtcctctcttcctagccgccgacttggcacttggcagctgttgctcctgtaatgcgttgttatctcttatctcttgagatgtactatgattttgaggctgtttgacttgtgccagattgccagtgctgatgctatattatctcaggtttttatgctagtatatgttttactgtgtgctgcctgtgtcgagttacgtaatctattgaaccgctatgcgtgttgatgccctgttgttgcttgccagattgatgcccctgttgcttgcagcttgcaagctgtagtgaaatcctaaaattccaaaccaaatctattctgaacttttgaagatctgtgatgtccggaagaaaagattcaaacagataaacgggactctccagaatctataaaataaatgatcgacaaacgctttgctttggtaggcttcaagcttggtcacccggtccgggcctagaaggccagcttcggccgccccgggcaactttattatacaaagttgatagataaatcagatatctggttcctaaggacccggcggaccgattaaactgattcggtccgacgcgttacctaataacttcgtatagcatacattatacgaagttattagctaactaactagtaagcttaagccatgggtcgacggatccgttaactagcgtggcatttggcaccgccgcacactatgcgagctaggagtgctagtttacagatgaaactatgaaaccaagaaaacacaattgtccgtagctagcgcgtggcgtcgtgtcaagcttcacacagtatcttcgttcttcactataaatcgcgcctgttgttcgtgagacccaccaccgtggataacagtcccctaataataagcgatcaacagcactgctgatggctgaacaccgaggcgccgccgcgcgtaaccatccgccggagcagcccgtcgtgccggcgaacgacgccttccccgaccgcgcccagcagctctgcctcgacgccgggcgcgcgctcgcgatgtgcggcgtgctcgtcgccgtccctcccgcattttacgcgtcgacgtcgcggacgacaccgcacttgccttcgtcggcttcgtcctctggatcatcggtgcgtggctgtgcctcctggcgctcacgcccttggctccacgggcggtgagggcgggcggggccgccgccagcaccttgctgatcaggtgcctgtccctttcatgaactactagcgcccgcgcccgcggccgccgggcacaagagaacacatcgatgttcgctgcgtacgtcagcaataaggcactctttgtcagtagtcgagtgcatatgttgggtgtttgccctgggagatttcaagtgttgtggccattatcccgcaggataaaaaatcggcggcttttggattgatacggaaaataacgatgtttcatgctcgtgttgtgtgtgtgacatcttgtcagccaagtttttaaccgttgctactccccctctgtgggctcagtgtgtggaccggaatacgtcgtacataggccgtagcctaagcccaatatgccgtttttcaggttggcctgtgtgacgacaagcgggtctcaaaagcccatcacgcaactggcctgcaattattggaggagagcgcgtcgagttggttccagaggctgcgtggtggggccggactctgcgacgacctctcgttcgcgtccgatttggttgccgtgagccgtgacgtaacgcctccttccgttcctccctatataagttccacccccgggtccggtttccccaagccccagtgacccccgatcccgatcgcgaaatctccgcacccgccggcaagggaccgaagcaagcctctctcccgaccgtcgcatcaaggtacgcgtccgctcgatctgtcctcttccttctcgatttgacttgctgtggtgcccgatcacgggatcagaatcgcaccagtgtagatttcgcatgttctaagatgtgttagtttccaggctaatccagttctcttgacgcccgatccgatcgagctccgtgtttatttcagcctaatcgtagtattcccctaaaatttcctcattagggggttcgcaagattgttggtcgacaggttcacttatgctcgatcgcttacttttagtcgattcatgctgcgtactattgttgccccccgtggttttatcttttctcgtgtgaaatccagtagatatagtagatatcgtagcattaggttttaattcaatcgattgattattgtatcatcaaaattgagaagttcgaatcatgcctatcatgctgcctcaaccgaaatcctgtatattgaagtttcaattcaattgattgatcattcattagattcaaccaaaatctagaaggttagatgacgcatgtcatgctgcctgcgtagtttacctttgatctgtttatgattaccttatcagtaggatatttgtgattttgggaagtagcactaactgattcatgctgacatgatgttccctttcagattatactgttgagtcctatctaattgatgctttgtatgctatatgaatacgtcatggtaaattagcagttaattagcatattagcaattgggcgtacctcatcaggattgctcttgtagatgtgtgtggtgatgtttcttgttcaattcatgttctgctttaaaagtatgtgttctctgtttgttaattaagattcatggttataatgatttggacctaattaatcagggttgcccttttagatgcgtggttacttgttgagttcatttttttcctgctatagttgtatgcgtttgttcattcatggttagatttgatttgtttcttctctattccatgccttccatatacttcaattgtagcttaacatgagatttctgtatatgcaggtcgaccgccggggatccacacgacaccatggcccagtccaagcacggcctgaccaaggagatgaccatgaagtaccgcatggagggctgcgtggacggccacaagttcgtgatcaccggcgagggcatcggctaccccttcaagggcaagcaggccatcaacctgtgcgtggtggagggcggccccttgcccttcgccgaggacatcttgtccgccgccttcatgtacggcaaccgcgtgttcaccgagtacccccaggacatcgtcgactacttcaagaactcctgccccgccggctacacctgggaccgctccttcctgttcgaggacggcgccgtgtgcatctgcaacgccgacatcaccgtgagcgtggaggagaactgcatgtaccacgagtccaagttctacggcgtgaacttccccgccgacggccccgtgatgaagaagatgaccgacaactgggagccctcctgcgagaagatcatccccgtgcccaagcagggcatcttgaagggcgacgtgagcatgtacctgctgctgaaggacggtggccgcttgcgctgccagttcgacaccgtgtacaaggccaagtccgtgccccgcaagatgcccgactggcacttcatccagcacaagctgacccgcgaggaccgcagcgacgccaagaaccagaagtggcacctgaccgagcacgccatcgcctccggctccgccttgccctccggactcagatctcgatagagtcaacctagacttgtccatcttctggattggccaacttaattaatgtatgaaataaaaggatgcacacatagtgacatgctaatcactataatgtgggcatcaaagttgtgtgttatgtgtaattactagttatctgaataaaagagaaagagatcatccatatttcttatcctaaatgaatgtcacgtgtctttataattctttgatgaaccagatgcatttcattaaccaaatccatatacatataaatattaatcatatataattaatatcaattgggttagcaaaacaaatctagtctaggtgtgttttgcgaattgcggcgcccttactttaacgcctctaaccaacacccctttatctttataaggaacaataaacagaatttgccccactgttctaaatcacctaataatatccccagctaaaaacaataaaggtttcctagaattaagacaagcatgactgttcctccaggagggtttggaacattgttgcagtcttgcagatacgggcgaagggtgagaaacagagcggagggctggaggtgacctcggtagtcgacgccggagttgagcttgacaacgacggggcggcccctgatggacttgaggaagtccgatggcgtcttcaccgtcccgccggcgcccgaggcgggcctgtcgctgccgccgccgccgctgctcatcttgcgcgctgtgcccccggcggtgtccctgtgttgcggatcgcgggtgggccaggtggatgcgagggcgacccgtttggactccggccggagccgccggatccctggtcggtgtcagtgccgtttactctgggccccacgtgtcagtaccgtctgtagatgacaacaacccgtcgtccacagtcatgtccaaaatatcctttcttcttttttttcgattcggatatctatcttccttttttttttccaaaaatcttcttgacgcaccagcgcgcacgtttgtggtaaacgccgacacgtcggtcccacgtcgatagaccccacccaccagtgagtagcgtgtacgtattcgggggtgacggacgtgtcgccgtcgtcttgctagtcccattcccatctgagccacacatctctgaacaaaaaaaaggagggaggcctccacgcacatccccctccgtgccacccgccccaaaccctcgcgccgcctccgagacagccgccgcaaccatggccaccgccgccgccgcgtctaccgcgctcactggcgccactaccgctgcgcccaaggcgaggcgccgggcgcacctcctggccacccgccgcgccctcgccgcgcccatcaggtgctcagcggcgtcacccgccatgccgatggctcccccggccaccccgctccggccgtggggccccaccgagccccgcaagggtgctgacatcctcgtcgagtccctcgagcgctgcggcgtccgcgacgtcttcgcctaccccggcggcgcgtccatggagatccaccaggcactcacccgctcccccgtcatcgccaaccacctcttccgccacgagcaaggggaggcctttgccgcctccggctacgcgcgctcctcgggccgcgtcggcgtctgcatcgccacctccggccccggcgccaccaacctagtctccgcgctcgccgacgcgctgctcgattccgtccccatggtcgccatcacgggacaggtggcgcgacgcatgattggcaccgacgccttccaggagacgcccatcgtcgaggtcacccgctccatcaccaagcacaactacctggtcctcgacgtcgacgacatcccccgcgtcgtgcaggaggctttcttcctcgcctcctctggtcgaccagggccggtgcttgtcgacatccccaaggacatccagcagcagatggcggtgcctgtctgggacaagcccatgagtctgcctgggtacattgcgcgccttcccaagccccctgcgactgagttgcttgagcaggtgctgcgtcttgttggtgaatcgcggcgccctgttctttatgtgggcggtggctgcgcagcatctggtgaggagttgcgacgctttgtggagctgactggaatcccggtcacaactactcttatgggcctcggcaacttccccagcgacgacccactgtctctgcgcatgctaggtatgcatgggacggtgtatgcaaattatgcagtggataaggccgatctgttgcttgcacttggtgtgcggtttgatgatcgcgtgacagggaagattgaggcttttgcaagcagggctaagattgtgcacgttgatattgatccggctgagattggcaagaacaagcagccacatgtgtccatctgtgcagatgttaagcttgctttgcagggcatgaatgctcttcttgaaggaagcacatcaaagaagagctttgactttggctcatggaacgatgagttggatcagcagaagagggaattcccccttgggtataaaacatctaatgaggagatccagccacaatatgctattcaggttcttgatgagctgacgaaaggcgaggccatcatcggcacaggtgttgggcagcaccagatgtgggcggcacagtactacacttacaagcggccaaggcagtggttgtcttcagctggtcttggggctatgggatttggtttgccggctgctgctggtgcttctgtggcaaacccaggtgtcactgttgttgacatcgatggagatggtagctttctcatgaacgttcaggagctagctatgatccgaattgagaacctcccagtgaaggtctttgtgctaaacaaccagcacctggggatggtggtgcagttggaggacaggttctataaggccaacagagcgcacacatacttgggaaacccagagaatgaaagtgagatatatccagatttcgtgacgatcgccaaagggttcaacattccagcggtccgtgtgacaaagaagaacgaagtccgcgcagcgataaagaagatgctcgagactccagggccgtacctcttggatataatcgtcccacaccaggagcatgtgttgcctatgatccctagtggtggggctttcaaggatatgatcctggatggtgatggcaggactgtgtactgactagctagtcagttaacagatctgccagatcctcggtgtacaaataacccgtcttatcctatgagacgggccggcgtcagtgtgttctggaggaatttttatgtcagagcctttttctttgtgtgcttgatgtagatgccaagggaagcttattggctgttgaagcttgatgcaaaataaattatggaactctgttttttgtttatctaataataactagcaaatatgcttccattgcattgaaactaacagccttttgtgtttccaagttttattttgtgacaatgtcatctatttcaattagttgtggaatcggaaacttgcaggactaacttggaaactccaatccctcagcatcctggactttttcctggtgtaatccatgtagatattattttaatcatcattttagttctggaggtttttccatctccggttttgctcccctttcttcaaaaaaaaaaaaaaaatgccgtaggcgccgcaacgcccacctgttgttcaaactcatgggcacgagtggctcgaagattttatacaacaattgctgtagtttcaccgttgctggtgaagaagcatttttttaaaaaaatatagtggtattcattttaattagtttagttgtgcagcgagcaaaatttggacatgctctgctcggaatctgatcgacctagacacagattagcagcagtagctttgtcatctgttccaagagttgcgatctgatagaagaaaaaaaaaccttcccttcaatgtaaaaccgaaactaacaagaaagaagcacagtgccgtttaggcaagtatggagtacgtattaagcatgtagaaggccatgcatgaaccactaacaagaaagaagcgcagtgccattcaggcaagcataagcatgtagattggcatgcatgaacaactaacagtagatcgtctctggtctgattagaagttttttgggaagccaagaaatcatgtacaactggttccatctcaaattccgtggcaaaaagaggcctaagcaacatacctcgagtagatcacattcaagcttggtcacccggtccgtcaatattctgattccgatgacttcgtaggttcctagctcaagccgctcgtgtccaagcgtcacttacgattagctaatgattacggcatctaggaccgactagtggcgcgccgactagctagctaaggtaccgagctcgaattcattccgattaatcgtggcctcttgctcttcaggatgaagagctatgtttaaacgtgcaagcgctactagacaattcagtacattaaaaacgtccgcaatgtgttattaagttgtctaagcgtcaatttgtttacaccacaatatatcctgccaccagccagccaacagctccccgaccggcagctcggcacaaaatcaccactcgatacaggcagcccatcagtccgggacggcgtcagcgggagagccgttgtaaggcggcagactttgctcatgttaccgatgctattcggaagaacggcaactaagctgccgggtttgaaacacggatgatctcgcggagggtagcatgttgattgtaacgatgacagagcgttgctgcctgtgatcaaatatcatctccctcgcagagatccgaattatcagccttcttattcatttctcgcttaaccgtgacaggctgtcgatcttgagaactatgccgacataataggaaatcgctggataaagccgctgaggaagctgagtggcgctatttctttagaagtgaacgttgacgatcgtcgggcccaggtagaatccgcctgagtcgcaagggtgacttcgcctatattggacgacggcgcgcagagggcgacctctttttgggttacgattgtaggattatcactaaaacaatacatgaacatattcaaatggcaatctctctaaggcattggaaataaatacaaataacagttgggtggagtttttcgacctgtgggcgttaaccttctgttaacctaaaagctcttgcccaaacagcagaatcggcgctaattgccagcggcggaacttttccagtttcgcgaaaaatatcgccactggcaaggaatgggtttgagatggcgaagtctgtcctaaaagcagcgcctgtagttgtagggttgacggccttgatggagcgtcatgccgatgccctctcgagccaacttcaagcacatcatcttaaggttttcccgccgcattccgagaagggcattcgaacattcgggccatcggaggcgtccaagctgctcggcgttggcgagtcatatttacggcagaccgcgtctgagatgccagagttgaatgttagcatgagcccgggtggcaggcgaatgttctcaattgaagatatccatgcgattcggaagtatatggatcaggtcggccgcgggaaccggcgctacctgccacatcgtcgaggcggcgagcagcttcaggttatctctgtgatgaatttcaaaggtgggtcgggtaagaccaccaccgccgcgcatctggcgcagtacctcgctatgcgcggatatcgagtcttggccattgatctcgatcctcaagcgagcctttctgcactctttgggagccaaccggagacggacgttggcccgaacgaaacgctctacggcgctataaggtatgatgatgagcaggtggcaatcgaacgagtcgtccgagggacttacattcccgacctccacctgattcctggtaatcttgagctgatggagtttgaacacgatacgccacgcgcgctgatgaaccgcaaagagggcgacacgctcttttatggtcgcatcagccaagtaattgaagatatcgcggataactatgacgtcgtggtcatcgactgccctccccagcttgggtatctcacgctatccgcattgactgcggcgacgtccattcttgtcacggtccatccgcagatgctggatgtgatgtcgatgaaccagtttctggcaatgacatcgaaccttttgcgtgaaatcgagaatgctggcgccaagttcaagtttaattggatgcgctatctgataacccgtttcgaaccgagcgacggaccacagaaccaaatggtaggttatctgcggtcgatttttggcgaaaatgtcctcaattttccgatgcttaaaaccaccgcggtttcggacgctggcctgacaaaccagactctattcgaagtggagcgtggcctgttcacgcgctcgacctatgatcgagccttggaggcgatgaacgccgtcaacgacgagatcgaaacactgatcaaaaaagcatggggtaggcccacatgagccggaagcacatccttggcgtctcaactgacgcccctgagacgtcgcccgccgacaataggacggcaaagaaccgctccatgccgctcctcggcgtaacaaggaaggagcgcgatccggcaacgaagctcacagcgaacattggtaacgcactgcgagagcaaaacgatcgtcttagccgtgccgaagagatcgagcggcgtctcgctgaaggtcaggcagtgatagagttggatgcctcgtcaatagaaccgtctttcgtgcaggatcgtatgcgaggggacattgacgggctccttacttcgatccgggaacaaggacagcaagtcccaatccttgtgcgaccgcatccgagccagccgggccgatatcaggttgccttcggccaccgccggctacgcgccgtttcagaactcggacttccggtcagagcggtcgttcgcgaactgacggacgagcaagtggtcgtagcacagggtcaggaaaacaatgagcgcgaagatcttaccttcatcgaaaaggcgcgcttcgcacatcgcctgaacaggcagttttctcgagagattgtcatcgccgcgatgtcgatcgacaagagcaatttgtccaagatgcttctgctcgttgacgccctcccctctgaactgaccgatgctattggtgccgctcctggtgttggacggccgagttggcaacaacttgccgagctgattgag

SEQ ID NO: 54 - DNA, 25687 bp, Artificial sequence
  PHP95882
gtttacccgccaatatatcctgtcaaacactgatagtttaaactgaaggcgggaaacgacaatctgatcatgagcggagaattaagggagtcacgttatgacccccgccgatgacgcgggacaagccgttttacgtttggaactgacagaaccgcaacgttgaaggagccactcagcaagctggtacgattgtaatacgactcactatagggcgaattgagcgctgtttaaacgctcttcaactggaagagcggttacgctgtttaaacgctcttcaactggaagagcggttactaccggttcactagctagctgctaatcgagctagttaccctatgaggtgacatgaagcgctcacggttactatgacggttagcttcacgactgttggtggcagtagcgtacgacttagctatagttccggacttacccttaagcgatttaaatctgcggttaccgaattcgagctcggtacctagtacccttgtacttttggtttcacctgcatagagaaaacccacaagaatatgacagtctgatttgtcagtctcattctcaagcaacatttctctatccgttactttcatggtgaataacacaatccatcatcaatactttgtgttactcagaaactgaaagttattccgagtcttgcatatctttggacctactcgtttttctaccattattgctgattgttaagctctcgctacttgaatcggcattgttggagtgggaaggttcaaaaaattggagttatgactagttgtctctttctatgtacgatggagaaaatgaataaacaactgagaaaatggctcttgtttagttgatgatgctcttaagctttccactggttgccatatatgatttgggcatttcactttgatcttaatgggccttgtaaagcccaagactcatgattatctttagttgatgctcttaattaggtgtgggcaaataattcaaactgtatgtacccgaccaaaaccaaagcaaaaataatcgaaccaaaccgaaaatttaaaaataaccgaatgaaaactaaatcctataactgaaagaactgaaaccgaatcaaaatatttaatgtaaccaaaaatatccgaaatataattatattgtcaaaaatattaataatttctagattaaataattaaaaatacttaaaaatttatataaaatagtaaaaatactcgaaaataaccacaaatattcaaaaacaaccgaaatatcccaaaatattcaaagcaaaataaccgaatggataccaaattttaaaaccgaaaaaactggaacaaaaccaaaatcgaaccaaaatttcaaaaatcgaataaatactaaactttagaacaaaaaaaaacgataaccgaatgtatacgaaccaaagccgaattagataaccgaacgtccaggactactcttaatctttccgccacttatgatttgggctattactttgtttataatgagccttttcaagctcaagttcatgattgtccgtgagatgagaaactgacttgttggattcgaaaccctagctagtattggttaatacttaatacataaatgacctgcattgacatcatcatccaagaaaataaaaattgtatgcttgagatatttagttttcctagctaggttttctttattttagtaccgaatctttaggtgtgccacgttaatttagacccattttttcatacttaccaactgagtctagtttaatcatgactataatcgtataaaatgattcagtcgacgtcattgcgaacgtatataaaatcatccaaattgacgtcattccaaagaggtaagcatgcttatctaagagtccgagcatactaaacaagacgacattttatttgcactccaaatcaaattttgtattgcctaaagaaaaacaatcaaactcaagtttcttaaaattaatttcattcaaactaatcactttcaatatctcacatattattcatgccatttctatttgtctaaacatgatttaaaaaaaaaagtaaaatacaaagattactatgcaaaaactctataaaaaaaaattcaaatttcttatttatttgtgacatcaaattttcaaaataatttttttaattatcggttgatccggtcagtcgataaaaacataaactttcagcgaccgttaaaactttcctactaccgatttagagaaaatcttagcttgaaacgtaattgtaacctgccttcatgcaagtcgcaagatatgtcatcctaagttgtatatgttttctcaaaagatgtatttacttgagaaaatacgtttcaacgttgatggacaaccaattaagaatcaagcacctttcgtaatcaatttaggcttatcgtctaaggtatactgatttacgacagttgactagacttataaggaacaaaataatagaatagtttctaaacacttcacctaatcatagagactaagatggtaattcgtaaacgacaaagcctagtgacactgtccattgtaaaattccacatcatattagtattaaacatatacatgtagtttcctgaacacatgtagtatcaaacacacttcgtggcttcttcctcgaaacctgcggccgcgctatagttccggacttacccttaagataacttcgtatagcatacattatacgaagttatgggcccacgcgtgaagagcggttaccagagctggtcacctttgtccaccaagatggaactgtcttcggccagaatggccatctggattcagcaggcctagaaggccatttatcgctatcaactttgtatagaaaagttgggccgagctcggtacggccagaatggcccggaccgggttaccaagcggccgcacactgatagtttaaactgaaggcgggaaacgacaatctgatcatgagcggagaattaagggagtcacgttatgacccccgccgatgacgcgggacaagccgttttacgtttggaactgacagaaccgcaacgattgaaggagccactcagccgcgggtttctggagtttaatgagctaagcacatacgtcagaaaccattattgcgcgttcaaaagtcgcctaaggtcactatcagctagcaaatatttcttgtcaaaaatgctccactgacgttccataaattcccctcggtatccaattagagtctcatattcactcccatggcggccaatgcgggcggcggtggagcgggaggaggcagcggcagcggcagcgtggctgcgccggcggtgtgccgccccagcggctcgcggtggacgccgacgccggagcagatcaggatgctgaaggagctctactacggctgcggcatccggtcgcccagctcggagcagatccagcgcatcaccgccatgctgcggcagcacggcaagatcgagggcaagaacgtcttctactggttccagaaccacaaggcccgcgagcgccagaagcgccgcctcaccagcctcgacgtcaacgtgcccgccgccggcgcggccgacgccaccaccagccaactcggcgtcctctcgctgtcgtcgccgccgccttcaggcgcggcgcctccctcgcccaccctcggcttctacgccgccggcaatggcggcggatcggctgtgctgctggacacgagttccgactggggcagcagcggcgctgctatggccaccgagacatgcttcctgcaggactacatgggcgtgacggacacgggcagctcgtcgcagtggccacgcttctcgtcgtcggacacgataatggcggcggccgcggcgcgggcggcgacgacgcgggcgcccgagacgctccctctcttcccgacctgcggcgacgacggcggcagcggtagcagcagctacttgccgttctggggtgccgcgtccacaactgccggcgccacttcttccgttgcgatccaacagcaacaccagctgcaggagcagtacagcttttacagcaacagcaacagcacccagctggccggcaccggcaaccaagacgtatcggcaacagcagcagcagccgccgccctggagctgagcctcagctcatggtgctccccttaccctgctgcagggagtatgtgagagcaacgcgagctgccactgctcttcactgatgtctctggaatggaaggaggaggaagtgagaacagatcattcgacaaagcagcattagtccgttgatcggtggaagaccactcgtcagtgttgagttgaatgtttgatcaataaaatacggcaatgctgtaagggttgttttttatgccattgataatacactgtactgttcagttgttgaactctatttcttagccatgccaagtgcttttcttattttgaataacattacagcaaaaagttgaaagacaaaaaaaaaaacccccgaacagagtgctttgggtcccaagcttctttagactgtgttcggcgttccccctaaatttctccccctatatctcactcacttgtcacatcagcgttctctttccccctatatctccacgctctacagcagttccacctatatcaaacctctataccccaccacaacaatattatatactttcatcttcaactaactcatgtaccttccaatttttttctactaataattatttacgtgcacagaaacttagcaaggagagagagagcgggaatttaaatgctcggcgttaggcttttagtccgctaggtggctagaccgaggttaggacgctagttcactaggggcctagtggtgttttaagacgtcacggtcaccacgcgtggaccgaagcttgcatgcctgcagtgcagcgtgacccggtcgtgcccctctctagagataatgagcattgcatgtctaagttataaaaaattaccacatattttttttgtcacacttgtttgaagtgcagtttatctatctttatacatatatttaaactttactctacgaataatataatctatagtactacaataatatcagtgttttagagaatcatataaatgaacagttagacatggtctaaaggacaattgagtattttgacaacaggactctacagttttatctttttagtgtgcatgtgttctcctttttttttgcaaatagcttcacctatataatacttcatccattttattagtacatccatttagggtttagggttaatggtttttatagactaatttttttagtacatctattttattctattttagcctctaaattaagaaaactaaaactctattttagtttttttatttaataatttagatataaaatagaataaaataaagtgactaaaaattaaacaaataccctttaagaaattaaaaaaactaaggaaacatttttcttgtttcgagtagataatgccagcctgttaaacgccgtcgacgagtctaacggacaccaaccagcgaaccagcagcgtcgcgtcgggccaagcgaagcagacggcacggcatctctgtcgctgcctctggacccctctcgagagttccgctccaccgttggacttgctccgctgtcggcatccagaaattgcgtggcggagcggcagacgtgagccggcacggcaggcggcctcctcctcctctcacggcaccggcagctacgggggattcctttcccaccgctccttcgctttcccttcctcgcccgccgtaataaatagacaccccctccacaccctctttccccaacctcgtgttgttcggagcgcacacacacacaaccagatctcccccaaatccacccgtcggcacctccgcttcaaggtacgccgctcgtcctcccccccccccctctctaccttctctagatcggcgttccggtccatgcatggttagggcccggtagttctacttctgttcatgtttgtgttagatccgtgtttgtgttagatccgtgctgctagcgttcgtacacggatgcgacctgtacgtcagacacgttctgattgctaacttgccagtgtttctctttggggaatcctgggatggctctagccgttccgcagacgggatcgatttcatgattttttttgtttcgttgcatagggtttggtttgcccttttcctttatttcaatatatgccgtgcacttgtttgtcgggtcatcttttcatgcttttttttgtcttggttgtgatgatgtggtctggttgggcggtcgttctagatcggagtagaattctgtttcaaactacctggtggatttattaattttggatctgtatgtgtgtgccatacatattcatagttacgaattgaagatgatggatggaaatatcgatctaggataggtatacatgttgatgcgggttttactgatgcatatacagagatgctttttgttcgcttggttgtgatgatgtggtgtggttgggcggtcgttcattcgttctagatcggagtagaatactgtttcaaactacctggtgtatttattaattttggaactgtatgtgtgtgtcatacatcttcatagttacgagtttaagatggatggaaatatcgatctaggataggtatacatgttgatgtgggttttactgatgcatatacatgatggcatatgcagcatctattcatatgctctaaccttgagtacctatctattataataaacaagtatgttttataattattttgatcttgatatacttggatgatggcatatgcagcagctatatgtggatttttttagcactgccttcatacgctatttatttgcttggtactgtttcttttgtcgatgctcaccctgttgtttggtgttacttctgcaggtcgactttaacttagcctaggatccatggccactgtgaacaactggctcgctttctccctctccccgcaggagctgccgccctcccagacgacggactccacactcatctcggccgccaccgccgaccatgtctccggcgatgtctgcttcaacatcccccaagattggagcatgaggggatcagagctttcggcgctcgtcgcggagccgaagctggaggacttcctcggcggcatctccttctccgagcagcatcacaaggccaactgcaacatgatacccagcactagcagcacagtttgctacgcgagctcaggtgctagcaccggctaccatcaccagctgtaccaccagcccaccagctcagcgctccacttcgcggactccgtaatggtggcttcctcggccggtgtccacgacggcggtgccatgctcagcgcggccgccgctaacggtgtcgctggcgctgccagtgccaacggcggcggcatcgggctgtccatgattaagaactggctgcggagccaaccggcgcccatgcagccgagggtggcggcggctgagggcgcgcaggggctctctttgtccatgaacatggcggggacgacccaaggcgctgctggcatgccacttctcgctggagagcgcgcacgggcgcccgagagtgtatcgacgtcagcacagggtggagccgtcgtcgtcacggcgccgaaggaggatagcggtggcagcggtgttgccggcgctctagtagccgtgagcacggacacgggtggcagcggcggcgcgtcggctgacaacacggcaaggaagacggtggacacgttcgggcagcgcacgtcgatttaccgtggcgtgacaaggcatagatggactgggagatatgaggcacatctttgggataacagttgcagaagggaagggcaaactcgtaagggtcgtcaagtctatttaggtggctatgataaagaggagaaagctgctagggcttatgatcttgctgctctgaagtactggggtgccacaacaacaacaaattttccagtgagtaactacgaaaaggagctcgaggacatgaagcacatgacaaggcaggagtttgtagcgtctctgagaaggaagagcagtggtttctccagaggtgcatccatttacaggggagtgactaggcatcaccaacatggaagatggcaagcacggattggacgagttgcagggaacaaggatctttacttgggcaccttcagcacccaggaggaggcagcggaggcgtacgacatcgcggcgatcaagttccgcggcctcaacgccgtcaccaacttcgacatgagccgctacgacgtgaagagcatcctggacagcagcgccctccccatcggcagcgccgccaagcgcctcaaggaggccgaggccgcagcgtccgcgcagcaccaccacgccggcgtggtgagctacgacgtcggccgcatcgcctcgcagctcggcgacggcggagccctggcggcggcgtacggcgcgcactaccacggcgccgcctggccgaccatcgcgttccagccgggcgccgccagcacaggcctgtaccacccgtacgcgcagcagccaatgcgcggcggcgggtggtgcaagcaggagcaggaccacgcggtgatcgcggccgcgcacagcctgcaggacctccaccacctgaacctgggcgcggccggcgcgcacgactttttctcggcagggcagcaggccgccgccgctgcgatgcacggcctgggtagcatcgacagtgcgtcgctcgagcacagcaccggctccaactccgtcgtctacaacggcggggtcggcgacagcaacggcgccagcgccgtcggcggcagtggcggtggctacatgatgccgatgagcgctgccggagcaaccactacatcggcaatggtgagccacgagcaggtgcatgcacgggcctacgacgaagccaagcaggctgctcagatggggtacgagagctacctggtgaacgcggagaacaatggtggcggaaggatgtctgcatgggggactgtcgtgtctgcagccgcggcggcagcagcaagcagcaacgacaacatggccgccgacgtcgggcatggcggcgcgcagctcttcagtgtctggaacgacacttaagcgtacctagtggtacctgacatcttatagtctgcaacctctcgtgtctgaattcctatctttatcaagtgttattgcttccacgactataggacagctttcgtcgaaagcttttgctcatgtgatctcgaaggattcatctagtctgatttttcgtgacttgtatcggttttattggattcatccaacatatatcaataaaaaatgagttgtgtttcctttcttcctagttcagttaaaattatttccctcctgcgcttgtgctgtaattgtctgtgtacctgttgtttgtgactgtgttagttcccttggatatgatttcgtatttgatatgtacatggagatagcttagcttcattattggagtatgaagttagtatgacatagtcactctcctggaaaattgacactgcaaaccatatttttattctgaaccacaaatcctagtcagtccgctggcatatgccgtccgtttgctgaatccagaacgtgggtttggagatgtacggctgagatgcctctatgcgaaggggatttcgtggtgaaacgagatgggagtagagcaacgcccgtggaagatgcttcaaacttccacacttttgagcaacgatcggcagtagtaaggtagacgatttcaagatcaaagcatatgaagataaacaacatcaacaacaaaatttgttggggttctatagagagaaacagagctacatacatacactgttttgtatctaccatctgagatgatgaaaagatgaaaaactaaagaatgccccggcgccaacgccaggacacgccgcgcgcgcgtcacccgagccatctcttgacccagccggcgctgtatatttacacacgttgcagcatcgatcaccacctgttcgatcgcgtcgccgtcaccggcgcgccgcgacttattgaactagtctagggcgcggctaacaacctagcttagattgccttgtctaaacccttaggctaacgcgccacggtaacccggtccgggcctagaaggccccagagctggtcaccccatacgattggaagcttcaagtttgtacaaaaaagcaggctccggccagagttacccggaccgaagcttgcatgcctgcagtgcagcgtgacccggtcgtgcccctctctagagataatgagcattgcatgtctaagttataaaaaattaccacatattttttttgtcacacttgtttgaagtgcagtttatctatctttatacatatatttaaactttactctacgaataatataatctatagtactacaataatatcagtgttttagagaatcatataaatgaacagttagacatggtctaaaggacaattgagtattttgacaacaggactctacagttttatctttttagtgtgcatgtgttctcctttttttttgcaaatagcttcacctatataatacttcatccattttattagtacatccatttagggtttagggttaatggtttttatagactaatttttttagtacatctattttattctattttagcctctaaattaagaaaactaaaactctattttagtttttttatttaataatttagatataaaatagaataaaataaagtgactaaaaattaaacaaataccctttaagaaattaaaaaaactaaggaaacatttttcttgtttcgagtagataatgccagcctgttaaacgccgtcgacgagtctaacggacaccaaccagcgaaccagcagcgtcgcgtcgggccaagcgaagcagacggcacggcatctctgtcgctgcctctggacccctctcgagagttccgctccaccgttggacttgctccgctgtcggcatccagaaattgcgtggcggagcggcagacgtgagccggcacggcaggcggcctcctcctcctctcacggcaccggcagctacgggggattcctttcccaccgctccttcgctttcccttcctcgcccgccgtaataaatagacaccccctccacaccctctttccccaacctcgtgttgttcggagcgcacacacacacaaccagatctcccccaaatccacccgtcggcacctccgcttcaaggtacgccgctcgtcctcccccccccccctctctaccttctctagatcggcgttccggtccatgcatggttagggcccggtagttctacttctgttcatgtttgtgttagatccgtgtttgtgttagatccgtgctgctagcgttcgtacacggatgcgacctgtacgtcagacacgttctgattgctaacttgccagtgtttctctttggggaatcctgggatggctctagccgttccgcagacgggatcgatttcatgattttttttgtttcgttgcatagggtttggtttgcccttttcctttatttcaatatatgccgtgcacttgtttgtcgggtcatcttttcatgcttttttttgtcttggttgtgatgatgtggtctggttgggcggtcgttctagatcggagtagaattctgtttcaaactacctggtggatttattaattttggatctgtatgtgtgtgccatacatattcatagttacgaattgaagatgatggatggaaatatcgatctaggataggtatacatgttgatgcgggttttactgatgcatatacagagatgctttttgttcgcttggttgtgatgatgtggtgtggttgggcggtcgttcattcgttctagatcggagtagaatactgtttcaaactacctggtgtatttattaattttggaactgtatgtgtgtgtcatacatcttcatagttacgagtttaagatggatggaaatatcgatctaggataggtatacatgttgatgtgggttttactgatgcatatacatgatggcatatgcagcatctattcatatgctctaaccttgagtacctatctattataataaacaagtatgttttataattattttgatcttgatatacttggatgatggcatatgcagcagctatatgtggatttttttagccctgccttcatacgctatttatttgcttggtactgtttcttttgtcgatgctcaccctgttgtttggtgttacttctgcaggtcgactttaacttagcctaggatccatggactccagcagcttcctccctgccgccggcgcggagaatggctcggcggcgggcggcgccaacaatggcggcgctgctcagcagcatgcggcgccggcgatccgcgagcaggaccggctgatgccgatcgcgaacgtgatccgcatcatgcggcgcgtgctgccggcgcacgccaagattagcgacgacgccaaggagacgatccaggagtgcgtgtcggagtacatcagcttcatcacgggggaggccaacgagcggtgccagcgggagcagcgcaagaccatcaccgccgaggacgtgctgtgggccatgagccgcctcggcttcgacgactacgtcgagccgctcggcgcctacctccaccgctaccgcgagttcgagggcgacgcgcgcggcgtcgggctcgtccctggggccgccccatcgcgcggcggcgaccaccacccgcactccatgtcgccagcggcgatgctcaagtcccgcgggccagtctccggagccgccatgctaccgcaccaccaccaccaccacgacatgcagatgcacgccgccatgtacgggggaacggccgtgcccccgccggccgggcctcctcaccacggcgggttcctcatgccacacccacagggtagtagccactacctgccttacgcgtacgagcccacgtacggcggtgagcacgcgatggctgcatactatggaggcgccgcgtacgcgcccggcaacggcgggagcggcgacggcagtggcagtggcggcggtggcgggagcgcgtcgcacacaccgcagggcagcggcggcttggagcacccgcacccgttcgcgtacaagtagggtaccgttaacagatctactaactatctatactgtaataatgttgtatagccgccggatagctagctagtttagtcattcagcggcgatgggtaataataaagtgtcatccatccatcaccatgcgtggcaacgtgagcaatgacctgattgaacaaattgaaatgaaaagaagaaatatgttatatgtcaacgagatttcctcataatgccactgacgacgtgtgtccaagaaatgtatcagtgatacgtatattcacaatttttttatgacttatactcacaatttgtttttttactacttatactcacaatttgttgtgcgtaccataacaatttcgatcgaatatatatcagaaagttgacgaaagtaagctcactcaaaaagttaaatgggctgcggaagctgcgtcaggcccaagttttggctattctatccggtatccacgattttgatggctgagggacatatgttcgcttaagcttcggtccgggcctagaaggccgatctcccgggcacccagctttcttgtacaaagtggccgttaacggatcggccagaatggcccggaccgggttaccgaattcgagctcggtaccctggttcacaaactcaatacaacacacagtggagtagggtattacgctccggcggcccgaaccactctaaatccttgtgtcctcgtgtgctcttccaccattaatgactgtaattgcagggacacgaagagttgtagcgcttttgccaacaagatccgctatatgctagtagagtggaacctgcacagcaacaagcatccaataatctgagaataagaattatgtgtggtgatggttctcatctctgcaactcgccattttcgcgagagaaccaaatccaagttggtgaagatcatgatttgggctcatgggctggcatagtagctattacctttgcaattgtggttcgaatctatccgatattctccttttcagggagagctaatgcttatgcttattgggtattttggtttgacactgcttcacgcccaaaaaaaggcaactatgtctgagttggatatggcccaaaaaaaggcagctatgtctgagttggatatggaagtcttctttcgtttagggtgaagtaagaccaagctcatgagcttattatcttaggtcggaacaaattagttgataggcatggcacatttatcaaattataatgattttaacagaaaagcaacacctctttttcagcagcaccagctttgcaagctgcaattgacactccaagcatagtatttgctccaaactcagcctgcatttcgcacaatatcatatctatttccatttggataaaatatattttccagaaatatgggaacagaatcaagatacagaaaaaagttgtggtagtagtggtaagtggaaacacaagtacagtgaaaagatagcattatttctgaacagtcaaattaaccgaaataagtagtatcacatactgcccctaaattgactacacccaatgtaaagaattgcttgagcatattgagccatcagttgtttgtttgtgtaacggatttgacaatgcagagttcaggagcaaaaaaccgcaaaggagagaaagagggaaaggatctcctagtatcccaccttgtggcgcgccctgtcaagtgcatgatggcctggtcgatctgcgtctgctgctgcggttccatcccaacgagtgcctccgacaccttgtcgttgatcacccgcaccgcgtaggcgacccccctggcgaggaacttccgcctctcggaggccccggccgcgtcggcggcggcgccctcgagcgcgcccacgctagccgtagatgctcggtgcacggccttgttggtgtgcaactcgacctcaacggccggtgcgctacgcccgtcaaggatctggcgcgcccgcaccctcgtgatcacggtgggcgcctcccgcctcatgtggccgacgatgaaaagcgccgggttaggggccttggcgcgcaccgccgtattcagggcctcctcgctcttgcgcgagagcaggtgcttccccaggtactcctgcactgacaaggctgccacagcggtggaatttgtcctcacgacttcgccacgtcgtcctcacctccctggcttcccacgactccgccgtatcgaggtgctcggtgggtcgtcttaatccgaagtccgaactaggaagacgagacagagaggtctgaggaatgggcctcgtttgatgttgagctgaattatttttccagcataagcccaggtcttggtccatgaacaaaattactagaaacccagcccagtactacgatctaaaagagggactgccactggatagctctctctagcattctccacgctccaatacagcggcgtcgtgtctatccgggtctatccgcgaacacgtgagaactctccagaaactgctttctcctccacttcatctctctcgctttccctctataaaaagaccccttctaggaattgagggagacagcaagcaccaagcagcgatccgaagctcaatcaattcactcaaacctcttccccaaatcttcgattagatcttcgttgacaagaagactagaaccgaacctgacatgtccaacctgctcacggttcaccagaaccttccggctcttccagtggacgcgacgtccgatgaagtcaggaagaacctcatggacatgttccgcgacaggcaagcgttcagcgagcacacctggaagatgctgctctccgtctgccgctcctgggctgcatggtgcaagctgaacaacaggaagtggttccccgctgagcccgaggacgtgagggattaccttctgtacctgcaagcgcgaggtttgtttctgcttctacctttgatatatatataataattatcattaattagtagtaatataatatttcaaatatttttttcaaaataaaagaatgtagtatatagcaattgcttttctgtagtttataagtgtgtatattttaatttataacttttctaatatatgaccaaaacatggtgatgcctaggtctggcagtgaagaccatccagcaacaccttggacaactgaacatgcttcacaggcgctccggcctcccgcgccccagcgactcgaacgccgtgagcctcgtcatgcgccgcatcaggaaggaaaacgtcgatgccggcgaaagggcaaagcaggccctcgcgttcgagaggaccgatttcgaccaggtccgcagcctgatggagaacagcgacaggtgccaggacattaggaacctggcgttcctcggaattgcatacaacacgctcctcaggatcgcggaaattgcccgcattcgcgtgaaggacattagccgcaccgacggcggcaggatgcttatccacattggcaggaccaagacgctcgtttccaccgcaggcgtcgaaaaggccctcagcctcggagtgaccaagctcgtcgaacgctggatctccgtgtccggcgtcgcggacgacccaaacaactacctcttctgccgcgtccgcaagaacggggtggctgcccctagcgccaccagccaactcagcacgagggccttggaaggtattttcgaggccacccaccgcctgatctacggcgcgaaggatgacagcggtcaacgctacctcgcatggtccgggcactccgcccgcgttggagctgctagggacatggcccgcgccggtgtttccatccccgaaatcatgcaggcgggtggatggacgaacgtgaacattgtcatgaactacattcgcaaccttgacagcgagacgggcgcaatggttcgcctcctggaagatggtgactgaggtacccaacctagacttgtccatcttctggattggccaacttaattaatgtatgaaataaaaggatgcacacatagtgacatgctaatcactataatgtgggcatcaaagttgtgtgttatgtgtaattactagttatctgaataaaagagaaagagatcatccatatttcttatcctaaatgaatgtcacgtgtctttataattctttgatgaaccagatgcatttcattaaccaaatccatatacatataaatattaatcatatataattaatatcaattgggttagcaaaacaaatctagtctaggtgtgttttgcgatccgatatcgaattggccacggtaccagctgctgctgttctagggttcacaagtctgcctatttgtcttccccaatggagctatggttgtctggtctggtccttggtcgtgtcccgtttcattgtgtactatttacctgtaatgtgtatccttaagtctggtttgatggtgtctgaaacgttttgctgtggtagagcagcatggaagaactataatgaataagtgatccctaatcattgtgtccaaattttgcttctgctatacccttttgtgctgtttcttatgttttgcttaaaaatttgatctgacaaacaaatttgtctaaattatgctcttgttctgactgtgtactgtacacatttgtattgctaccggtttggcacatagttttctctttgattgcagatcaaacccttctgattgcagattgcttggctatggctgatgtgctcactgttcttctttagcttgtatattgctgatggtggcttggctacggctgaaaaagttgctgctgcgccgacttggcaactgttgctccagtaatgctttgtcctctcttcctagccgccgacttggcacttggcagctgttgctcctgtaatgcgttgttatctcttatctcttgagatgtactatgattttgaggctgtttgacttgtgccagattgccagtgctgatgctatattatctcaggtttttatgctagtatatgttttactgtgtgctgcctgtgtcgagttacgtaatctattgaaccgctatgcgtgttgatgccctgttgttgcttgccagattgatgcccctgttgcttgcagcttgcaagctgtagtgaaatcctaaaattccaaaccaaatctattctgaacttttgaagatctgtgatgtccggaagaaaagattcaaacagataaacgggactctccagaatctataaaataaatgatcgacaaacgctttgctttggtaggcttcaagcttggtcacccggtccgggcctagaaggccagcttcggccgccccgggcaactttattatacaaagttgatagataaatcagatatctggttcctaaggacccggcggaccgattaaactgattcggtccgacgcgttacctaataacttcgtatagcatacattatacgaagttattagctaactaactagtaagcttaagccatgggtcgacggatccgttaactagcgtggcatttggcaccgccgcacactatgcgagctaggagtgctagtttacagatgaaactatgaaaccaagaaaacacaattgtccgtagctagcgcgtggcgtcgtgtcaagcttcacacagtatcttcgttcttcactataaatcgcgcctgttgttcgtgagacccaccaccgtggataacagtcccctaataataagcgatcaacagcactgctgatggctgaacaccgaggcgccgccgcgcgtaaccatccgccggagcagcccgtcgtgccggcgaacgacgccttccccgaccgcgcccagcagctctgcctcgacgccgggcgcgcgctcgcgatgtgcggcgtgctcgtcgccgtccctcccgcattttacgcgtcgacgtcgcggacgacaccgcacttgccttcgtcggcttcgtcctctggatcatcggtgcgtggctgtgcctcctggcgctcacgcccttggctccacgggcggtgagggcgggcggggccgccgccagcaccttgctgatcaggtgcctgtccctttcatgaactactagcgcccgcgcccgcggccgccgggcacaagagaacacatcgatgttcgctgcgtacgtcagcaataaggcactctttgtcagtagtcgagtgcatatgttgggtgtttgccctgggagatttcaagtgttgtggccattatcccgcaggataaaaaatcggcggcttttggattgatacggaaaataacgatgtttcatgctcgtgttgtgtgtgtgacatcttgtcagccaagtttttaaccgttgctactccccctctgtgggctcagtgtgtggaccggaatacgtcgtacataggccgtagcctaagcccaatatgccgtttttcaggttggcctgtgtgacgacaagcgggtctcaaaagcccatcacgcaactggcctgcaattattggaggagagcgcgtcgagttggttccagaggctgcgtggtggggccggactctgcgacgacctctcgttcgcgtccgatttggttgccgtgagccgtgacgtaacgcctccttccgttcctccctatataagttccacccccgggtccggtttccccaagccccagtgacccccgatcccgatcgcgaaatctccgcacccgccggcaagggaccgaagcaagcctctctcccgaccgtcgcatcaaggtacgcgtccgctcgatctgtcctcttccttctcgatttgacttgctgtggtgcccgatcacgggatcagaatcgcaccagtgtagatttcgcatgttctaagatgtgttagtttccaggctaatccagttctcttgacgcccgatccgatcgagctccgtgtttatttcagcctaatcgtagtattcccctaaaatttcctcattagggggttcgcaagattgttggtcgacaggttcacttatgctcgatcgcttacttttagtcgattcatgctgcgtactattgttgccccccgtggttttatcttttctcgtgtgaaatccagtagatatagtagatatcgtagcattaggttttaattcaatcgattgattattgtatcatcaaaattgagaagttcgaatcatgcctatcatgctgcctcaaccgaaatcctgtatattgaagtttcaattcaattgattgatcattcattagattcaaccaaaatctagaaggttagatgacgcatgtcatgctgcctgcgtagtttacctttgatctgtttatgattaccttatcagtaggatatttgtgattttgggaagtagcactaactgattcatgctgacatgatgttccctttcagattatactgttgagtcctatctaattgatgctttgtatgctatatgaatacgtcatggtaaattagcagttaattagcatattagcaattgggcgtacctcatcaggattgctcttgtagatgtgtgtggtgatgtttcttgttcaattcatgttctgctttaaaagtatgtgttctctgtttgttaattaagattcatggttataatgatttggacctaattaatcagggttgcccttttagatgcgtggttacttgttgagttcatttttttcctgctatagttgtatgcgtttgttcattcatggttagatttgatttgtttcttctctattccatgccttccatatacttcaattgtagcttaacatgagatttctgtatatgcaggtcgaccgccggggatccacacgacaccatggcccagtccaagcacggcctgaccaaggagatgaccatgaagtaccgcatggagggctgcgtggacggccacaagttcgtgatcaccggcgagggcatcggctaccccttcaagggcaagcaggccatcaacctgtgcgtggtggagggcggccccttgcccttcgccgaggacatcttgtccgccgccttcatgtacggcaaccgcgtgttcaccgagtacccccaggacatcgtcgactacttcaagaactcctgccccgccggctacacctgggaccgctccttcctgttcgaggacggcgccgtgtgcatctgcaacgccgacatcaccgtgagcgtggaggagaactgcatgtaccacgagtccaagttctacggcgtgaacttccccgccgacggccccgtgatgaagaagatgaccgacaactgggagccctcctgcgagaagatcatccccgtgcccaagcagggcatcttgaagggcgacgtgagcatgtacctgctgctgaaggacggtggccgcttgcgctgccagttcgacaccgtgtacaaggccaagtccgtgccccgcaagatgcccgactggcacttcatccagcacaagctgacccgcgaggaccgcagcgacgccaagaaccagaagtggcacctgaccgagcacgccatcgcctccggctccgccttgccctccggactcagatctcgatagagtcaacctagacttgtccatcttctggattggccaacttaattaatgtatgaaataaaaggatgcacacatagtgacatgctaatcactataatgtgggcatcaaagttgtgtgttatgtgtaattactagttatctgaataaaagagaaagagatcatccatatttcttatcctaaatgaatgtcacgtgtctttataattctttgatgaaccagatgcatttcattaaccaaatccatatacatataaatattaatcatatataattaatatcaattgggttagcaaaacaaatctagtctaggtgtgttttgcgaattgcggcgcccttactttaacgcctctaaccaacacccctttatctttataaggaacaataaacagaatttgccccactgttctaaatcacctaataatatccccagctaaaaacaataaaggtttcctagaattaagacaagcatgactgttcctccaggagggtttggaacattgttgcagtcttgcagatacgggcgaagggtgagaaacagagcggagggctggaggtgacctcggtagtcgacgccggagttgagcttgacaacgacggggcggcccctgatggacttgaggaagtccgatggcgtcttcaccgtcccgccggcgcccgaggcgggcctgtcgctgccgccgccgccgctgctcatcttgcgcgctgtgcccccggcggtgtccctgtgttgcggatcgcgggtgggccaggtggatgcgagggcgacccgtttggactccggccggagccgccggatccctggtcggtgtcagtgccgtttactctgggccccacgtgtcagtaccgtctgtagatgacaacaacccgtcgtccacagtcatgtccaaaatatcctttcttcttttttttcgattcggatatctatcttccttttttttttccaaaaatcttcttgacgcaccagcgcgcacgtttgtggtaaacgccgacacgtcggtcccacgtcgatagaccccacccaccagtgagtagcgtgtacgtattcgggggtgacggacgtgtcgccgtcgtcttgctagtcccattcccatctgagccacacatctctgaacaaaaaaaaggagggaggcctccacgcacatccccctccgtgccacccgccccaaaccctcgcgccgcctccgagacagccgccgcaaccatggccaccgccgccgccgcgtctaccgcgctcactggcgccactaccgctgcgcccaaggcgaggcgccgggcgcacctcctggccacccgccgcgccctcgccgcgcccatcaggtgctcagcggcgtcacccgccatgccgatggctcccccggccaccccgctccggccgtggggccccaccgagccccgcaagggtgctgacatcctcgtcgagtccctcgagcgctgcggcgtccgcgacgtcttcgcctaccccggcggcgcgtccatggagatccaccaggcactcacccgctcccccgtcatcgccaaccacctcttccgccacgagcaaggggaggcctttgccgcctccggctacgcgcgctcctcgggccgcgtcggcgtctgcatcgccacctccggccccggcgccaccaacctagtctccgcgctcgccgacgcgctgctcgattccgtccccatggtcgccatcacgggacaggtggcgcgacgcatgattggcaccgacgccttccaggagacgcccatcgtcgaggtcacccgctccatcaccaagcacaactacctggtcctcgacgtcgacgacatcccccgcgtcgtgcaggaggctttcttcctcgcctcctctggtcgaccagggccggtgcttgtcgacatccccaaggacatccagcagcagatggcggtgcctgtctgggacaagcccatgagtctgcctgggtacattgcgcgccttcccaagccccctgcgactgagttgcttgagcaggtgctgcgtcttgttggtgaatcgcggcgccctgttctttatgtgggcggtggctgcgcagcatctggtgaggagttgcgacgctttgtggagctgactggaatcccggtcacaactactcttatgggcctcggcaacttccccagcgacgacccactgtctctgcgcatgctaggtatgcatgggacggtgtatgcaaattatgcagtggataaggccgatctgttgcttgcacttggtgtgcggtttgatgatcgcgtgacagggaagattgaggcttttgcaagcagggctaagattgtgcacgttgatattgatccggctgagattggcaagaacaagcagccacatgtgtccatctgtgcagatgttaagcttgctttgcagggcatgaatgctcttcttgaaggaagcacatcaaagaagagctttgactttggctcatggaacgatgagttggatcagcagaagagggaattcccccttgggtataaaacatctaatgaggagatccagccacaatatgctattcaggttcttgatgagctgacgaaaggcgaggccatcatcggcacaggtgttgggcagcaccagatgtgggcggcacagtactacacttacaagcggccaaggcagtggttgtcttcagctggtcttggggctatgggatttggtttgccggctgctgctggtgcttctgtggcaaacccaggtgtcactgttgttgacatcgatggagatggtagctttctcatgaacgttcaggagctagctatgatccgaattgagaacctcccagtgaaggtctttgtgctaaacaaccagcacctggggatggtggtgcagttggaggacaggttctataaggccaacagagcgcacacatacttgggaaacccagagaatgaaagtgagatatatccagatttcgtgacgatcgccaaagggttcaacattccagcggtccgtgtgacaaagaagaacgaagtccgcgcagcgataaagaagatgctcgagactccagggccgtacctcttggatataatcgtcccacaccaggagcatgtgttgcctatgatccctagtggtggggctttcaaggatatgatcctggatggtgatggcaggactgtgtactgactagctagtcagttaacagatctgccagatcctcggtgtacaaataacccgtcttatcctatgagacgggccggcgtcagtgtgttctggaggaatttttatgtcagagcctttttctttgtgtgcttgatgtagatgccaagggaagcttattggctgttgaagcttgatgcaaaataaattatggaactctgttttttgtttatctaataataactagcaaatatgcttccattgcattgaaactaacagccttttgtgtttccaagttttattttgtgacaatgtcatctatttcaattagttgtggaatcggaaacttgcaggactaacttggaaactccaatccctcagcatcctggactttttcctggtgtaatccatgtagatattattttaatcatcattttagttctggaggtttttccatctccggttttgctcccctttcttcaaaaaaaaaaaaaaaatgccgtaggcgccgcaacgcccacctgttgttcaaactcatgggcacgagtggctcgaagattttatacaacaattgctgtagtttcaccgttgctggtgaagaagcatttttttaaaaaaatatagtggtattcattttaattagtttagttgtgcagcgagcaaaatttggacatgctctgctcggaatctgatcgacctagacacagattagcagcagtagctttgtcatctgttccaagagttgcgatctgatagaagaaaaaaaaaccttcccttcaatgtaaaaccgaaactaacaagaaagaagcacagtgccgtttaggcaagtatggagtacgtattaagcatgtagaaggccatgcatgaaccactaacaagaaagaagcgcagtgccattcaggcaagcataagcatgtagattggcatgcatgaacaactaacagtagatcgtctctggtctgattagaagttttttgggaagccaagaaatcatgtacaactggttccatctcaaattccgtggcaaaaagaggcctaagcaacatacctcgagtagatcacattcaagcttggtcacccggtccgtcaatattctgattccgatgacttcgtaggttcctagctcaagccgctcgtgtccaagcgtcacttacgattagctaatgattacggcatctaggaccgactagtggcgcgccgactagctagctaaggtaccgagctcgaattcattccgattaatcgtggcctcttgctcttcaggatgaagagctatgtttaaacgtgcaagcgctactagacaattcagtacattaaaaacgtccgcaatgtgttattaagttgtctaagcgtcaatttgtttacaccacaatatatcctgcca

SEQ ID NO: 55 - DNA, 25621 bp, Artificial sequence
  PHP95886
gtttacccgccaatatatcctgtcaaacactgatagtttaaactgaaggcgggaaacgacaatctgatcatgagcggagaattaagggagtcacgttatgacccccgccgatgacgcgggacaagccgttttacgtttggaactgacagaaccgcaacgttgaaggagccactcagcaagctggtacgattgtaatacgactcactatagggcgaattgagcgctgtttaaacgctcttcaactggaagagcggttacgctgtttaaacgctcttcaactggaagagcggttactaccggttcactagctagctgctaatcgagctagttaccctatgaggtgacatgaagcgctcacggttactatgacggttagcttcacgactgttggtggcagtagcgtacgacttagctatagttccggacttacccttaagcgatttaaatctgcggttaccgaattcgagctcggtacctagtacccttgtacttttggtttcacctgcatagagaaaacccacaagaatatgacagtctgatttgtcagtctcattctcaagcaacatttctctatccgttactttcatggtgaataacacaatccatcatcaatactttgtgttactcagaaactgaaagttattccgagtcttgcatatctttggacctactcgtttttctaccattattgctgattgttaagctctcgctacttgaatcggcattgttggagtgggaaggttcaaaaaattggagttatgactagttgtctctttctatgtacgatggagaaaatgaataaacaactgagaaaatggctcttgtttagttgatgatgctcttaagctttccactggttgccatatatgatttgggcatttcactttgatcttaatgggccttgtaaagcccaagactcatgattatctttagttgatgctcttaattaggtgtgggcaaataattcaaactgtatgtacccgaccaaaaccaaagcaaaaataatcgaaccaaaccgaaaatttaaaaataaccgaatgaaaactaaatcctataactgaaagaactgaaaccgaatcaaaatatttaatgtaaccaaaaatatccgaaatataattatattgtcaaaaatattaataatttctagattaaataattaaaaatacttaaaaatttatataaaatagtaaaaatactcgaaaataaccacaaatattcaaaaacaaccgaaatatcccaaaatattcaaagcaaaataaccgaatggataccaaattttaaaaccgaaaaaactggaacaaaaccaaaatcgaaccaaaatttcaaaaatcgaataaatactaaactttagaacaaaaaaaaacgataaccgaatgtatacgaaccaaagccgaattagataaccgaacgtccaggactactcttaatctttccgccacttatgatttgggctattactttgtttataatgagccttttcaagctcaagttcatgattgtccgtgagatgagaaactgacttgttggattcgaaaccctagctagtattggttaatacttaatacataaatgacctgcattgacatcatcatccaagaaaataaaaattgtatgcttgagatatttagttttcctagctaggttttctttattttagtaccgaatctttaggtgtgccacgttaatttagacccattttttcatacttaccaactgagtctagtttaatcatgactataatcgtataaaatgattcagtcgacgtcattgcgaacgtatataaaatcatccaaattgacgtcattccaaagaggtaagcatgcttatctaagagtccgagcatactaaacaagacgacattttatttgcactccaaatcaaattttgtattgcctaaagaaaaacaatcaaactcaagtttcttaaaattaatttcattcaaactaatcactttcaatatctcacatattattcatgccatttctatttgtctaaacatgatttaaaaaaaaaagtaaaatacaaagattactatgcaaaaactctataaaaaaaaattcaaatttcttatttatttgtgacatcaaattttcaaaataatttttttaattatcggttgatccggtcagtcgataaaaacataaactttcagcgaccgttaaaactttcctactaccgatttagagaaaatcttagcttgaaacgtaattgtaacctgccttcatgcaagtcgcaagatatgtcatcctaagttgtatatgttttctcaaaagatgtatttacttgagaaaatacgtttcaacgttgatggacaaccaattaagaatcaagcacctttcgtaatcaatttaggcttatcgtctaaggtatactgatttacgacagttgactagacttataaggaacaaaataatagaatagtttctaaacacttcacctaatcatagagactaagatggtaattcgtaaacgacaaagcctagtgacactgtccattgtaaaattccacatcatattagtattaaacatatacatgtagtttcctgaacacatgtagtatcaaacacacttcgtggcttcttcctcgaaacctgcggccgcgctatagttccggacttacccttaagataacttcgtatagcatacattatacgaagttatgggcccacgcgtgaagagcggttaccagagctggtcacctttgtccaccaagatggaactgtcttcggccagaatggccatctggattcagcaggcctagaaggccatttatcgctatcaactttgtatagaaaagttgggccgagctcggtacggccagaatggcccggaccgggttaccaagcggccgcacactgatagtttaaactgaaggcgggaaacgacaatctgatcatgagcggagaattaagggagtcacgttatgacccccgccgatgacgcgggacaagccgttttacgtttggaactgacagaaccgcaacgattgaaggagccactcagccgcgggtttctggagtttaatgagctaagcacatacgtcagaaaccattattgcgcgttcaaaagtcgcctaaggtcactatcagctagcaaatatttcttgtcaaaaatgctccactgacgttccataaattcccctcggtatccaattagagtctcatattcactcccatggcggccaatgcgggcggcggtggagcgggaggaggcagcggcagcggcagcgtggctgcgccggcggtgtgccgccccagcggctcgcggtggacgccgacgccggagcagatcaggatgctgaaggagctctactacggctgcggcatccggtcgcccagctcggagcagatccagcgcatcaccgccatgctgcggcagcacggcaagatcgagggcaagaacgtcttctactggttccagaaccacaaggcccgcgagcgccagaagcgccgcctcaccagcctcgacgtcaacgtgcccgccgccggcgcggccgacgccaccaccagccaactcggcgtcctctcgctgtcgtcgccgccgccttcaggcgcggcgcctccctcgcccaccctcggcttctacgccgccggcaatggcggcggatcggctgtgctgctggacacgagttccgactggggcagcagcggcgctgctatggccaccgagacatgcttcctgcaggactacatgggcgtgacggacacgggcagctcgtcgcagtggccacgcttctcgtcgtcggacacgataatggcggcggccgcggcgcgggcggcgacgacgcgggcgcccgagacgctccctctcttcccgacctgcggcgacgacggcggcagcggtagcagcagctacttgccgttctggggtgccgcgtccacaactgccggcgccacttcttccgttgcgatccaacagcaacaccagctgcaggagcagtacagcttttacagcaacagcaacagcacccagctggccggcaccggcaaccaagacgtatcggcaacagcagcagcagccgccgccctggagctgagcctcagctcatggtgctccccttaccctgctgcagggagtatgtgagagcaacgcgagctgccactgctcttcactgatgtctctggaatggaaggaggaggaagtgagaacagatcattcgacaaagcagcattagtccgttgatcggtggaagaccactcgtcagtgttgagttgaatgtttgatcaataaaatacggcaatgctgtaagggttgttttttatgccattgataatacactgtactgttcagttgttgaactctatttcttagccatgccaagtgcttttcttattttgaataacattacagcaaaaagttgaaagacaaaaaaaaaaacccccgaacagagtgctttgggtcccaagcttctttagactgtgttcggcgttccccctaaatttctccccctatatctcactcacttgtcacatcagcgttctctttccccctatatctccacgctctacagcagttccacctatatcaaacctctataccccaccacaacaatattatatactttcatcttcaactaactcatgtaccttccaatttttttctactaataattatttacgtgcacagaaacttagcaaggagagagagagcgggaatttaaatgctcggcgttaggcttttagtccgctaggtggctagaccgaggttaggacgctagttcactaggggcctagtggtgttttaagacgtcacggtcaccacgcgtggaccgaagcttgcatgcctgcagtgcagcgtgacccggtcgtgcccctctctagagataatgagcattgcatgtctaagttataaaaaattaccacatattttttttgtcacacttgtttgaagtgcagtttatctatctttatacatatatttaaactttactctacgaataatataatctatagtactacaataatatcagtgttttagagaatcatataaatgaacagttagacatggtctaaaggacaattgagtattttgacaacaggactctacagttttatctttttagtgtgcatgtgttctcctttttttttgcaaatagcttcacctatataatacttcatccattttattagtacatccatttagggtttagggttaatggtttttatagactaatttttttagtacatctattttattctattttagcctctaaattaagaaaactaaaactctattttagtttttttatttaataatttagatataaaatagaataaaataaagtgactaaaaattaaacaaataccctttaagaaattaaaaaaactaaggaaacatttttcttgtttcgagtagataatgccagcctgttaaacgccgtcgacgagtctaacggacaccaaccagcgaaccagcagcgtcgcgtcgggccaagcgaagcagacggcacggcatctctgtcgctgcctctggacccctctcgagagttccgctccaccgttggacttgctccgctgtcggcatccagaaattgcgtggcggagcggcagacgtgagccggcacggcaggcggcctcctcctcctctcacggcaccggcagctacgggggattcctttcccaccgctccttcgctttcccttcctcgcccgccgtaataaatagacaccccctccacaccctctttccccaacctcgtgttgttcggagcgcacacacacacaaccagatctcccccaaatccacccgtcggcacctccgcttcaaggtacgccgctcgtcctcccccccccccctctctaccttctctagatcggcgttccggtccatgcatggttagggcccggtagttctacttctgttcatgtttgtgttagatccgtgtttgtgttagatccgtgctgctagcgttcgtacacggatgcgacctgtacgtcagacacgttctgattgctaacttgccagtgtttctctttggggaatcctgggatggctctagccgttccgcagacgggatcgatttcatgattttttttgtttcgttgcatagggtttggtttgcccttttcctttatttcaatatatgccgtgcacttgtttgtcgggtcatcttttcatgcttttttttgtcttggttgtgatgatgtggtctggttgggcggtcgttctagatcggagtagaattctgtttcaaactacctggtggatttattaattttggatctgtatgtgtgtgccatacatattcatagttacgaattgaagatgatggatggaaatatcgatctaggataggtatacatgttgatgcgggttttactgatgcatatacagagatgctttttgttcgcttggttgtgatgatgtggtgtggttgggcggtcgttcattcgttctagatcggagtagaatactgtttcaaactacctggtgtatttattaattttggaactgtatgtgtgtgtcatacatcttcatagttacgagtttaagatggatggaaatatcgatctaggataggtatacatgttgatgtgggttttactgatgcatatacatgatggcatatgcagcatctattcatatgctctaaccttgagtacctatctattataataaacaagtatgttttataattattttgatcttgatatacttggatgatggcatatgcagcagctatatgtggatttttttagcactgccttcatacgctatttatttgcttggtactgtttcttttgtcgatgctcaccctgttgtttggtgttacttctgcaggtcgactttaacttagcctaggatccatggccactgtgaacaactggctcgctttctccctctccccgcaggagctgccgccctcccagacgacggactccacactcatctcggccgccaccgccgaccatgtctccggcgatgtctgcttcaacatcccccaagattggagcatgaggggatcagagctttcggcgctcgtcgcggagccgaagctggaggacttcctcggcggcatctccttctccgagcagcatcacaaggccaactgcaacatgatacccagcactagcagcacagtttgctacgcgagctcaggtgctagcaccggctaccatcaccagctgtaccaccagcccaccagctcagcgctccacttcgcggactccgtaatggtggcttcctcggccggtgtccacgacggcggtgccatgctcagcgcggccgccgctaacggtgtcgctggcgctgccagtgccaacggcggcggcatcgggctgtccatgattaagaactggctgcggagccaaccggcgcccatgcagccgagggtggcggcggctgagggcgcgcaggggctctctttgtccatgaacatggcggggacgacccaaggcgctgctggcatgccacttctcgctggagagcgcgcacgggcgcccgagagtgtatcgacgtcagcacagggtggagccgtcgtcgtcacggcgccgaaggaggatagcggtggcagcggtgttgccggcgctctagtagccgtgagcacggacacgggtggcagcggcggcgcgtcggctgacaacacggcaaggaagacggtggacacgttcgggcagcgcacgtcgatttaccgtggcgtgacaaggcatagatggactgggagatatgaggcacatctttgggataacagttgcagaagggaagggcaaactcgtaagggtcgtcaagtctatttaggtggctatgataaagaggagaaagctgctagggcttatgatcttgctgctctgaagtactggggtgccacaacaacaacaaattttccagtgagtaactacgaaaaggagctcgaggacatgaagcacatgacaaggcaggagtttgtagcgtctctgagaaggaagagcagtggtttctccagaggtgcatccatttacaggggagtgactaggcatcaccaacatggaagatggcaagcacggattggacgagttgcagggaacaaggatctttacttgggcaccttcagcacccaggaggaggcagcggaggcgtacgacatcgcggcgatcaagttccgcggcctcaacgccgtcaccaacttcgacatgagccgctacgacgtgaagagcatcctggacagcagcgccctccccatcggcagcgccgccaagcgcctcaaggaggccgaggccgcagcgtccgcgcagcaccaccacgccggcgtggtgagctacgacgtcggccgcatcgcctcgcagctcggcgacggcggagccctggcggcggcgtacggcgcgcactaccacggcgccgcctggccgaccatcgcgttccagccgggcgccgccagcacaggcctgtaccacccgtacgcgcagcagccaatgcgcggcggcgggtggtgcaagcaggagcaggaccacgcggtgatcgcggccgcgcacagcctgcaggacctccaccacctgaacctgggcgcggccggcgcgcacgactttttctcggcagggcagcaggccgccgccgctgcgatgcacggcctgggtagcatcgacagtgcgtcgctcgagcacagcaccggctccaactccgtcgtctacaacggcggggtcggcgacagcaacggcgccagcgccgtcggcggcagtggcggtggctacatgatgccgatgagcgctgccggagcaaccactacatcggcaatggtgagccacgagcaggtgcatgcacgggcctacgacgaagccaagcaggctgctcagatggggtacgagagctacctggtgaacgcggagaacaatggtggcggaaggatgtctgcatgggggactgtcgtgtctgcagccgcggcggcagcagcaagcagcaacgacaacatggccgccgacgtcgggcatggcggcgcgcagctcttcagtgtctggaacgacacttaagcgtacctagtggtacctgacatcttatagtctgcaacctctcgtgtctgaattcctatctttatcaagtgttattgcttccacgactataggacagctttcgtcgaaagcttttgctcatgtgatctcgaaggattcatctagtctgatttttcgtgacttgtatcggttttattggattcatccaacatatatcaataaaaaatgagttgtgtttcctttcttcctagttcagttaaaattatttccctcctgcgcttgtgctgtaattgtctgtgtacctgttgtttgtgactgtgttagttcccttggatatgatttcgtatttgatatgtacatggagatagcttagcttcattattggagtatgaagttagtatgacatagtcactctcctggaaaattgacactgcaaaccatatttttattctgaaccacaaatcctagtcagtccgctggcatatgccgtccgtttgctgaatccagaacgtgggtttggagatgtacggctgagatgcctctatgcgaaggggatttcgtggtgaaacgagatgggagtagagcaacgcccgtggaagatgcttcaaacttccacacttttgagcaacgatcggcagtagtaaggtagacgatttcaagatcaaagcatatgaagataaacaacatcaacaacaaaatttgttggggttctatagagagaaacagagctacatacatacactgttttgtatctaccatctgagatgatgaaaagatgaaaaactaaagaatgccccggcgccaacgccaggacacgccgcgcgcgcgtcacccgagccatctcttgacccagccggcgctgtatatttacacacgttgcagcatcgatcaccacctgttcgatcgcgtcgccgtcaccggcgcgccgcgacttattgaactagtctagggcgcggctaacaacctagcttagattgccttgtctaaacccttaggctaacgcgccacggtaacccggtccgggcctagaaggccccagagctggtcaccccatacgattggaagcttcaagtttgtacaaaaaagcaggctccggccagagttacccggaccgaagcttgcatgcctgcagtgcagcgtgacccggtcgtgcccctctctagagataatgagcattgcatgtctaagttataaaaaattaccacatattttttttgtcacacttgtttgaagtgcagtttatctatctttatacatatatttaaactttactctacgaataatataatctatagtactacaataatatcagtgttttagagaatcatataaatgaacagttagacatggtctaaaggacaattgagtattttgacaacaggactctacagttttatctttttagtgtgcatgtgttctcctttttttttgcaaatagcttcacctatataatacttcatccattttattagtacatccatttagggtttagggttaatggtttttatagactaatttttttagtacatctattttattctattttagcctctaaattaagaaaactaaaactctattttagtttttttatttaataatttagatataaaatagaataaaataaagtgactaaaaattaaacaaataccctttaagaaattaaaaaaactaaggaaacatttttcttgtttcgagtagataatgccagcctgttaaacgccgtcgacgagtctaacggacaccaaccagcgaaccagcagcgtcgcgtcgggccaagcgaagcagacggcacggcatctctgtcgctgcctctggacccctctcgagagttccgctccaccgttggacttgctccgctgtcggcatccagaaattgcgtggcggagcggcagacgtgagccggcacggcaggcggcctcctcctcctctcacggcaccggcagctacgggggattcctttcccaccgctccttcgctttcccttcctcgcccgccgtaataaatagacaccccctccacaccctctttccccaacctcgtgttgttcggagcgcacacacacacaaccagatctcccccaaatccacccgtcggcacctccgcttcaaggtacgccgctcgtcctcccccccccccctctctaccttctctagatcggcgttccggtccatgcatggttagggcccggtagttctacttctgttcatgtttgtgttagatccgtgtttgtgttagatccgtgctgctagcgttcgtacacggatgcgacctgtacgtcagacacgttctgattgctaacttgccagtgtttctctttggggaatcctgggatggctctagccgttccgcagacgggatcgatttcatgattttttttgtttcgttgcatagggtttggtttgcccttttcctttatttcaatatatgccgtgcacttgtttgtcgggtcatcttttcatgcttttttttgtcttggttgtgatgatgtggtctggttgggcggtcgttctagatcggagtagaattctgtttcaaactacctggtggatttattaattttggatctgtatgtgtgtgccatacatattcatagttacgaattgaagatgatggatggaaatatcgatctaggataggtatacatgttgatgcgggttttactgatgcatatacagagatgctttttgttcgcttggttgtgatgatgtggtgtggttgggcggtcgttcattcgttctagatcggagtagaatactgtttcaaactacctggtgtatttattaattttggaactgtatgtgtgtgtcatacatcttcatagttacgagtttaagatggatggaaatatcgatctaggataggtatacatgttgatgtgggttttactgatgcatatacatgatggcatatgcagcatctattcatatgctctaaccttgagtacctatctattataataaacaagtatgttttataattattttgatcttgatatacttggatgatggcatatgcagcagctatatgtggatttttttagccctgccttcatacgctatttatttgcttggtactgtttcttttgtcgatgctcaccctgttgtttggtgttacttctgcaggtcgactttaacttagcctaggatccatgagcagcagcaagcacagcagcgtgttcaactacagcgccctgttcctgagcctgttcctgcagcagatggaccagaacagcctgcaccacctggacagcccgaagatcgagaacgagtacgagccggacagcctgtacgacatgctggacaagctgccgccgctggacagcctgctggacatggaggacctgaagccgaacgccggcctgcacttccagttccactacaacagcttcgaggacttcttcgagaacatcgaggtggacaacaccatcccgagcgacatccacctgctgacccaggagccgtacttcagcagcgacagcagcagcagcagcccgctggccatccagaacgacggcctgatcagcaacgtgaaggtggagaaggtgaccgtgaagaagaagaggaacctgaagaagaagaggcaggacaagctggagatgagcgagatcaagcagttcttcgacaggccgatcatgaaggccgccaaggagctgaacgtgggcctgaccgtgctgaagaagaggtgcagggagctgggcatctacaggtggccgcacaggaagctgaagagcctgaacagcctgatcaagaacctgaagaacgtgggcatggaggaggaggtgaagaacctggaggagcacaggttcctgatcgagcaggagccggacgccgagctgagcgacggcaccaagaagctgaggcaggcctgcttcaaggccaactacaagaggaggaagagcctgggcgacgactactactaaggtaccgttaacagatctactaactatctatactgtaataatgttgtatagccgccggatagctagctagtttagtcattcagcggcgatgggtaataataaagtgtcatccatccatcaccatgcgtggcaacgtgagcaatgacctgattgaacaaattgaaatgaaaagaagaaatatgttatatgtcaacgagatttcctcataatgccactgacgacgtgtgtccaagaaatgtatcagtgatacgtatattcacaatttttttatgacttatactcacaatttgtttttttactacttatactcacaatttgttgtgcgtaccataacaatttcgatcgaatatatatcagaaagttgacgaaagtaagctcactcaaaaagttaaatgggctgcggaagctgcgtcaggcccaagttttggctattctatccggtatccacgattttgatggctgagggacatatgttcgcttaagcttcggtccgggcctagaaggccgatctcccgggcacccagctttcttgtacaaagtggccgttaacggatcggccagaatggcccggaccgggttaccgaattcgagctcggtaccctggttcacaaactcaatacaacacacagtggagtagggtattacgctccggcggcccgaaccactctaaatccttgtgtcctcgtgtgctcttccaccattaatgactgtaattgcagggacacgaagagttgtagcgcttttgccaacaagatccgctatatgctagtagagtggaacctgcacagcaacaagcatccaataatctgagaataagaattatgtgtggtgatggttctcatctctgcaactcgccattttcgcgagagaaccaaatccaagttggtgaagatcatgatttgggctcatgggctggcatagtagctattacctttgcaattgtggttcgaatctatccgatattctccttttcagggagagctaatgcttatgcttattgggtattttggtttgacactgcttcacgcccaaaaaaaggcaactatgtctgagttggatatggcccaaaaaaaggcagctatgtctgagttggatatggaagtcttctttcgtttagggtgaagtaagaccaagctcatgagcttattatcttaggtcggaacaaattagttgataggcatggcacatttatcaaattataatgattttaacagaaaagcaacacctctttttcagcagcaccagctttgcaagctgcaattgacactccaagcatagtatttgctccaaactcagcctgcatttcgcacaatatcatatctatttccatttggataaaatatattttccagaaatatgggaacagaatcaagatacagaaaaaagttgtggtagtagtggtaagtggaaacacaagtacagtgaaaagatagcattatttctgaacagtcaaattaaccgaaataagtagtatcacatactgcccctaaattgactacacccaatgtaaagaattgcttgagcatattgagccatcagttgtttgtttgtgtaacggatttgacaatgcagagttcaggagcaaaaaaccgcaaaggagagaaagagggaaaggatctcctagtatcccaccttgtggcgcgccctgtcaagtgcatgatggcctggtcgatctgcgtctgctgctgcggttccatcccaacgagtgcctccgacaccttgtcgttgatcacccgcaccgcgtaggcgacccccctggcgaggaacttccgcctctcggaggccccggccgcgtcggcggcggcgccctcgagcgcgcccacgctagccgtagatgctcggtgcacggccttgttggtgtgcaactcgacctcaacggccggtgcgctacgcccgtcaaggatctggcgcgcccgcaccctcgtgatcacggtgggcgcctcccgcctcatgtggccgacgatgaaaagcgccgggttaggggccttggcgcgcaccgccgtattcagggcctcctcgctcttgcgcgagagcaggtgcttccccaggtactcctgcactgacaaggctgccacagcggtggaatttgtcctcacgacttcgccacgtcgtcctcacctccctggcttcccacgactccgccgtatcgaggtgctcggtgggtcgtcttaatccgaagtccgaactaggaagacgagacagagaggtctgaggaatgggcctcgtttgatgttgagctgaattatttttccagcataagcccaggtcttggtccatgaacaaaattactagaaacccagcccagtactacgatctaaaagagggactgccactggatagctctctctagcattctccacgctccaatacagcggcgtcgtgtctatccgggtctatccgcgaacacgtgagaactctccagaaactgctttctcctccacttcatctctctcgctttccctctataaaaagaccccttctaggaattgagggagacagcaagcaccaagcagcgatccgaagctcaatcaattcactcaaacctcttccccaaatcttcgattagatcttcgttgacaagaagactagaaccgaacctgacatgtccaacctgctcacggttcaccagaaccttccggctcttccagtggacgcgacgtccgatgaagtcaggaagaacctcatggacatgttccgcgacaggcaagcgttcagcgagcacacctggaagatgctgctctccgtctgccgctcctgggctgcatggtgcaagctgaacaacaggaagtggttccccgctgagcccgaggacgtgagggattaccttctgtacctgcaagcgcgaggtttgtttctgcttctacctttgatatatatataataattatcattaattagtagtaatataatatttcaaatatttttttcaaaataaaagaatgtagtatatagcaattgcttttctgtagtttataagtgtgtatattttaatttataacttttctaatatatgaccaaaacatggtgatgcctaggtctggcagtgaagaccatccagcaacaccttggacaactgaacatgcttcacaggcgctccggcctcccgcgccccagcgactcgaacgccgtgagcctcgtcatgcgccgcatcaggaaggaaaacgtcgatgccggcgaaagggcaaagcaggccctcgcgttcgagaggaccgatttcgaccaggtccgcagcctgatggagaacagcgacaggtgccaggacattaggaacctggcgttcctcggaattgcatacaacacgctcctcaggatcgcggaaattgcccgcattcgcgtgaaggacattagccgcaccgacggcggcaggatgcttatccacattggcaggaccaagacgctcgtttccaccgcaggcgtcgaaaaggccctcagcctcggagtgaccaagctcgtcgaacgctggatctccgtgtccggcgtcgcggacgacccaaacaactacctcttctgccgcgtccgcaagaacggggtggctgcccctagcgccaccagccaactcagcacgagggccttggaaggtattttcgaggccacccaccgcctgatctacggcgcgaaggatgacagcggtcaacgctacctcgcatggtccgggcactccgcccgcgttggagctgctagggacatggcccgcgccggtgtttccatccccgaaatcatgcaggcgggtggatggacgaacgtgaacattgtcatgaactacattcgcaaccttgacagcgagacgggcgcaatggttcgcctcctggaagatggtgactgaggtacccaacctagacttgtccatcttctggattggccaacttaattaatgtatgaaataaaaggatgcacacatagtgacatgctaatcactataatgtgggcatcaaagttgtgtgttatgtgtaattactagttatctgaataaaagagaaagagatcatccatatttcttatcctaaatgaatgtcacgtgtctttataattctttgatgaaccagatgcatttcattaaccaaatccatatacatataaatattaatcatatataattaatatcaattgggttagcaaaacaaatctagtctaggtgtgttttgcgatccgatatcgaattggccacggtaccagctgctgctgttctagggttcacaagtctgcctatttgtcttccccaatggagctatggttgtctggtctggtccttggtcgtgtcccgtttcattgtgtactatttacctgtaatgtgtatccttaagtctggtttgatggtgtctgaaacgttttgctgtggtagagcagcatggaagaactataatgaataagtgatccctaatcattgtgtccaaattttgcttctgctatacccttttgtgctgtttcttatgttttgcttaaaaatttgatctgacaaacaaatttgtctaaattatgctcttgttctgactgtgtactgtacacatttgtattgctaccggtttggcacatagttttctctttgattgcagatcaaacccttctgattgcagattgcttggctatggctgatgtgctcactgttcttctttagcttgtatattgctgatggtggcttggctacggctgaaaaagttgctgctgcgccgacttggcaactgttgctccagtaatgctttgtcctctcttcctagccgccgacttggcacttggcagctgttgctcctgtaatgcgttgttatctcttatctcttgagatgtactatgattttgaggctgtttgacttgtgccagattgccagtgctgatgctatattatctcaggtttttatgctagtatatgttttactgtgtgctgcctgtgtcgagttacgtaatctattgaaccgctatgcgtgttgatgccctgttgttgcttgccagattgatgcccctgttgcttgcagcttgcaagctgtagtgaaatcctaaaattccaaaccaaatctattctgaacttttgaagatctgtgatgtccggaagaaaagattcaaacagataaacgggactctccagaatctataaaataaatgatcgacaaacgctttgctttggtaggcttcaagcttggtcacccggtccgggcctagaaggccagcttcggccgccccgggcaactttattatacaaagttgatagataaatcagatatctggttcctaaggacccggcggaccgattaaactgattcggtccgacgcgttacctaataacttcgtatagcatacattatacgaagttattagctaactaactagtaagcttaagccatgggtcgacggatccgttaactagcgtggcatttggcaccgccgcacactatgcgagctaggagtgctagtttacagatgaaactatgaaaccaagaaaacacaattgtccgtagctagcgcgtggcgtcgtgtcaagcttcacacagtatcttcgttcttcactataaatcgcgcctgttgttcgtgagacccaccaccgtggataacagtcccctaataataagcgatcaacagcactgctgatggctgaacaccgaggcgccgccgcgcgtaaccatccgccggagcagcccgtcgtgccggcgaacgacgccttccccgaccgcgcccagcagctctgcctcgacgccgggcgcgcgctcgcgatgtgcggcgtgctcgtcgccgtccctcccgcattttacgcgtcgacgtcgcggacgacaccgcacttgccttcgtcggcttcgtcctctggatcatcggtgcgtggctgtgcctcctggcgctcacgcccttggctccacgggcggtgagggcgggcggggccgccgccagcaccttgctgatcaggtgcctgtccctttcatgaactactagcgcccgcgcccgcggccgccgggcacaagagaacacatcgatgttcgctgcgtacgtcagcaataaggcactctttgtcagtagtcgagtgcatatgttgggtgtttgccctgggagatttcaagtgttgtggccattatcccgcaggataaaaaatcggcggcttttggattgatacggaaaataacgatgtttcatgctcgtgttgtgtgtgtgacatcttgtcagccaagtttttaaccgttgctactccccctctgtgggctcagtgtgtggaccggaatacgtcgtacataggccgtagcctaagcccaatatgccgtttttcaggttggcctgtgtgacgacaagcgggtctcaaaagcccatcacgcaactggcctgcaattattggaggagagcgcgtcgagttggttccagaggctgcgtggtggggccggactctgcgacgacctctcgttcgcgtccgatttggttgccgtgagccgtgacgtaacgcctccttccgttcctccctatataagttccacccccgggtccggtttccccaagccccagtgacccccgatcccgatcgcgaaatctccgcacccgccggcaagggaccgaagcaagcctctctcccgaccgtcgcatcaaggtacgcgtccgctcgatctgtcctcttccttctcgatttgacttgctgtggtgcccgatcacgggatcagaatcgcaccagtgtagatttcgcatgttctaagatgtgttagtttccaggctaatccagttctcttgacgcccgatccgatcgagctccgtgtttatttcagcctaatcgtagtattcccctaaaatttcctcattagggggttcgcaagattgttggtcgacaggttcacttatgctcgatcgcttacttttagtcgattcatgctgcgtactattgttgccccccgtggttttatcttttctcgtgtgaaatccagtagatatagtagatatcgtagcattaggttttaattcaatcgattgattattgtatcatcaaaattgagaagttcgaatcatgcctatcatgctgcctcaaccgaaatcctgtatattgaagtttcaattcaattgattgatcattcattagattcaaccaaaatctagaaggttagatgacgcatgtcatgctgcctgcgtagtttacctttgatctgtttatgattaccttatcagtaggatatttgtgattttgggaagtagcactaactgattcatgctgacatgatgttccctttcagattatactgttgagtcctatctaattgatgctttgtatgctatatgaatacgtcatggtaaattagcagttaattagcatattagcaattgggcgtacctcatcaggattgctcttgtagatgtgtgtggtgatgtttcttgttcaattcatgttctgctttaaaagtatgtgttctctgtttgttaattaagattcatggttataatgatttggacctaattaatcagggttgcccttttagatgcgtggttacttgttgagttcatttttttcctgctatagttgtatgcgtttgttcattcatggttagatttgatttgtttcttctctattccatgccttccatatacttcaattgtagcttaacatgagatttctgtatatgcaggtcgaccgccggggatccacacgacaccatggcccagtccaagcacggcctgaccaaggagatgaccatgaagtaccgcatggagggctgcgtggacggccacaagttcgtgatcaccggcgagggcatcggctaccccttcaagggcaagcaggccatcaacctgtgcgtggtggagggcggccccttgcccttcgccgaggacatcttgtccgccgccttcatgtacggcaaccgcgtgttcaccgagtacccccaggacatcgtcgactacttcaagaactcctgccccgccggctacacctgggaccgctccttcctgttcgaggacggcgccgtgtgcatctgcaacgccgacatcaccgtgagcgtggaggagaactgcatgtaccacgagtccaagttctacggcgtgaacttccccgccgacggccccgtgatgaagaagatgaccgacaactgggagccctcctgcgagaagatcatccccgtgcccaagcagggcatcttgaagggcgacgtgagcatgtacctgctgctgaaggacggtggccgcttgcgctgccagttcgacaccgtgtacaaggccaagtccgtgccccgcaagatgcccgactggcacttcatccagcacaagctgacccgcgaggaccgcagcgacgccaagaaccagaagtggcacctgaccgagcacgccatcgcctccggctccgccttgccctccggactcagatctcgatagagtcaacctagacttgtccatcttctggattggccaacttaattaatgtatgaaataaaaggatgcacacatagtgacatgctaatcactataatgtgggcatcaaagttgtgtgttatgtgtaattactagttatctgaataaaagagaaagagatcatccatatttcttatcctaaatgaatgtcacgtgtctttataattctttgatgaaccagatgcatttcattaaccaaatccatatacatataaatattaatcatatataattaatatcaattgggttagcaaaacaaatctagtctaggtgtgttttgcgaattgcggcgcccttactttaacgcctctaaccaacacccctttatctttataaggaacaataaacagaatttgccccactgttctaaatcacctaataatatccccagctaaaaacaataaaggtttcctagaattaagacaagcatgactgttcctccaggagggtttggaacattgttgcagtcttgcagatacgggcgaagggtgagaaacagagcggagggctggaggtgacctcggtagtcgacgccggagttgagcttgacaacgacggggcggcccctgatggacttgaggaagtccgatggcgtcttcaccgtcccgccggcgcccgaggcgggcctgtcgctgccgccgccgccgctgctcatcttgcgcgctgtgcccccggcggtgtccctgtgttgcggatcgcgggtgggccaggtggatgcgagggcgacccgtttggactccggccggagccgccggatccctggtcggtgtcagtgccgtttactctgggccccacgtgtcagtaccgtctgtagatgacaacaacccgtcgtccacagtcatgtccaaaatatcctttcttcttttttttcgattcggatatctatcttccttttttttttccaaaaatcttcttgacgcaccagcgcgcacgtttgtggtaaacgccgacacgtcggtcccacgtcgatagaccccacccaccagtgagtagcgtgtacgtattcgggggtgacggacgtgtcgccgtcgtcttgctagtcccattcccatctgagccacacatctctgaacaaaaaaaaggagggaggcctccacgcacatccccctccgtgccacccgccccaaaccctcgcgccgcctccgagacagccgccgcaaccatggccaccgccgccgccgcgtctaccgcgctcactggcgccactaccgctgcgcccaaggcgaggcgccgggcgcacctcctggccacccgccgcgccctcgccgcgcccatcaggtgctcagcggcgtcacccgccatgccgatggctcccccggccaccccgctccggccgtggggccccaccgagccccgcaagggtgctgacatcctcgtcgagtccctcgagcgctgcggcgtccgcgacgtcttcgcctaccccggcggcgcgtccatggagatccaccaggcactcacccgctcccccgtcatcgccaaccacctcttccgccacgagcaaggggaggcctttgccgcctccggctacgcgcgctcctcgggccgcgtcggcgtctgcatcgccacctccggccccggcgccaccaacctagtctccgcgctcgccgacgcgctgctcgattccgtccccatggtcgccatcacgggacaggtggcgcgacgcatgattggcaccgacgccttccaggagacgcccatcgtcgaggtcacccgctccatcaccaagcacaactacctggtcctcgacgtcgacgacatcccccgcgtcgtgcaggaggctttcttcctcgcctcctctggtcgaccagggccggtgcttgtcgacatccccaaggacatccagcagcagatggcggtgcctgtctgggacaagcccatgagtctgcctgggtacattgcgcgccttcccaagccccctgcgactgagttgcttgagcaggtgctgcgtcttgttggtgaatcgcggcgccctgttctttatgtgggcggtggctgcgcagcatctggtgaggagttgcgacgctttgtggagctgactggaatcccggtcacaactactcttatgggcctcggcaacttccccagcgacgacccactgtctctgcgcatgctaggtatgcatgggacggtgtatgcaaattatgcagtggataaggccgatctgttgcttgcacttggtgtgcggtttgatgatcgcgtgacagggaagattgaggcttttgcaagcagggctaagattgtgcacgttgatattgatccggctgagattggcaagaacaagcagccacatgtgtccatctgtgcagatgttaagcttgctttgcagggcatgaatgctcttcttgaaggaagcacatcaaagaagagctttgactttggctcatggaacgatgagttggatcagcagaagagggaattcccccttgggtataaaacatctaatgaggagatccagccacaatatgctattcaggttcttgatgagctgacgaaaggcgaggccatcatcggcacaggtgttgggcagcaccagatgtgggcggcacagtactacacttacaagcggccaaggcagtggttgtcttcagctggtcttggggctatgggatttggtttgccggctgctgctggtgcttctgtggcaaacccaggtgtcactgttgttgacatcgatggagatggtagctttctcatgaacgttcaggagctagctatgatccgaattgagaacctcccagtgaaggtctttgtgctaaacaaccagcacctggggatggtggtgcagttggaggacaggttctataaggccaacagagcgcacacatacttgggaaacccagagaatgaaagtgagatatatccagatttcgtgacgatcgccaaagggttcaacattccagcggtccgtgtgacaaagaagaacgaagtccgcgcagcgataaagaagatgctcgagactccagggccgtacctcttggatataatcgtcccacaccaggagcatgtgttgcctatgatccctagtggtggggctttcaaggatatgatcctggatggtgatggcaggactgtgtactgactagctagtcagttaacagatctgccagatcctcggtgtacaaataacccgtcttatcctatgagacgggccggcgtcagtgtgttctggaggaatttttatgtcagagcctttttctttgtgtgcttgatgtagatgccaagggaagcttattggctgttgaagcttgatgcaaaataaattatggaactctgttttttgtttatctaataataactagcaaatatgcttccattgcattgaaactaacagccttttgtgtttccaagttttattttgtgacaatgtcatctatttcaattagttgtggaatcggaaacttgcaggactaacttggaaactccaatccctcagcatcctggactttttcctggtgtaatccatgtagatattattttaatcatcattttagttctggaggtttttccatctccggttttgctcccctttcttcaaaaaaaaaaaaaaaatgccgtaggcgccgcaacgcccacctgttgttcaaactcatgggcacgagtggctcgaagattttatacaacaattgctgtagtttcaccgttgctggtgaagaagcatttttttaaaaaaatatagtggtattcattttaattagtttagttgtgcagcgagcaaaatttggacatgctctgctcggaatctgatcgacctagacacagattagcagcagtagctttgtcatctgttccaagagttgcgatctgatagaagaaaaaaaaaccttcccttcaatgtaaaaccgaaactaacaagaaagaagcacagtgccgtttaggcaagtatggagtacgtattaagcatgtagaaggccatgcatgaaccactaacaagaaagaagcgcagtgccattcaggcaagcataagcatgtagattggcatgcatgaacaactaacagtagatcgtctctggtctgattagaagttttttgggaagccaagaaatcatgtacaactggttccatctcaaattccgtggcaaaaagaggcctaagcaacatacctcgagtagatcacattcaagcttggtcacccggtccgtcaatattctgattccgatgacttcgtaggttcctagctcaagccgctcgtgtccaagcgtcacttacgattagctaatgattacggcatctaggaccgactagtggcgcgccgactagctagctaaggtaccgagctcgaattcattccgattaatcgtggcctcttgctcttcaggatgaagagctatgtttaaacgtgcaagcgctactagacaattcagtacattaaaaacgtccgcaatgtgttattaagttgtctaagcgtcaatttgtttacaccacaatatatcctgcca

SEQ ID NO: 56 - DNA, 25489 bp, Artificial sequence
  PHP95892
gtttacccgccaatatatcctgtcaaacactgatagtttaaactgaaggcgggaaacgacaatctgatcatgagcggagaattaagggagtcacgttatgacccccgccgatgacgcgggacaagccgttttacgtttggaactgacagaaccgcaacgttgaaggagccactcagcaagctggtacgattgtaatacgactcactatagggcgaattgagcgctgtttaaacgctcttcaactggaagagcggttacgctgtttaaacgctcttcaactggaagagcggttactaccggttcactagctagctgctaatcgagctagttaccctatgaggtgacatgaagcgctcacggttactatgacggttagcttcacgactgttggtggcagtagcgtacgacttagctatagttccggacttacccttaagcgatttaaatctgcggttaccgaattcgagctcggtacctagtacccttgtacttttggtttcacctgcatagagaaaacccacaagaatatgacagtctgatttgtcagtctcattctcaagcaacatttctctatccgttactttcatggtgaataacacaatccatcatcaatactttgtgttactcagaaactgaaagttattccgagtcttgcatatctttggacctactcgtttttctaccattattgctgattgttaagctctcgctacttgaatcggcattgttggagtgggaaggttcaaaaaattggagttatgactagttgtctctttctatgtacgatggagaaaatgaataaacaactgagaaaatggctcttgtttagttgatgatgctcttaagctttccactggttgccatatatgatttgggcatttcactttgatcttaatgggccttgtaaagcccaagactcatgattatctttagttgatgctcttaattaggtgtgggcaaataattcaaactgtatgtacccgaccaaaaccaaagcaaaaataatcgaaccaaaccgaaaatttaaaaataaccgaatgaaaactaaatcctataactgaaagaactgaaaccgaatcaaaatatttaatgtaaccaaaaatatccgaaatataattatattgtcaaaaatattaataatttctagattaaataattaaaaatacttaaaaatttatataaaatagtaaaaatactcgaaaataaccacaaatattcaaaaacaaccgaaatatcccaaaatattcaaagcaaaataaccgaatggataccaaattttaaaaccgaaaaaactggaacaaaaccaaaatcgaaccaaaatttcaaaaatcgaataaatactaaactttagaacaaaaaaaaacgataaccgaatgtatacgaaccaaagccgaattagataaccgaacgtccaggactactcttaatctttccgccacttatgatttgggctattactttgtttataatgagccttttcaagctcaagttcatgattgtccgtgagatgagaaactgacttgttggattcgaaaccctagctagtattggttaatacttaatacataaatgacctgcattgacatcatcatccaagaaaataaaaattgtatgcttgagatatttagttttcctagctaggttttctttattttagtaccgaatctttaggtgtgccacgttaatttagacccattttttcatacttaccaactgagtctagtttaatcatgactataatcgtataaaatgattcagtcgacgtcattgcgaacgtatataaaatcatccaaattgacgtcattccaaagaggtaagcatgcttatctaagagtccgagcatactaaacaagacgacattttatttgcactccaaatcaaattttgtattgcctaaagaaaaacaatcaaactcaagtttcttaaaattaatttcattcaaactaatcactttcaatatctcacatattattcatgccatttctatttgtctaaacatgatttaaaaaaaaaagtaaaatacaaagattactatgcaaaaactctataaaaaaaaattcaaatttcttatttatttgtgacatcaaattttcaaaataatttttttaattatcggttgatccggtcagtcgataaaaacataaactttcagcgaccgttaaaactttcctactaccgatttagagaaaatcttagcttgaaacgtaattgtaacctgccttcatgcaagtcgcaagatatgtcatcctaagttgtatatgttttctcaaaagatgtatttacttgagaaaatacgtttcaacgttgatggacaaccaattaagaatcaagcacctttcgtaatcaatttaggcttatcgtctaaggtatactgatttacgacagttgactagacttataaggaacaaaataatagaatagtttctaaacacttcacctaatcatagagactaagatggtaattcgtaaacgacaaagcctagtgacactgtccattgtaaaattccacatcatattagtattaaacatatacatgtagtttcctgaacacatgtagtatcaaacacacttcgtggcttcttcctcgaaacctgcggccgcgctatagttccggacttacccttaagataacttcgtatagcatacattatacgaagttatgggcccacgcgtgaagagcggttaccagagctggtcacctttgtccaccaagatggaactgtcttcggccagaatggccatctggattcagcaggcctagaaggccatttatcgctatcaactttgtatagaaaagttgggccgagctcggtacggccagaatggcccggaccgggttaccaagcggccgcacactgatagtttaaactgaaggcgggaaacgacaatctgatcatgagcggagaattaagggagtcacgttatgacccccgccgatgacgcgggacaagccgttttacgtttggaactgacagaaccgcaacgattgaaggagccactcagccgcgggtttctggagtttaatgagctaagcacatacgtcagaaaccattattgcgcgttcaaaagtcgcctaaggtcactatcagctagcaaatatttcttgtcaaaaatgctccactgacgttccataaattcccctcggtatccaattagagtctcatattcactcccatggcggccaatgcgggcggcggtggagcgggaggaggcagcggcagcggcagcgtggctgcgccggcggtgtgccgccccagcggctcgcggtggacgccgacgccggagcagatcaggatgctgaaggagctctactacggctgcggcatccggtcgcccagctcggagcagatccagcgcatcaccgccatgctgcggcagcacggcaagatcgagggcaagaacgtcttctactggttccagaaccacaaggcccgcgagcgccagaagcgccgcctcaccagcctcgacgtcaacgtgcccgccgccggcgcggccgacgccaccaccagccaactcggcgtcctctcgctgtcgtcgccgccgccttcaggcgcggcgcctccctcgcccaccctcggcttctacgccgccggcaatggcggcggatcggctgtgctgctggacacgagttccgactggggcagcagcggcgctgctatggccaccgagacatgcttcctgcaggactacatgggcgtgacggacacgggcagctcgtcgcagtggccacgcttctcgtcgtcggacacgataatggcggcggccgcggcgcgggcggcgacgacgcgggcgcccgagacgctccctctcttcccgacctgcggcgacgacggcggcagcggtagcagcagctacttgccgttctggggtgccgcgtccacaactgccggcgccacttcttccgttgcgatccaacagcaacaccagctgcaggagcagtacagcttttacagcaacagcaacagcacccagctggccggcaccggcaaccaagacgtatcggcaacagcagcagcagccgccgccctggagctgagcctcagctcatggtgctccccttaccctgctgcagggagtatgtgagagcaacgcgagctgccactgctcttcactgatgtctctggaatggaaggaggaggaagtgagaacagatcattcgacaaagcagcattagtccgttgatcggtggaagaccactcgtcagtgttgagttgaatgtttgatcaataaaatacggcaatgctgtaagggttgttttttatgccattgataatacactgtactgttcagttgttgaactctatttcttagccatgccaagtgcttttcttattttgaataacattacagcaaaaagttgaaagacaaaaaaaaaaacccccgaacagagtgctttgggtcccaagcttctttagactgtgttcggcgttccccctaaatttctccccctatatctcactcacttgtcacatcagcgttctctttccccctatatctccacgctctacagcagttccacctatatcaaacctctataccccaccacaacaatattatatactttcatcttcaactaactcatgtaccttccaatttttttctactaataattatttacgtgcacagaaacttagcaaggagagagagagcgggaatttaaatgctcggcgttaggcttttagtccgctaggtggctagaccgaggttaggacgctagttcactaggggcctagtggtgttttaagacgtcacggtcaccacgcgtggaccgaagcttgcatgcctgcagtgcagcgtgacccggtcgtgcccctctctagagataatgagcattgcatgtctaagttataaaaaattaccacatattttttttgtcacacttgtttgaagtgcagtttatctatctttatacatatatttaaactttactctacgaataatataatctatagtactacaataatatcagtgttttagagaatcatataaatgaacagttagacatggtctaaaggacaattgagtattttgacaacaggactctacagttttatctttttagtgtgcatgtgttctcctttttttttgcaaatagcttcacctatataatacttcatccattttattagtacatccatttagggtttagggttaatggtttttatagactaatttttttagtacatctattttattctattttagcctctaaattaagaaaactaaaactctattttagtttttttatttaataatttagatataaaatagaataaaataaagtgactaaaaattaaacaaataccctttaagaaattaaaaaaactaaggaaacatttttcttgtttcgagtagataatgccagcctgttaaacgccgtcgacgagtctaacggacaccaaccagcgaaccagcagcgtcgcgtcgggccaagcgaagcagacggcacggcatctctgtcgctgcctctggacccctctcgagagttccgctccaccgttggacttgctccgctgtcggcatccagaaattgcgtggcggagcggcagacgtgagccggcacggcaggcggcctcctcctcctctcacggcaccggcagctacgggggattcctttcccaccgctccttcgctttcccttcctcgcccgccgtaataaatagacaccccctccacaccctctttccccaacctcgtgttgttcggagcgcacacacacacaaccagatctcccccaaatccacccgtcggcacctccgcttcaaggtacgccgctcgtcctcccccccccccctctctaccttctctagatcggcgttccggtccatgcatggttagggcccggtagttctacttctgttcatgtttgtgttagatccgtgtttgtgttagatccgtgctgctagcgttcgtacacggatgcgacctgtacgtcagacacgttctgattgctaacttgccagtgtttctctttggggaatcctgggatggctctagccgttccgcagacgggatcgatttcatgattttttttgtttcgttgcatagggtttggtttgcccttttcctttatttcaatatatgccgtgcacttgtttgtcgggtcatcttttcatgcttttttttgtcttggttgtgatgatgtggtctggttgggcggtcgttctagatcggagtagaattctgtttcaaactacctggtggatttattaattttggatctgtatgtgtgtgccatacatattcatagttacgaattgaagatgatggatggaaatatcgatctaggataggtatacatgttgatgcgggttttactgatgcatatacagagatgctttttgttcgcttggttgtgatgatgtggtgtggttgggcggtcgttcattcgttctagatcggagtagaatactgtttcaaactacctggtgtatttattaattttggaactgtatgtgtgtgtcatacatcttcatagttacgagtttaagatggatggaaatatcgatctaggataggtatacatgttgatgtgggttttactgatgcatatacatgatggcatatgcagcatctattcatatgctctaaccttgagtacctatctattataataaacaagtatgttttataattattttgatcttgatatacttggatgatggcatatgcagcagctatatgtggatttttttagcactgccttcatacgctatttatttgcttggtactgtttcttttgtcgatgctcaccctgttgtttggtgttacttctgcaggtcgactttaacttagcctaggatccatggccactgtgaacaactggctcgctttctccctctccccgcaggagctgccgccctcccagacgacggactccacactcatctcggccgccaccgccgaccatgtctccggcgatgtctgcttcaacatcccccaagattggagcatgaggggatcagagctttcggcgctcgtcgcggagccgaagctggaggacttcctcggcggcatctccttctccgagcagcatcacaaggccaactgcaacatgatacccagcactagcagcacagtttgctacgcgagctcaggtgctagcaccggctaccatcaccagctgtaccaccagcccaccagctcagcgctccacttcgcggactccgtaatggtggcttcctcggccggtgtccacgacggcggtgccatgctcagcgcggccgccgctaacggtgtcgctggcgctgccagtgccaacggcggcggcatcgggctgtccatgattaagaactggctgcggagccaaccggcgcccatgcagccgagggtggcggcggctgagggcgcgcaggggctctctttgtccatgaacatggcggggacgacccaaggcgctgctggcatgccacttctcgctggagagcgcgcacgggcgcccgagagtgtatcgacgtcagcacagggtggagccgtcgtcgtcacggcgccgaaggaggatagcggtggcagcggtgttgccggcgctctagtagccgtgagcacggacacgggtggcagcggcggcgcgtcggctgacaacacggcaaggaagacggtggacacgttcgggcagcgcacgtcgatttaccgtggcgtgacaaggcatagatggactgggagatatgaggcacatctttgggataacagttgcagaagggaagggcaaactcgtaagggtcgtcaagtctatttaggtggctatgataaagaggagaaagctgctagggcttatgatcttgctgctctgaagtactggggtgccacaacaacaacaaattttccagtgagtaactacgaaaaggagctcgaggacatgaagcacatgacaaggcaggagtttgtagcgtctctgagaaggaagagcagtggtttctccagaggtgcatccatttacaggggagtgactaggcatcaccaacatggaagatggcaagcacggattggacgagttgcagggaacaaggatctttacttgggcaccttcagcacccaggaggaggcagcggaggcgtacgacatcgcggcgatcaagttccgcggcctcaacgccgtcaccaacttcgacatgagccgctacgacgtgaagagcatcctggacagcagcgccctccccatcggcagcgccgccaagcgcctcaaggaggccgaggccgcagcgtccgcgcagcaccaccacgccggcgtggtgagctacgacgtcggccgcatcgcctcgcagctcggcgacggcggagccctggcggcggcgtacggcgcgcactaccacggcgccgcctggccgaccatcgcgttccagccgggcgccgccagcacaggcctgtaccacccgtacgcgcagcagccaatgcgcggcggcgggtggtgcaagcaggagcaggaccacgcggtgatcgcggccgcgcacagcctgcaggacctccaccacctgaacctgggcgcggccggcgcgcacgactttttctcggcagggcagcaggccgccgccgctgcgatgcacggcctgggtagcatcgacagtgcgtcgctcgagcacagcaccggctccaactccgtcgtctacaacggcggggtcggcgacagcaacggcgccagcgccgtcggcggcagtggcggtggctacatgatgccgatgagcgctgccggagcaaccactacatcggcaatggtgagccacgagcaggtgcatgcacgggcctacgacgaagccaagcaggctgctcagatggggtacgagagctacctggtgaacgcggagaacaatggtggcggaaggatgtctgcatgggggactgtcgtgtctgcagccgcggcggcagcagcaagcagcaacgacaacatggccgccgacgtcgggcatggcggcgcgcagctcttcagtgtctggaacgacacttaagcgtacctagtggtacctgacatcttatagtctgcaacctctcgtgtctgaattcctatctttatcaagtgttattgcttccacgactataggacagctttcgtcgaaagcttttgctcatgtgatctcgaaggattcatctagtctgatttttcgtgacttgtatcggttttattggattcatccaacatatatcaataaaaaatgagttgtgtttcctttcttcctagttcagttaaaattatttccctcctgcgcttgtgctgtaattgtctgtgtacctgttgtttgtgactgtgttagttcccttggatatgatttcgtatttgatatgtacatggagatagcttagcttcattattggagtatgaagttagtatgacatagtcactctcctggaaaattgacactgcaaaccatatttttattctgaaccacaaatcctagtcagtccgctggcatatgccgtccgtttgctgaatccagaacgtgggtttggagatgtacggctgagatgcctctatgcgaaggggatttcgtggtgaaacgagatgggagtagagcaacgcccgtggaagatgcttcaaacttccacacttttgagcaacgatcggcagtagtaaggtagacgatttcaagatcaaagcatatgaagataaacaacatcaacaacaaaatttgttggggttctatagagagaaacagagctacatacatacactgttttgtatctaccatctgagatgatgaaaagatgaaaaactaaagaatgccccggcgccaacgccaggacacgccgcgcgcgcgtcacccgagccatctcttgacccagccggcgctgtatatttacacacgttgcagcatcgatcaccacctgttcgatcgcgtcgccgtcaccggcgcgccgcgacttattgaactagtctagggcgcggctaacaacctagcttagattgccttgtctaaacccttaggctaacgcgccacggtaacccggtccgggcctagaaggccccagagctggtcaccccatacgattggaagcttcaagtttgtacaaaaaagcaggctccggccagagttacccggaccgaagcttgcatgcctgcagtgcagcgtgacccggtcgtgcccctctctagagataatgagcattgcatgtctaagttataaaaaattaccacatattttttttgtcacacttgtttgaagtgcagtttatctatctttatacatatatttaaactttactctacgaataatataatctatagtactacaataatatcagtgttttagagaatcatataaatgaacagttagacatggtctaaaggacaattgagtattttgacaacaggactctacagttttatctttttagtgtgcatgtgttctcctttttttttgcaaatagcttcacctatataatacttcatccattttattagtacatccatttagggtttagggttaatggtttttatagactaatttttttagtacatctattttattctattttagcctctaaattaagaaaactaaaactctattttagtttttttatttaataatttagatataaaatagaataaaataaagtgactaaaaattaaacaaataccctttaagaaattaaaaaaactaaggaaacatttttcttgtttcgagtagataatgccagcctgttaaacgccgtcgacgagtctaacggacaccaaccagcgaaccagcagcgtcgcgtcgggccaagcgaagcagacggcacggcatctctgtcgctgcctctggacccctctcgagagttccgctccaccgttggacttgctccgctgtcggcatccagaaattgcgtggcggagcggcagacgtgagccggcacggcaggcggcctcctcctcctctcacggcaccggcagctacgggggattcctttcccaccgctccttcgctttcccttcctcgcccgccgtaataaatagacaccccctccacaccctctttccccaacctcgtgttgttcggagcgcacacacacacaaccagatctcccccaaatccacccgtcggcacctccgcttcaaggtacgccgctcgtcctcccccccccccctctctaccttctctagatcggcgttccggtccatgcatggttagggcccggtagttctacttctgttcatgtttgtgttagatccgtgtttgtgttagatccgtgctgctagcgttcgtacacggatgcgacctgtacgtcagacacgttctgattgctaacttgccagtgtttctctttggggaatcctgggatggctctagccgttccgcagacgggatcgatttcatgattttttttgtttcgttgcatagggtttggtttgcccttttcctttatttcaatatatgccgtgcacttgtttgtcgggtcatcttttcatgcttttttttgtcttggttgtgatgatgtggtctggttgggcggtcgttctagatcggagtagaattctgtttcaaactacctggtggatttattaattttggatctgtatgtgtgtgccatacatattcatagttacgaattgaagatgatggatggaaatatcgatctaggataggtatacatgttgatgcgggttttactgatgcatatacagagatgctttttgttcgcttggttgtgatgatgtggtgtggttgggcggtcgttcattcgttctagatcggagtagaatactgtttcaaactacctggtgtatttattaattttggaactgtatgtgtgtgtcatacatcttcatagttacgagtttaagatggatggaaatatcgatctaggataggtatacatgttgatgtgggttttactgatgcatatacatgatggcatatgcagcatctattcatatgctctaaccttgagtacctatctattataataaacaagtatgttttataattattttgatcttgatatacttggatgatggcatatgcagcagctatatgtggatttttttagccctgccttcatacgctatttatttgcttggtactgtttcttttgtcgatgctcaccctgttgtttggtgttacttctgcaggtcgactttaacttagcctaggatccatggtgagcgccctgagcagggtgatcgagaacccgaccgacccgccggtgaagcaggagctggacaagagcgaccagcaccagccggaccaggaccagccgaggaggaggcactacaggggcgtgaggcagaggccgtggggcaagtgggccgccgagatcagggacccgaagaaggccgccagggtgtggctgggcaccttcgagaccgccgaggaggccgccctggcctacgacagggccgccctgaagttcaagggcaccaaggccaagctgaacttcccggagagggtgcagggcccgaccaccaccaccaccatcagccacgccccgaggggcgtgagcgagagcatgaacagcccgccgccgaggccgggcccgccgagcaccaccaccaccagctggccgatgacctacaaccaggacatcctgcagtacgcccagctgctgaccagcaacaacgaggtggacctgagctactacaccagcaccctgttcagccagccgttcagcaccccgagcagcagcagcagcagcagccagcagacccagcagcagcagctgcagcagcagcagcagcagagggaggaggaggagaagaactacggctacaactactacaactacccgagggagtagggtaccgttaacagatctactaactatctatactgtaataatgttgtatagccgccggatagctagctagtttagtcattcagcggcgatgggtaataataaagtgtcatccatccatcaccatgcgtggcaacgtgagcaatgacctgattgaacaaattgaaatgaaaagaagaaatatgttatatgtcaacgagatttcctcataatgccactgacgacgtgtgtccaagaaatgtatcagtgatacgtatattcacaatttttttatgacttatactcacaatttgtttttttactacttatactcacaatttgttgtgcgtaccataacaatttcgatcgaatatatatcagaaagttgacgaaagtaagctcactcaaaaagttaaatgggctgcggaagctgcgtcaggcccaagttttggctattctatccggtatccacgattttgatggctgagggacatatgttcgcttaagcttcggtccgggcctagaaggccgatctcccgggcacccagctttcttgtacaaagtggccgttaacggatcggccagaatggcccggaccgggttaccgaattcgagctcggtaccctggttcacaaactcaatacaacacacagtggagtagggtattacgctccggcggcccgaaccactctaaatccttgtgtcctcgtgtgctcttccaccattaatgactgtaattgcagggacacgaagagttgtagcgcttttgccaacaagatccgctatatgctagtagagtggaacctgcacagcaacaagcatccaataatctgagaataagaattatgtgtggtgatggttctcatctctgcaactcgccattttcgcgagagaaccaaatccaagttggtgaagatcatgatttgggctcatgggctggcatagtagctattacctttgcaattgtggttcgaatctatccgatattctccttttcagggagagctaatgcttatgcttattgggtattttggtttgacactgcttcacgcccaaaaaaaggcaactatgtctgagttggatatggcccaaaaaaaggcagctatgtctgagttggatatggaagtcttctttcgtttagggtgaagtaagaccaagctcatgagcttattatcttaggtcggaacaaattagttgataggcatggcacatttatcaaattataatgattttaacagaaaagcaacacctctttttcagcagcaccagctttgcaagctgcaattgacactccaagcatagtatttgctccaaactcagcctgcatttcgcacaatatcatatctatttccatttggataaaatatattttccagaaatatgggaacagaatcaagatacagaaaaaagttgtggtagtagtggtaagtggaaacacaagtacagtgaaaagatagcattatttctgaacagtcaaattaaccgaaataagtagtatcacatactgcccctaaattgactacacccaatgtaaagaattgcttgagcatattgagccatcagttgtttgtttgtgtaacggatttgacaatgcagagttcaggagcaaaaaaccgcaaaggagagaaagagggaaaggatctcctagtatcccaccttgtggcgcgccctgtcaagtgcatgatggcctggtcgatctgcgtctgctgctgcggttccatcccaacgagtgcctccgacaccttgtcgttgatcacccgcaccgcgtaggcgacccccctggcgaggaacttccgcctctcggaggccccggccgcgtcggcggcggcgccctcgagcgcgcccacgctagccgtagatgctcggtgcacggccttgttggtgtgcaactcgacctcaacggccggtgcgctacgcccgtcaaggatctggcgcgcccgcaccctcgtgatcacggtgggcgcctcccgcctcatgtggccgacgatgaaaagcgccgggttaggggccttggcgcgcaccgccgtattcagggcctcctcgctcttgcgcgagagcaggtgcttccccaggtactcctgcactgacaaggctgccacagcggtggaatttgtcctcacgacttcgccacgtcgtcctcacctccctggcttcccacgactccgccgtatcgaggtgctcggtgggtcgtcttaatccgaagtccgaactaggaagacgagacagagaggtctgaggaatgggcctcgtttgatgttgagctgaattatttttccagcataagcccaggtcttggtccatgaacaaaattactagaaacccagcccagtactacgatctaaaagagggactgccactggatagctctctctagcattctccacgctccaatacagcggcgtcgtgtctatccgggtctatccgcgaacacgtgagaactctccagaaactgctttctcctccacttcatctctctcgctttccctctataaaaagaccccttctaggaattgagggagacagcaagcaccaagcagcgatccgaagctcaatcaattcactcaaacctcttccccaaatcttcgattagatcttcgttgacaagaagactagaaccgaacctgacatgtccaacctgctcacggttcaccagaaccttccggctcttccagtggacgcgacgtccgatgaagtcaggaagaacctcatggacatgttccgcgacaggcaagcgttcagcgagcacacctggaagatgctgctctccgtctgccgctcctgggctgcatggtgcaagctgaacaacaggaagtggttccccgctgagcccgaggacgtgagggattaccttctgtacctgcaagcgcgaggtttgtttctgcttctacctttgatatatatataataattatcattaattagtagtaatataatatttcaaatatttttttcaaaataaaagaatgtagtatatagcaattgcttttctgtagtttataagtgtgtatattttaatttataacttttctaatatatgaccaaaacatggtgatgcctaggtctggcagtgaagaccatccagcaacaccttggacaactgaacatgcttcacaggcgctccggcctcccgcgccccagcgactcgaacgccgtgagcctcgtcatgcgccgcatcaggaaggaaaacgtcgatgccggcgaaagggcaaagcaggccctcgcgttcgagaggaccgatttcgaccaggtccgcagcctgatggagaacagcgacaggtgccaggacattaggaacctggcgttcctcggaattgcatacaacacgctcctcaggatcgcggaaattgcccgcattcgcgtgaaggacattagccgcaccgacggcggcaggatgcttatccacattggcaggaccaagacgctcgtttccaccgcaggcgtcgaaaaggccctcagcctcggagtgaccaagctcgtcgaacgctggatctccgtgtccggcgtcgcggacgacccaaacaactacctcttctgccgcgtccgcaagaacggggtggctgcccctagcgccaccagccaactcagcacgagggccttggaaggtattttcgaggccacccaccgcctgatctacggcgcgaaggatgacagcggtcaacgctacctcgcatggtccgggcactccgcccgcgttggagctgctagggacatggcccgcgccggtgtttccatccccgaaatcatgcaggcgggtggatggacgaacgtgaacattgtcatgaactacattcgcaaccttgacagcgagacgggcgcaatggttcgcctcctggaagatggtgactgaggtacccaacctagacttgtccatcttctggattggccaacttaattaatgtatgaaataaaaggatgcacacatagtgacatgctaatcactataatgtgggcatcaaagttgtgtgttatgtgtaattactagttatctgaataaaagagaaagagatcatccatatttcttatcctaaatgaatgtcacgtgtctttataattctttgatgaaccagatgcatttcattaaccaaatccatatacatataaatattaatcatatataattaatatcaattgggttagcaaaacaaatctagtctaggtgtgttttgcgatccgatatcgaattggccacggtaccagctgctgctgttctagggttcacaagtctgcctatttgtcttccccaatggagctatggttgtctggtctggtccttggtcgtgtcccgtttcattgtgtactatttacctgtaatgtgtatccttaagtctggtttgatggtgtctgaaacgttttgctgtggtagagcagcatggaagaactataatgaataagtgatccctaatcattgtgtccaaattttgcttctgctatacccttttgtgctgtttcttatgttttgcttaaaaatttgatctgacaaacaaatttgtctaaattatgctcttgttctgactgtgtactgtacacatttgtattgctaccggtttggcacatagttttctctttgattgcagatcaaacccttctgattgcagattgcttggctatggctgatgtgctcactgttcttctttagcttgtatattgctgatggtggcttggctacggctgaaaaagttgctgctgcgccgacttggcaactgttgctccagtaatgctttgtcctctcttcctagccgccgacttggcacttggcagctgttgctcctgtaatgcgttgttatctcttatctcttgagatgtactatgattttgaggctgtttgacttgtgccagattgccagtgctgatgctatattatctcaggtttttatgctagtatatgttttactgtgtgctgcctgtgtcgagttacgtaatctattgaaccgctatgcgtgttgatgccctgttgttgcttgccagattgatgcccctgttgcttgcagcttgcaagctgtagtgaaatcctaaaattccaaaccaaatctattctgaacttttgaagatctgtgatgtccggaagaaaagattcaaacagataaacgggactctccagaatctataaaataaatgatcgacaaacgctttgctttggtaggcttcaagcttggtcacccggtccgggcctagaaggccagcttcggccgccccgggcaactttattatacaaagttgatagataaatcagatatctggttcctaaggacccggcggaccgattaaactgattcggtccgacgcgttacctaataacttcgtatagcatacattatacgaagttattagctaactaactagtaagcttaagccatgggtcgacggatccgttaactagcgtggcatttggcaccgccgcacactatgcgagctaggagtgctagtttacagatgaaactatgaaaccaagaaaacacaattgtccgtagctagcgcgtggcgtcgtgtcaagcttcacacagtatcttcgttcttcactataaatcgcgcctgttgttcgtgagacccaccaccgtggataacagtcccctaataataagcgatcaacagcactgctgatggctgaacaccgaggcgccgccgcgcgtaaccatccgccggagcagcccgtcgtgccggcgaacgacgccttccccgaccgcgcccagcagctctgcctcgacgccgggcgcgcgctcgcgatgtgcggcgtgctcgtcgccgtccctcccgcattttacgcgtcgacgtcgcggacgacaccgcacttgccttcgtcggcttcgtcctctggatcatcggtgcgtggctgtgcctcctggcgctcacgcccttggctccacgggcggtgagggcgggcggggccgccgccagcaccttgctgatcaggtgcctgtccctttcatgaactactagcgcccgcgcccgcggccgccgggcacaagagaacacatcgatgttcgctgcgtacgtcagcaataaggcactctttgtcagtagtcgagtgcatatgttgggtgtttgccctgggagatttcaagtgttgtggccattatcccgcaggataaaaaatcggcggcttttggattgatacggaaaataacgatgtttcatgctcgtgttgtgtgtgtgacatcttgtcagccaagtttttaaccgttgctactccccctctgtgggctcagtgtgtggaccggaatacgtcgtacataggccgtagcctaagcccaatatgccgtttttcaggttggcctgtgtgacgacaagcgggtctcaaaagcccatcacgcaactggcctgcaattattggaggagagcgcgtcgagttggttccagaggctgcgtggtggggccggactctgcgacgacctctcgttcgcgtccgatttggttgccgtgagccgtgacgtaacgcctccttccgttcctccctatataagttccacccccgggtccggtttccccaagccccagtgacccccgatcccgatcgcgaaatctccgcacccgccggcaagggaccgaagcaagcctctctcccgaccgtcgcatcaaggtacgcgtccgctcgatctgtcctcttccttctcgatttgacttgctgtggtgcccgatcacgggatcagaatcgcaccagtgtagatttcgcatgttctaagatgtgttagtttccaggctaatccagttctcttgacgcccgatccgatcgagctccgtgtttatttcagcctaatcgtagtattcccctaaaatttcctcattagggggttcgcaagattgttggtcgacaggttcacttatgctcgatcgcttacttttagtcgattcatgctgcgtactattgttgccccccgtggttttatcttttctcgtgtgaaatccagtagatatagtagatatcgtagcattaggttttaattcaatcgattgattattgtatcatcaaaattgagaagttcgaatcatgcctatcatgctgcctcaaccgaaatcctgtatattgaagtttcaattcaattgattgatcattcattagattcaaccaaaatctagaaggttagatgacgcatgtcatgctgcctgcgtagtttacctttgatctgtttatgattaccttatcagtaggatatttgtgattttgggaagtagcactaactgattcatgctgacatgatgttccctttcagattatactgttgagtcctatctaattgatgctttgtatgctatatgaatacgtcatggtaaattagcagttaattagcatattagcaattgggcgtacctcatcaggattgctcttgtagatgtgtgtggtgatgtttcttgttcaattcatgttctgctttaaaagtatgtgttctctgtttgttaattaagattcatggttataatgatttggacctaattaatcagggttgcccttttagatgcgtggttacttgttgagttcatttttttcctgctatagttgtatgcgtttgttcattcatggttagatttgatttgtttcttctctattccatgccttccatatacttcaattgtagcttaacatgagatttctgtatatgcaggtcgaccgccggggatccacacgacaccatggcccagtccaagcacggcctgaccaaggagatgaccatgaagtaccgcatggagggctgcgtggacggccacaagttcgtgatcaccggcgagggcatcggctaccccttcaagggcaagcaggccatcaacctgtgcgtggtggagggcggccccttgcccttcgccgaggacatcttgtccgccgccttcatgtacggcaaccgcgtgttcaccgagtacccccaggacatcgtcgactacttcaagaactcctgccccgccggctacacctgggaccgctccttcctgttcgaggacggcgccgtgtgcatctgcaacgccgacatcaccgtgagcgtggaggagaactgcatgtaccacgagtccaagttctacggcgtgaacttccccgccgacggccccgtgatgaagaagatgaccgacaactgggagccctcctgcgagaagatcatccccgtgcccaagcagggcatcttgaagggcgacgtgagcatgtacctgctgctgaaggacggtggccgcttgcgctgccagttcgacaccgtgtacaaggccaagtccgtgccccgcaagatgcccgactggcacttcatccagcacaagctgacccgcgaggaccgcagcgacgccaagaaccagaagtggcacctgaccgagcacgccatcgcctccggctccgccttgccctccggactcagatctcgatagagtcaacctagacttgtccatcttctggattggccaacttaattaatgtatgaaataaaaggatgcacacatagtgacatgctaatcactataatgtgggcatcaaagttgtgtgttatgtgtaattactagttatctgaataaaagagaaagagatcatccatatttcttatcctaaatgaatgtcacgtgtctttataattctttgatgaaccagatgcatttcattaaccaaatccatatacatataaatattaatcatatataattaatatcaattgggttagcaaaacaaatctagtctaggtgtgttttgcgaattgcggcgcccttactttaacgcctctaaccaacacccctttatctttataaggaacaataaacagaatttgccccactgttctaaatcacctaataatatccccagctaaaaacaataaaggtttcctagaattaagacaagcatgactgttcctccaggagggtttggaacattgttgcagtcttgcagatacgggcgaagggtgagaaacagagcggagggctggaggtgacctcggtagtcgacgccggagttgagcttgacaacgacggggcggcccctgatggacttgaggaagtccgatggcgtcttcaccgtcccgccggcgcccgaggcgggcctgtcgctgccgccgccgccgctgctcatcttgcgcgctgtgcccccggcggtgtccctgtgttgcggatcgcgggtgggccaggtggatgcgagggcgacccgtttggactccggccggagccgccggatccctggtcggtgtcagtgccgtttactctgggccccacgtgtcagtaccgtctgtagatgacaacaacccgtcgtccacagtcatgtccaaaatatcctttcttcttttttttcgattcggatatctatcttccttttttttttccaaaaatcttcttgacgcaccagcgcgcacgtttgtggtaaacgccgacacgtcggtcccacgtcgatagaccccacccaccagtgagtagcgtgtacgtattcgggggtgacggacgtgtcgccgtcgtcttgctagtcccattcccatctgagccacacatctctgaacaaaaaaaaggagggaggcctccacgcacatccccctccgtgccacccgccccaaaccctcgcgccgcctccgagacagccgccgcaaccatggccaccgccgccgccgcgtctaccgcgctcactggcgccactaccgctgcgcccaaggcgaggcgccgggcgcacctcctggccacccgccgcgccctcgccgcgcccatcaggtgctcagcggcgtcacccgccatgccgatggctcccccggccaccccgctccggccgtggggccccaccgagccccgcaagggtgctgacatcctcgtcgagtccctcgagcgctgcggcgtccgcgacgtcttcgcctaccccggcggcgcgtccatggagatccaccaggcactcacccgctcccccgtcatcgccaaccacctcttccgccacgagcaaggggaggcctttgccgcctccggctacgcgcgctcctcgggccgcgtcggcgtctgcatcgccacctccggccccggcgccaccaacctagtctccgcgctcgccgacgcgctgctcgattccgtccccatggtcgccatcacgggacaggtggcgcgacgcatgattggcaccgacgccttccaggagacgcccatcgtcgaggtcacccgctccatcaccaagcacaactacctggtcctcgacgtcgacgacatcccccgcgtcgtgcaggaggctttcttcctcgcctcctctggtcgaccagggccggtgcttgtcgacatccccaaggacatccagcagcagatggcggtgcctgtctgggacaagcccatgagtctgcctgggtacattgcgcgccttcccaagccccctgcgactgagttgcttgagcaggtgctgcgtcttgttggtgaatcgcggcgccctgttctttatgtgggcggtggctgcgcagcatctggtgaggagttgcgacgctttgtggagctgactggaatcccggtcacaactactcttatgggcctcggcaacttccccagcgacgacccactgtctctgcgcatgctaggtatgcatgggacggtgtatgcaaattatgcagtggataaggccgatctgttgcttgcacttggtgtgcggtttgatgatcgcgtgacagggaagattgaggcttttgcaagcagggctaagattgtgcacgttgatattgatccggctgagattggcaagaacaagcagccacatgtgtccatctgtgcagatgttaagcttgctttgcagggcatgaatgctcttcttgaaggaagcacatcaaagaagagctttgactttggctcatggaacgatgagttggatcagcagaagagggaattcccccttgggtataaaacatctaatgaggagatccagccacaatatgctattcaggttcttgatgagctgacgaaaggcgaggccatcatcggcacaggtgttgggcagcaccagatgtgggcggcacagtactacacttacaagcggccaaggcagtggttgtcttcagctggtcttggggctatgggatttggtttgccggctgctgctggtgcttctgtggcaaacccaggtgtcactgttgttgacatcgatggagatggtagctttctcatgaacgttcaggagctagctatgatccgaattgagaacctcccagtgaaggtctttgtgctaaacaaccagcacctggggatggtggtgcagttggaggacaggttctataaggccaacagagcgcacacatacttgggaaacccagagaatgaaagtgagatatatccagatttcgtgacgatcgccaaagggttcaacattccagcggtccgtgtgacaaagaagaacgaagtccgcgcagcgataaagaagatgctcgagactccagggccgtacctcttggatataatcgtcccacaccaggagcatgtgttgcctatgatccctagtggtggggctttcaaggatatgatcctggatggtgatggcaggactgtgtactgactagctagtcagttaacagatctgccagatcctcggtgtacaaataacccgtcttatcctatgagacgggccggcgtcagtgtgttctggaggaatttttatgtcagagcctttttctttgtgtgcttgatgtagatgccaagggaagcttattggctgttgaagcttgatgcaaaataaattatggaactctgttttttgtttatctaataataactagcaaatatgcttccattgcattgaaactaacagccttttgtgtttccaagttttattttgtgacaatgtcatctatttcaattagttgtggaatcggaaacttgcaggactaacttggaaactccaatccctcagcatcctggactttttcctggtgtaatccatgtagatattattttaatcatcattttagttctggaggtttttccatctccggttttgctcccctttcttcaaaaaaaaaaaaaaaatgccgtaggcgccgcaacgcccacctgttgttcaaactcatgggcacgagtggctcgaagattttatacaacaattgctgtagtttcaccgttgctggtgaagaagcatttttttaaaaaaatatagtggtattcattttaattagtttagttgtgcagcgagcaaaatttggacatgctctgctcggaatctgatcgacctagacacagattagcagcagtagctttgtcatctgttccaagagttgcgatctgatagaagaaaaaaaaaccttcccttcaatgtaaaaccgaaactaacaagaaagaagcacagtgccgtttaggcaagtatggagtacgtattaagcatgtagaaggccatgcatgaaccactaacaagaaagaagcgcagtgccattcaggcaagcataagcatgtagattggcatgcatgaacaactaacagtagatcgtctctggtctgattagaagttttttgggaagccaagaaatcatgtacaactggttccatctcaaattccgtggcaaaaagaggcctaagcaacatacctcgagtagatcacattcaagcttggtcacccggtccgtcaatattctgattccgatgacttcgtaggttcctagctcaagccgctcgtgtccaagcgtcacttacgattagctaatgattacggcatctaggaccgactagtggcgcgccgactagctagctaaggtaccgagctcgaattcattccgattaatcgtggcctcttgctcttcaggatgaagagctatgtttaaacgtgcaagcgctactagacaattcagtacattaaaaacgtccgcaatgtgttattaagttgtctaagcgtcaatttgtttacaccacaatatatcctgcca

SEQ ID NO: 57 - DNA, 25493 bp, Artificial sequence
  PHP95893
gtttacccgccaatatatcctgtcaaacactgatagtttaaactgaaggcgggaaacgacaatctgatcatgagcggagaattaagggagtcacgttatgacccccgccgatgacgcgggacaagccgttttacgtttggaactgacagaaccgcaacgttgaaggagccactcagcaagctggtacgattgtaatacgactcactatagggcgaattgagcgctgtttaaacgctcttcaactggaagagcggttacgctgtttaaacgctcttcaactggaagagcggttactaccggttcactagctagctgctaatcgagctagttaccctatgaggtgacatgaagcgctcacggttactatgacggttagcttcacgactgttggtggcagtagcgtacgacttagctatagttccggacttacccttaagcgatttaaatctgcggttaccgaattcgagctcggtacctagtacccttgtacttttggtttcacctgcatagagaaaacccacaagaatatgacagtctgatttgtcagtctcattctcaagcaacatttctctatccgttactttcatggtgaataacacaatccatcatcaatactttgtgttactcagaaactgaaagttattccgagtcttgcatatctttggacctactcgtttttctaccattattgctgattgttaagctctcgctacttgaatcggcattgttggagtgggaaggttcaaaaaattggagttatgactagttgtctctttctatgtacgatggagaaaatgaataaacaactgagaaaatggctcttgtttagttgatgatgctcttaagctttccactggttgccatatatgatttgggcatttcactttgatcttaatgggccttgtaaagcccaagactcatgattatctttagttgatgctcttaattaggtgtgggcaaataattcaaactgtatgtacccgaccaaaaccaaagcaaaaataatcgaaccaaaccgaaaatttaaaaataaccgaatgaaaactaaatcctataactgaaagaactgaaaccgaatcaaaatatttaatgtaaccaaaaatatccgaaatataattatattgtcaaaaatattaataatttctagattaaataattaaaaatacttaaaaatttatataaaatagtaaaaatactcgaaaataaccacaaatattcaaaaacaaccgaaatatcccaaaatattcaaagcaaaataaccgaatggataccaaattttaaaaccgaaaaaactggaacaaaaccaaaatcgaaccaaaatttcaaaaatcgaataaatactaaactttagaacaaaaaaaaacgataaccgaatgtatacgaaccaaagccgaattagataaccgaacgtccaggactactcttaatctttccgccacttatgatttgggctattactttgtttataatgagccttttcaagctcaagttcatgattgtccgtgagatgagaaactgacttgttggattcgaaaccctagctagtattggttaatacttaatacataaatgacctgcattgacatcatcatccaagaaaataaaaattgtatgcttgagatatttagttttcctagctaggttttctttattttagtaccgaatctttaggtgtgccacgttaatttagacccattttttcatacttaccaactgagtctagtttaatcatgactataatcgtataaaatgattcagtcgacgtcattgcgaacgtatataaaatcatccaaattgacgtcattccaaagaggtaagcatgcttatctaagagtccgagcatactaaacaagacgacattttatttgcactccaaatcaaattttgtattgcctaaagaaaaacaatcaaactcaagtttcttaaaattaatttcattcaaactaatcactttcaatatctcacatattattcatgccatttctatttgtctaaacatgatttaaaaaaaaaagtaaaatacaaagattactatgcaaaaactctataaaaaaaaattcaaatttcttatttatttgtgacatcaaattttcaaaataatttttttaattatcggttgatccggtcagtcgataaaaacataaactttcagcgaccgttaaaactttcctactaccgatttagagaaaatcttagcttgaaacgtaattgtaacctgccttcatgcaagtcgcaagatatgtcatcctaagttgtatatgttttctcaaaagatgtatttacttgagaaaatacgtttcaacgttgatggacaaccaattaagaatcaagcacctttcgtaatcaatttaggcttatcgtctaaggtatactgatttacgacagttgactagacttataaggaacaaaataatagaatagtttctaaacacttcacctaatcatagagactaagatggtaattcgtaaacgacaaagcctagtgacactgtccattgtaaaattccacatcatattagtattaaacatatacatgtagtttcctgaacacatgtagtatcaaacacacttcgtggcttcttcctcgaaacctgcggccgcgctatagttccggacttacccttaagataacttcgtatagcatacattatacgaagttatgggcccacgcgtgaagagcggttaccagagctggtcacctttgtccaccaagatggaactgtcttcggccagaatggccatctggattcagcaggcctagaaggccatttatcgctatcaactttgtatagaaaagttgggccgagctcggtacggccagaatggcccggaccgggttaccaagcggccgcacactgatagtttaaactgaaggcgggaaacgacaatctgatcatgagcggagaattaagggagtcacgttatgacccccgccgatgacgcgggacaagccgttttacgtttggaactgacagaaccgcaacgattgaaggagccactcagccgcgggtttctggagtttaatgagctaagcacatacgtcagaaaccattattgcgcgttcaaaagtcgcctaaggtcactatcagctagcaaatatttcttgtcaaaaatgctccactgacgttccataaattcccctcggtatccaattagagtctcatattcactcccatggcggccaatgcgggcggcggtggagcgggaggaggcagcggcagcggcagcgtggctgcgccggcggtgtgccgccccagcggctcgcggtggacgccgacgccggagcagatcaggatgctgaaggagctctactacggctgcggcatccggtcgcccagctcggagcagatccagcgcatcaccgccatgctgcggcagcacggcaagatcgagggcaagaacgtcttctactggttccagaaccacaaggcccgcgagcgccagaagcgccgcctcaccagcctcgacgtcaacgtgcccgccgccggcgcggccgacgccaccaccagccaactcggcgtcctctcgctgtcgtcgccgccgccttcaggcgcggcgcctccctcgcccaccctcggcttctacgccgccggcaatggcggcggatcggctgtgctgctggacacgagttccgactggggcagcagcggcgctgctatggccaccgagacatgcttcctgcaggactacatgggcgtgacggacacgggcagctcgtcgcagtggccacgcttctcgtcgtcggacacgataatggcggcggccgcggcgcgggcggcgacgacgcgggcgcccgagacgctccctctcttcccgacctgcggcgacgacggcggcagcggtagcagcagctacttgccgttctggggtgccgcgtccacaactgccggcgccacttcttccgttgcgatccaacagcaacaccagctgcaggagcagtacagcttttacagcaacagcaacagcacccagctggccggcaccggcaaccaagacgtatcggcaacagcagcagcagccgccgccctggagctgagcctcagctcatggtgctccccttaccctgctgcagggagtatgtgagagcaacgcgagctgccactgctcttcactgatgtctctggaatggaaggaggaggaagtgagaacagatcattcgacaaagcagcattagtccgttgatcggtggaagaccactcgtcagtgttgagttgaatgtttgatcaataaaatacggcaatgctgtaagggttgttttttatgccattgataatacactgtactgttcagttgttgaactctatttcttagccatgccaagtgcttttcttattttgaataacattacagcaaaaagttgaaagacaaaaaaaaaaacccccgaacagagtgctttgggtcccaagcttctttagactgtgttcggcgttccccctaaatttctccccctatatctcactcacttgtcacatcagcgttctctttccccctatatctccacgctctacagcagttccacctatatcaaacctctataccccaccacaacaatattatatactttcatcttcaactaactcatgtaccttccaatttttttctactaataattatttacgtgcacagaaacttagcaaggagagagagagcgggaatttaaatgctcggcgttaggcttttagtccgctaggtggctagaccgaggttaggacgctagttcactaggggcctagtggtgttttaagacgtcacggtcaccacgcgtggaccgaagcttgcatgcctgcagtgcagcgtgacccggtcgtgcccctctctagagataatgagcattgcatgtctaagttataaaaaattaccacatattttttttgtcacacttgtttgaagtgcagtttatctatctttatacatatatttaaactttactctacgaataatataatctatagtactacaataatatcagtgttttagagaatcatataaatgaacagttagacatggtctaaaggacaattgagtattttgacaacaggactctacagttttatctttttagtgtgcatgtgttctcctttttttttgcaaatagcttcacctatataatacttcatccattttattagtacatccatttagggtttagggttaatggtttttatagactaatttttttagtacatctattttattctattttagcctctaaattaagaaaactaaaactctattttagtttttttatttaataatttagatataaaatagaataaaataaagtgactaaaaattaaacaaataccctttaagaaattaaaaaaactaaggaaacatttttcttgtttcgagtagataatgccagcctgttaaacgccgtcgacgagtctaacggacaccaaccagcgaaccagcagcgtcgcgtcgggccaagcgaagcagacggcacggcatctctgtcgctgcctctggacccctctcgagagttccgctccaccgttggacttgctccgctgtcggcatccagaaattgcgtggcggagcggcagacgtgagccggcacggcaggcggcctcctcctcctctcacggcaccggcagctacgggggattcctttcccaccgctccttcgctttcccttcctcgcccgccgtaataaatagacaccccctccacaccctctttccccaacctcgtgttgttcggagcgcacacacacacaaccagatctcccccaaatccacccgtcggcacctccgcttcaaggtacgccgctcgtcctcccccccccccctctctaccttctctagatcggcgttccggtccatgcatggttagggcccggtagttctacttctgttcatgtttgtgttagatccgtgtttgtgttagatccgtgctgctagcgttcgtacacggatgcgacctgtacgtcagacacgttctgattgctaacttgccagtgtttctctttggggaatcctgggatggctctagccgttccgcagacgggatcgatttcatgattttttttgtttcgttgcatagggtttggtttgcccttttcctttatttcaatatatgccgtgcacttgtttgtcgggtcatcttttcatgcttttttttgtcttggttgtgatgatgtggtctggttgggcggtcgttctagatcggagtagaattctgtttcaaactacctggtggatttattaattttggatctgtatgtgtgtgccatacatattcatagttacgaattgaagatgatggatggaaatatcgatctaggataggtatacatgttgatgcgggttttactgatgcatatacagagatgctttttgttcgcttggttgtgatgatgtggtgtggttgggcggtcgttcattcgttctagatcggagtagaatactgtttcaaactacctggtgtatttattaattttggaactgtatgtgtgtgtcatacatcttcatagttacgagtttaagatggatggaaatatcgatctaggataggtatacatgttgatgtgggttttactgatgcatatacatgatggcatatgcagcatctattcatatgctctaaccttgagtacctatctattataataaacaagtatgttttataattattttgatcttgatatacttggatgatggcatatgcagcagctatatgtggatttttttagcactgccttcatacgctatttatttgcttggtactgtttcttttgtcgatgctcaccctgttgtttggtgttacttctgcaggtcgactttaacttagcctaggatccatggccactgtgaacaactggctcgctttctccctctccccgcaggagctgccgccctcccagacgacggactccacactcatctcggccgccaccgccgaccatgtctccggcgatgtctgcttcaacatcccccaagattggagcatgaggggatcagagctttcggcgctcgtcgcggagccgaagctggaggacttcctcggcggcatctccttctccgagcagcatcacaaggccaactgcaacatgatacccagcactagcagcacagtttgctacgcgagctcaggtgctagcaccggctaccatcaccagctgtaccaccagcccaccagctcagcgctccacttcgcggactccgtaatggtggcttcctcggccggtgtccacgacggcggtgccatgctcagcgcggccgccgctaacggtgtcgctggcgctgccagtgccaacggcggcggcatcgggctgtccatgattaagaactggctgcggagccaaccggcgcccatgcagccgagggtggcggcggctgagggcgcgcaggggctctctttgtccatgaacatggcggggacgacccaaggcgctgctggcatgccacttctcgctggagagcgcgcacgggcgcccgagagtgtatcgacgtcagcacagggtggagccgtcgtcgtcacggcgccgaaggaggatagcggtggcagcggtgttgccggcgctctagtagccgtgagcacggacacgggtggcagcggcggcgcgtcggctgacaacacggcaaggaagacggtggacacgttcgggcagcgcacgtcgatttaccgtggcgtgacaaggcatagatggactgggagatatgaggcacatctttgggataacagttgcagaagggaagggcaaactcgtaagggtcgtcaagtctatttaggtggctatgataaagaggagaaagctgctagggcttatgatcttgctgctctgaagtactggggtgccacaacaacaacaaattttccagtgagtaactacgaaaaggagctcgaggacatgaagcacatgacaaggcaggagtttgtagcgtctctgagaaggaagagcagtggtttctccagaggtgcatccatttacaggggagtgactaggcatcaccaacatggaagatggcaagcacggattggacgagttgcagggaacaaggatctttacttgggcaccttcagcacccaggaggaggcagcggaggcgtacgacatcgcggcgatcaagttccgcggcctcaacgccgtcaccaacttcgacatgagccgctacgacgtgaagagcatcctggacagcagcgccctccccatcggcagcgccgccaagcgcctcaaggaggccgaggccgcagcgtccgcgcagcaccaccacgccggcgtggtgagctacgacgtcggccgcatcgcctcgcagctcggcgacggcggagccctggcggcggcgtacggcgcgcactaccacggcgccgcctggccgaccatcgcgttccagccgggcgccgccagcacaggcctgtaccacccgtacgcgcagcagccaatgcgcggcggcgggtggtgcaagcaggagcaggaccacgcggtgatcgcggccgcgcacagcctgcaggacctccaccacctgaacctgggcgcggccggcgcgcacgactttttctcggcagggcagcaggccgccgccgctgcgatgcacggcctgggtagcatcgacagtgcgtcgctcgagcacagcaccggctccaactccgtcgtctacaacggcggggtcggcgacagcaacggcgccagcgccgtcggcggcagtggcggtggctacatgatgccgatgagcgctgccggagcaaccactacatcggcaatggtgagccacgagcaggtgcatgcacgggcctacgacgaagccaagcaggctgctcagatggggtacgagagctacctggtgaacgcggagaacaatggtggcggaaggatgtctgcatgggggactgtcgtgtctgcagccgcggcggcagcagcaagcagcaacgacaacatggccgccgacgtcgggcatggcggcgcgcagctcttcagtgtctggaacgacacttaagcgtacctagtggtacctgacatcttatagtctgcaacctctcgtgtctgaattcctatctttatcaagtgttattgcttccacgactataggacagctttcgtcgaaagcttttgctcatgtgatctcgaaggattcatctagtctgatttttcgtgacttgtatcggttttattggattcatccaacatatatcaataaaaaatgagttgtgtttcctttcttcctagttcagttaaaattatttccctcctgcgcttgtgctgtaattgtctgtgtacctgttgtttgtgactgtgttagttcccttggatatgatttcgtatttgatatgtacatggagatagcttagcttcattattggagtatgaagttagtatgacatagtcactctcctggaaaattgacactgcaaaccatatttttattctgaaccacaaatcctagtcagtccgctggcatatgccgtccgtttgctgaatccagaacgtgggtttggagatgtacggctgagatgcctctatgcgaaggggatttcgtggtgaaacgagatgggagtagagcaacgcccgtggaagatgcttcaaacttccacacttttgagcaacgatcggcagtagtaaggtagacgatttcaagatcaaagcatatgaagataaacaacatcaacaacaaaatttgttggggttctatagagagaaacagagctacatacatacactgttttgtatctaccatctgagatgatgaaaagatgaaaaactaaagaatgccccggcgccaacgccaggacacgccgcgcgcgcgtcacccgagccatctcttgacccagccggcgctgtatatttacacacgttgcagcatcgatcaccacctgttcgatcgcgtcgccgtcaccggcgcgccgcgacttattgaactagtctagggcgcggctaacaacctagcttagattgccttgtctaaacccttaggctaacgcgccacggtaacccggtccgggcctagaaggccccagagctggtcaccccatacgattggaagcttcaagtttgtacaaaaaagcaggctccggccagagttacccggaccgaagcttgcatgcctgcagtgcagcgtgacccggtcgtgcccctctctagagataatgagcattgcatgtctaagttataaaaaattaccacatattttttttgtcacacttgtttgaagtgcagtttatctatctttatacatatatttaaactttactctacgaataatataatctatagtactacaataatatcagtgttttagagaatcatataaatgaacagttagacatggtctaaaggacaattgagtattttgacaacaggactctacagttttatctttttagtgtgcatgtgttctcctttttttttgcaaatagcttcacctatataatacttcatccattttattagtacatccatttagggtttagggttaatggtttttatagactaatttttttagtacatctattttattctattttagcctctaaattaagaaaactaaaactctattttagtttttttatttaataatttagatataaaatagaataaaataaagtgactaaaaattaaacaaataccctttaagaaattaaaaaaactaaggaaacatttttcttgtttcgagtagataatgccagcctgttaaacgccgtcgacgagtctaacggacaccaaccagcgaaccagcagcgtcgcgtcgggccaagcgaagcagacggcacggcatctctgtcgctgcctctggacccctctcgagagttccgctccaccgttggacttgctccgctgtcggcatccagaaattgcgtggcggagcggcagacgtgagccggcacggcaggcggcctcctcctcctctcacggcaccggcagctacgggggattcctttcccaccgctccttcgctttcccttcctcgcccgccgtaataaatagacaccccctccacaccctctttccccaacctcgtgttgttcggagcgcacacacacacaaccagatctcccccaaatccacccgtcggcacctccgcttcaaggtacgccgctcgtcctcccccccccccctctctaccttctctagatcggcgttccggtccatgcatggttagggcccggtagttctacttctgttcatgtttgtgttagatccgtgtttgtgttagatccgtgctgctagcgttcgtacacggatgcgacctgtacgtcagacacgttctgattgctaacttgccagtgtttctctttggggaatcctgggatggctctagccgttccgcagacgggatcgatttcatgattttttttgtttcgttgcatagggtttggtttgcccttttcctttatttcaatatatgccgtgcacttgtttgtcgggtcatcttttcatgcttttttttgtcttggttgtgatgatgtggtctggttgggcggtcgttctagatcggagtagaattctgtttcaaactacctggtggatttattaattttggatctgtatgtgtgtgccatacatattcatagttacgaattgaagatgatggatggaaatatcgatctaggataggtatacatgttgatgcgggttttactgatgcatatacagagatgctttttgttcgcttggttgtgatgatgtggtgtggttgggcggtcgttcattcgttctagatcggagtagaatactgtttcaaactacctggtgtatttattaattttggaactgtatgtgtgtgtcatacatcttcatagttacgagtttaagatggatggaaatatcgatctaggataggtatacatgttgatgtgggttttactgatgcatatacatgatggcatatgcagcatctattcatatgctctaaccttgagtacctatctattataataaacaagtatgttttataattattttgatcttgatatacttggatgatggcatatgcagcagctatatgtggatttttttagccctgccttcatacgctatttatttgcttggtactgtttcttttgtcgatgctcaccctgttgtttggtgttacttctgcaggtcgactttaacttagcctaggatccgatctgcctcatcaacagctgcagtatttgctagccacatatatatacacagttcgacacgtagttataacggaagagagaagcaaagagagaggcagagtgactgcaaccatcagtagttctatgattttattttttaccgttttgttgctgtttcatggtgtttatttgattgtagggtggaggagaggtgaaagctgacagaagagagtgagcacacatggtgcctttcttgcatgatgtatgatcgagagagttcatgctcgaagctatgcgtgctcacttctctctctgtcagccattagaactcctctatctctcaatctcgatctccctctttctttgttgatctctcccatggtgatatttatttgcttcctacgtgttgtgttctctttcttcagcacacacacaacctgttcatgttaccttagggttaaagtttttgcactttgcgtgaagatggaaagacaaacagtagatgagttttttgaaggtttgacagaagagagtgagcacacacggtggtttcttaccatgagtgtcatgctaggagctgtgcgtgctcaccctctatctgtcagtcactcatcaagcccatctgtcttattagcttgtttccgctgctaataaatattctagaggtaccgttaacagatctactaactatctatactgtaataatgttgtatagccgccggatagctagctagtttagtcattcagcggcgatgggtaataataaagtgtcatccatccatcaccatgcgtggcaacgtgagcaatgacctgattgaacaaattgaaatgaaaagaagaaatatgttatatgtcaacgagatttcctcataatgccactgacgacgtgtgtccaagaaatgtatcagtgatacgtatattcacaatttttttatgacttatactcacaatttgtttttttactacttatactcacaatttgttgtgcgtaccataacaatttcgatcgaatatatatcagaaagttgacgaaagtaagctcactcaaaaagttaaatgggctgcggaagctgcgtcaggcccaagttttggctattctatccggtatccacgattttgatggctgagggacatatgttcgcttaagcttcggtccgggcctagaaggccgatctcccgggcacccagctttcttgtacaaagtggccgttaacggatcggccagaatggcccggaccgggttaccgaattcgagctcggtaccctggttcacaaactcaatacaacacacagtggagtagggtattacgctccggcggcccgaaccactctaaatccttgtgtcctcgtgtgctcttccaccattaatgactgtaattgcagggacacgaagagttgtagcgcttttgccaacaagatccgctatatgctagtagagtggaacctgcacagcaacaagcatccaataatctgagaataagaattatgtgtggtgatggttctcatctctgcaactcgccattttcgcgagagaaccaaatccaagttggtgaagatcatgatttgggctcatgggctggcatagtagctattacctttgcaattgtggttcgaatctatccgatattctccttttcagggagagctaatgcttatgcttattgggtattttggtttgacactgcttcacgcccaaaaaaaggcaactatgtctgagttggatatggcccaaaaaaaggcagctatgtctgagttggatatggaagtcttctttcgtttagggtgaagtaagaccaagctcatgagcttattatcttaggtcggaacaaattagttgataggcatggcacatttatcaaattataatgattttaacagaaaagcaacacctctttttcagcagcaccagctttgcaagctgcaattgacactccaagcatagtatttgctccaaactcagcctgcatttcgcacaatatcatatctatttccatttggataaaatatattttccagaaatatgggaacagaatcaagatacagaaaaaagttgtggtagtagtggtaagtggaaacacaagtacagtgaaaagatagcattatttctgaacagtcaaattaaccgaaataagtagtatcacatactgcccctaaattgactacacccaatgtaaagaattgcttgagcatattgagccatcagttgtttgtttgtgtaacggatttgacaatgcagagttcaggagcaaaaaaccgcaaaggagagaaagagggaaaggatctcctagtatcccaccttgtggcgcgccctgtcaagtgcatgatggcctggtcgatctgcgtctgctgctgcggttccatcccaacgagtgcctccgacaccttgtcgttgatcacccgcaccgcgtaggcgacccccctggcgaggaacttccgcctctcggaggccccggccgcgtcggcggcggcgccctcgagcgcgcccacgctagccgtagatgctcggtgcacggccttgttggtgtgcaactcgacctcaacggccggtgcgctacgcccgtcaaggatctggcgcgcccgcaccctcgtgatcacggtgggcgcctcccgcctcatgtggccgacgatgaaaagcgccgggttaggggccttggcgcgcaccgccgtattcagggcctcctcgctcttgcgcgagagcaggtgcttccccaggtactcctgcactgacaaggctgccacagcggtggaatttgtcctcacgacttcgccacgtcgtcctcacctccctggcttcccacgactccgccgtatcgaggtgctcggtgggtcgtcttaatccgaagtccgaactaggaagacgagacagagaggtctgaggaatgggcctcgtttgatgttgagctgaattatttttccagcataagcccaggtcttggtccatgaacaaaattactagaaacccagcccagtactacgatctaaaagagggactgccactggatagctctctctagcattctccacgctccaatacagcggcgtcgtgtctatccgggtctatccgcgaacacgtgagaactctccagaaactgctttctcctccacttcatctctctcgctttccctctataaaaagaccccttctaggaattgagggagacagcaagcaccaagcagcgatccgaagctcaatcaattcactcaaacctcttccccaaatcttcgattagatcttcgttgacaagaagactagaaccgaacctgacatgtccaacctgctcacggttcaccagaaccttccggctcttccagtggacgcgacgtccgatgaagtcaggaagaacctcatggacatgttccgcgacaggcaagcgttcagcgagcacacctggaagatgctgctctccgtctgccgctcctgggctgcatggtgcaagctgaacaacaggaagtggttccccgctgagcccgaggacgtgagggattaccttctgtacctgcaagcgcgaggtttgtttctgcttctacctttgatatatatataataattatcattaattagtagtaatataatatttcaaatatttttttcaaaataaaagaatgtagtatatagcaattgcttttctgtagtttataagtgtgtatattttaatttataacttttctaatatatgaccaaaacatggtgatgcctaggtctggcagtgaagaccatccagcaacaccttggacaactgaacatgcttcacaggcgctccggcctcccgcgccccagcgactcgaacgccgtgagcctcgtcatgcgccgcatcaggaaggaaaacgtcgatgccggcgaaagggcaaagcaggccctcgcgttcgagaggaccgatttcgaccaggtccgcagcctgatggagaacagcgacaggtgccaggacattaggaacctggcgttcctcggaattgcatacaacacgctcctcaggatcgcggaaattgcccgcattcgcgtgaaggacattagccgcaccgacggcggcaggatgcttatccacattggcaggaccaagacgctcgtttccaccgcaggcgtcgaaaaggccctcagcctcggagtgaccaagctcgtcgaacgctggatctccgtgtccggcgtcgcggacgacccaaacaactacctcttctgccgcgtccgcaagaacggggtggctgcccctagcgccaccagccaactcagcacgagggccttggaaggtattttcgaggccacccaccgcctgatctacggcgcgaaggatgacagcggtcaacgctacctcgcatggtccgggcactccgcccgcgttggagctgctagggacatggcccgcgccggtgtttccatccccgaaatcatgcaggcgggtggatggacgaacgtgaacattgtcatgaactacattcgcaaccttgacagcgagacgggcgcaatggttcgcctcctggaagatggtgactgaggtacccaacctagacttgtccatcttctggattggccaacttaattaatgtatgaaataaaaggatgcacacatagtgacatgctaatcactataatgtgggcatcaaagttgtgtgttatgtgtaattactagttatctgaataaaagagaaagagatcatccatatttcttatcctaaatgaatgtcacgtgtctttataattctttgatgaaccagatgcatttcattaaccaaatccatatacatataaatattaatcatatataattaatatcaattgggttagcaaaacaaatctagtctaggtgtgttttgcgatccgatatcgaattggccacggtaccagctgctgctgttctagggttcacaagtctgcctatttgtcttccccaatggagctatggttgtctggtctggtccttggtcgtgtcccgtttcattgtgtactatttacctgtaatgtgtatccttaagtctggtttgatggtgtctgaaacgttttgctgtggtagagcagcatggaagaactataatgaataagtgatccctaatcattgtgtccaaattttgcttctgctatacccttttgtgctgtttcttatgttttgcttaaaaatttgatctgacaaacaaatttgtctaaattatgctcttgttctgactgtgtactgtacacatttgtattgctaccggtttggcacatagttttctctttgattgcagatcaaacccttctgattgcagattgcttggctatggctgatgtgctcactgttcttctttagcttgtatattgctgatggtggcttggctacggctgaaaaagttgctgctgcgccgacttggcaactgttgctccagtaatgctttgtcctctcttcctagccgccgacttggcacttggcagctgttgctcctgtaatgcgttgttatctcttatctcttgagatgtactatgattttgaggctgtttgacttgtgccagattgccagtgctgatgctatattatctcaggtttttatgctagtatatgttttactgtgtgctgcctgtgtcgagttacgtaatctattgaaccgctatgcgtgttgatgccctgttgttgcttgccagattgatgcccctgttgcttgcagcttgcaagctgtagtgaaatcctaaaattccaaaccaaatctattctgaacttttgaagatctgtgatgtccggaagaaaagattcaaacagataaacgggactctccagaatctataaaataaatgatcgacaaacgctttgctttggtaggcttcaagcttggtcacccggtccgggcctagaaggccagcttcggccgccccgggcaactttattatacaaagttgatagataaatcagatatctggttcctaaggacccggcggaccgattaaactgattcggtccgacgcgttacctaataacttcgtatagcatacattatacgaagttattagctaactaactagtaagcttaagccatgggtcgacggatccgttaactagcgtggcatttggcaccgccgcacactatgcgagctaggagtgctagtttacagatgaaactatgaaaccaagaaaacacaattgtccgtagctagcgcgtggcgtcgtgtcaagcttcacacagtatcttcgttcttcactataaatcgcgcctgttgttcgtgagacccaccaccgtggataacagtcccctaataataagcgatcaacagcactgctgatggctgaacaccgaggcgccgccgcgcgtaaccatccgccggagcagcccgtcgtgccggcgaacgacgccttccccgaccgcgcccagcagctctgcctcgacgccgggcgcgcgctcgcgatgtgcggcgtgctcgtcgccgtccctcccgcattttacgcgtcgacgtcgcggacgacaccgcacttgccttcgtcggcttcgtcctctggatcatcggtgcgtggctgtgcctcctggcgctcacgcccttggctccacgggcggtgagggcgggcggggccgccgccagcaccttgctgatcaggtgcctgtccctttcatgaactactagcgcccgcgcccgcggccgccgggcacaagagaacacatcgatgttcgctgcgtacgtcagcaataaggcactctttgtcagtagtcgagtgcatatgttgggtgtttgccctgggagatttcaagtgttgtggccattatcccgcaggataaaaaatcggcggcttttggattgatacggaaaataacgatgtttcatgctcgtgttgtgtgtgtgacatcttgtcagccaagtttttaaccgttgctactccccctctgtgggctcagtgtgtggaccggaatacgtcgtacataggccgtagcctaagcccaatatgccgtttttcaggttggcctgtgtgacgacaagcgggtctcaaaagcccatcacgcaactggcctgcaattattggaggagagcgcgtcgagttggttccagaggctgcgtggtggggccggactctgcgacgacctctcgttcgcgtccgatttggttgccgtgagccgtgacgtaacgcctccttccgttcctccctatataagttccacccccgggtccggtttccccaagccccagtgacccccgatcccgatcgcgaaatctccgcacccgccggcaagggaccgaagcaagcctctctcccgaccgtcgcatcaaggtacgcgtccgctcgatctgtcctcttccttctcgatttgacttgctgtggtgcccgatcacgggatcagaatcgcaccagtgtagatttcgcatgttctaagatgtgttagtttccaggctaatccagttctcttgacgcccgatccgatcgagctccgtgtttatttcagcctaatcgtagtattcccctaaaatttcctcattagggggttcgcaagattgttggtcgacaggttcacttatgctcgatcgcttacttttagtcgattcatgctgcgtactattgttgccccccgtggttttatcttttctcgtgtgaaatccagtagatatagtagatatcgtagcattaggttttaattcaatcgattgattattgtatcatcaaaattgagaagttcgaatcatgcctatcatgctgcctcaaccgaaatcctgtatattgaagtttcaattcaattgattgatcattcattagattcaaccaaaatctagaaggttagatgacgcatgtcatgctgcctgcgtagtttacctttgatctgtttatgattaccttatcagtaggatatttgtgattttgggaagtagcactaactgattcatgctgacatgatgttccctttcagattatactgttgagtcctatctaattgatgctttgtatgctatatgaatacgtcatggtaaattagcagttaattagcatattagcaattgggcgtacctcatcaggattgctcttgtagatgtgtgtggtgatgtttcttgttcaattcatgttctgctttaaaagtatgtgttctctgtttgttaattaagattcatggttataatgatttggacctaattaatcagggttgcccttttagatgcgtggttacttgttgagttcatttttttcctgctatagttgtatgcgtttgttcattcatggttagatttgatttgtttcttctctattccatgccttccatatacttcaattgtagcttaacatgagatttctgtatatgcaggtcgaccgccggggatccacacgacaccatggcccagtccaagcacggcctgaccaaggagatgaccatgaagtaccgcatggagggctgcgtggacggccacaagttcgtgatcaccggcgagggcatcggctaccccttcaagggcaagcaggccatcaacctgtgcgtggtggagggcggccccttgcccttcgccgaggacatcttgtccgccgccttcatgtacggcaaccgcgtgttcaccgagtacccccaggacatcgtcgactacttcaagaactcctgccccgccggctacacctgggaccgctccttcctgttcgaggacggcgccgtgtgcatctgcaacgccgacatcaccgtgagcgtggaggagaactgcatgtaccacgagtccaagttctacggcgtgaacttccccgccgacggccccgtgatgaagaagatgaccgacaactgggagccctcctgcgagaagatcatccccgtgcccaagcagggcatcttgaagggcgacgtgagcatgtacctgctgctgaaggacggtggccgcttgcgctgccagttcgacaccgtgtacaaggccaagtccgtgccccgcaagatgcccgactggcacttcatccagcacaagctgacccgcgaggaccgcagcgacgccaagaaccagaagtggcacctgaccgagcacgccatcgcctccggctccgccttgccctccggactcagatctcgatagagtcaacctagacttgtccatcttctggattggccaacttaattaatgtatgaaataaaaggatgcacacatagtgacatgctaatcactataatgtgggcatcaaagttgtgtgttatgtgtaattactagttatctgaataaaagagaaagagatcatccatatttcttatcctaaatgaatgtcacgtgtctttataattctttgatgaaccagatgcatttcattaaccaaatccatatacatataaatattaatcatatataattaatatcaattgggttagcaaaacaaatctagtctaggtgtgttttgcgaattgcggcgcccttactttaacgcctctaaccaacacccctttatctttataaggaacaataaacagaatttgccccactgttctaaatcacctaataatatccccagctaaaaacaataaaggtttcctagaattaagacaagcatgactgttcctccaggagggtttggaacattgttgcagtcttgcagatacgggcgaagggtgagaaacagagcggagggctggaggtgacctcggtagtcgacgccggagttgagcttgacaacgacggggcggcccctgatggacttgaggaagtccgatggcgtcttcaccgtcccgccggcgcccgaggcgggcctgtcgctgccgccgccgccgctgctcatcttgcgcgctgtgcccccggcggtgtccctgtgttgcggatcgcgggtgggccaggtggatgcgagggcgacccgtttggactccggccggagccgccggatccctggtcggtgtcagtgccgtttactctgggccccacgtgtcagtaccgtctgtagatgacaacaacccgtcgtccacagtcatgtccaaaatatcctttcttcttttttttcgattcggatatctatcttccttttttttttccaaaaatcttcttgacgcaccagcgcgcacgtttgtggtaaacgccgacacgtcggtcccacgtcgatagaccccacccaccagtgagtagcgtgtacgtattcgggggtgacggacgtgtcgccgtcgtcttgctagtcccattcccatctgagccacacatctctgaacaaaaaaaaggagggaggcctccacgcacatccccctccgtgccacccgccccaaaccctcgcgccgcctccgagacagccgccgcaaccatggccaccgccgccgccgcgtctaccgcgctcactggcgccactaccgctgcgcccaaggcgaggcgccgggcgcacctcctggccacccgccgcgccctcgccgcgcccatcaggtgctcagcggcgtcacccgccatgccgatggctcccccggccaccccgctccggccgtggggccccaccgagccccgcaagggtgctgacatcctcgtcgagtccctcgagcgctgcggcgtccgcgacgtcttcgcctaccccggcggcgcgtccatggagatccaccaggcactcacccgctcccccgtcatcgccaaccacctcttccgccacgagcaaggggaggcctttgccgcctccggctacgcgcgctcctcgggccgcgtcggcgtctgcatcgccacctccggccccggcgccaccaacctagtctccgcgctcgccgacgcgctgctcgattccgtccccatggtcgccatcacgggacaggtggcgcgacgcatgattggcaccgacgccttccaggagacgcccatcgtcgaggtcacccgctccatcaccaagcacaactacctggtcctcgacgtcgacgacatcccccgcgtcgtgcaggaggctttcttcctcgcctcctctggtcgaccagggccggtgcttgtcgacatccccaaggacatccagcagcagatggcggtgcctgtctgggacaagcccatgagtctgcctgggtacattgcgcgccttcccaagccccctgcgactgagttgcttgagcaggtgctgcgtcttgttggtgaatcgcggcgccctgttctttatgtgggcggtggctgcgcagcatctggtgaggagttgcgacgctttgtggagctgactggaatcccggtcacaactactcttatgggcctcggcaacttccccagcgacgacccactgtctctgcgcatgctaggtatgcatgggacggtgtatgcaaattatgcagtggataaggccgatctgttgcttgcacttggtgtgcggtttgatgatcgcgtgacagggaagattgaggcttttgcaagcagggctaagattgtgcacgttgatattgatccggctgagattggcaagaacaagcagccacatgtgtccatctgtgcagatgttaagcttgctttgcagggcatgaatgctcttcttgaaggaagcacatcaaagaagagctttgactttggctcatggaacgatgagttggatcagcagaagagggaattcccccttgggtataaaacatctaatgaggagatccagccacaatatgctattcaggttcttgatgagctgacgaaaggcgaggccatcatcggcacaggtgttgggcagcaccagatgtgggcggcacagtactacacttacaagcggccaaggcagtggttgtcttcagctggtcttggggctatgggatttggtttgccggctgctgctggtgcttctgtggcaaacccaggtgtcactgttgttgacatcgatggagatggtagctttctcatgaacgttcaggagctagctatgatccgaattgagaacctcccagtgaaggtctttgtgctaaacaaccagcacctggggatggtggtgcagttggaggacaggttctataaggccaacagagcgcacacatacttgggaaacccagagaatgaaagtgagatatatccagatttcgtgacgatcgccaaagggttcaacattccagcggtccgtgtgacaaagaagaacgaagtccgcgcagcgataaagaagatgctcgagactccagggccgtacctcttggatataatcgtcccacaccaggagcatgtgttgcctatgatccctagtggtggggctttcaaggatatgatcctggatggtgatggcaggactgtgtactgactagctagtcagttaacagatctgccagatcctcggtgtacaaataacccgtcttatcctatgagacgggccggcgtcagtgtgttctggaggaatttttatgtcagagcctttttctttgtgtgcttgatgtagatgccaagggaagcttattggctgttgaagcttgatgcaaaataaattatggaactctgttttttgtttatctaataataactagcaaatatgcttccattgcattgaaactaacagccttttgtgtttccaagttttattttgtgacaatgtcatctatttcaattagttgtggaatcggaaacttgcaggactaacttggaaactccaatccctcagcatcctggactttttcctggtgtaatccatgtagatattattttaatcatcattttagttctggaggtttttccatctccggttttgctcccctttcttcaaaaaaaaaaaaaaaatgccgtaggcgccgcaacgcccacctgttgttcaaactcatgggcacgagtggctcgaagattttatacaacaattgctgtagtttcaccgttgctggtgaagaagcatttttttaaaaaaatatagtggtattcattttaattagtttagttgtgcagcgagcaaaatttggacatgctctgctcggaatctgatcgacctagacacagattagcagcagtagctttgtcatctgttccaagagttgcgatctgatagaagaaaaaaaaaccttcccttcaatgtaaaaccgaaactaacaagaaagaagcacagtgccgtttaggcaagtatggagtacgtattaagcatgtagaaggccatgcatgaaccactaacaagaaagaagcgcagtgccattcaggcaagcataagcatgtagattggcatgcatgaacaactaacagtagatcgtctctggtctgattagaagttttttgggaagccaagaaatcatgtacaactggttccatctcaaattccgtggcaaaaagaggcctaagcaacatacctcgagtagatcacattcaagcttggtcacccggtccgtcaatattctgattccgatgacttcgtaggttcctagctcaagccgctcgtgtccaagcgtcacttacgattagctaatgattacggcatctaggaccgactagtggcgcgccgactagctagctaaggtaccgagctcgaattcattccgattaatcgtggcctcttgctcttcaggatgaagagctatgtttaaacgtgcaagcgctactagacaattcagtacattaaaaacgtccgcaatgtgttattaagttgtctaagcgtcaatttgtttacaccacaatatatcctgcca

SEQ ID NO: 58 - DNA, 26388 bp, Artificial sequence
  PHP95904
gtttacccgccaatatatcctgtcaaacactgatagtttaaactgaaggcgggaaacgacaatctgatcatgagcggagaattaagggagtcacgttatgacccccgccgatgacgcgggacaagccgttttacgtttggaactgacagaaccgcaacgttgaaggagccactcagcaagctggtacgattgtaatacgactcactatagggcgaattgagcgctgtttaaacgctcttcaactggaagagcggttacgctgtttaaacgctcttcaactggaagagcggttactaccggttcactagctagctgctaatcgagctagttaccctatgaggtgacatgaagcgctcacggttactatgacggttagcttcacgactgttggtggcagtagcgtacgacttagctatagttccggacttacccttaagcgatttaaatctgcggttaccgaattcgagctcggtacctagtacccttgtacttttggtttcacctgcatagagaaaacccacaagaatatgacagtctgatttgtcagtctcattctcaagcaacatttctctatccgttactttcatggtgaataacacaatccatcatcaatactttgtgttactcagaaactgaaagttattccgagtcttgcatatctttggacctactcgtttttctaccattattgctgattgttaagctctcgctacttgaatcggcattgttggagtgggaaggttcaaaaaattggagttatgactagttgtctctttctatgtacgatggagaaaatgaataaacaactgagaaaatggctcttgtttagttgatgatgctcttaagctttccactggttgccatatatgatttgggcatttcactttgatcttaatgggccttgtaaagcccaagactcatgattatctttagttgatgctcttaattaggtgtgggcaaataattcaaactgtatgtacccgaccaaaaccaaagcaaaaataatcgaaccaaaccgaaaatttaaaaataaccgaatgaaaactaaatcctataactgaaagaactgaaaccgaatcaaaatatttaatgtaaccaaaaatatccgaaatataattatattgtcaaaaatattaataatttctagattaaataattaaaaatacttaaaaatttatataaaatagtaaaaatactcgaaaataaccacaaatattcaaaaacaaccgaaatatcccaaaatattcaaagcaaaataaccgaatggataccaaattttaaaaccgaaaaaactggaacaaaaccaaaatcgaaccaaaatttcaaaaatcgaataaatactaaactttagaacaaaaaaaaacgataaccgaatgtatacgaaccaaagccgaattagataaccgaacgtccaggactactcttaatctttccgccacttatgatttgggctattactttgtttataatgagccttttcaagctcaagttcatgattgtccgtgagatgagaaactgacttgttggattcgaaaccctagctagtattggttaatacttaatacataaatgacctgcattgacatcatcatccaagaaaataaaaattgtatgcttgagatatttagttttcctagctaggttttctttattttagtaccgaatctttaggtgtgccacgttaatttagacccattttttcatacttaccaactgagtctagtttaatcatgactataatcgtataaaatgattcagtcgacgtcattgcgaacgtatataaaatcatccaaattgacgtcattccaaagaggtaagcatgcttatctaagagtccgagcatactaaacaagacgacattttatttgcactccaaatcaaattttgtattgcctaaagaaaaacaatcaaactcaagtttcttaaaattaatttcattcaaactaatcactttcaatatctcacatattattcatgccatttctatttgtctaaacatgatttaaaaaaaaaagtaaaatacaaagattactatgcaaaaactctataaaaaaaaattcaaatttcttatttatttgtgacatcaaattttcaaaataatttttttaattatcggttgatccggtcagtcgataaaaacataaactttcagcgaccgttaaaactttcctactaccgatttagagaaaatcttagcttgaaacgtaattgtaacctgccttcatgcaagtcgcaagatatgtcatcctaagttgtatatgttttctcaaaagatgtatttacttgagaaaatacgtttcaacgttgatggacaaccaattaagaatcaagcacctttcgtaatcaatttaggcttatcgtctaaggtatactgatttacgacagttgactagacttataaggaacaaaataatagaatagtttctaaacacttcacctaatcatagagactaagatggtaattcgtaaacgacaaagcctagtgacactgtccattgtaaaattccacatcatattagtattaaacatatacatgtagtttcctgaacacatgtagtatcaaacacacttcgtggcttcttcctcgaaacctgcggccgcgctatagttccggacttacccttaagataacttcgtatagcatacattatacgaagttatgggcccacgcgtgaagagcggttaccagagctggtcacctttgtccaccaagatggaactgtcttcggccagaatggccatctggattcagcaggcctagaaggccatttatcgctatcaactttgtatagaaaagttgggccgagctcggtacggccagaatggcccggaccgggttaccaagcggccgcacactgatagtttaaactgaaggcgggaaacgacaatctgatcatgagcggagaattaagggagtcacgttatgacccccgccgatgacgcgggacaagccgttttacgtttggaactgacagaaccgcaacgattgaaggagccactcagccgcgggtttctggagtttaatgagctaagcacatacgtcagaaaccattattgcgcgttcaaaagtcgcctaaggtcactatcagctagcaaatatttcttgtcaaaaatgctccactgacgttccataaattcccctcggtatccaattagagtctcatattcactcccatggcggccaatgcgggcggcggtggagcgggaggaggcagcggcagcggcagcgtggctgcgccggcggtgtgccgccccagcggctcgcggtggacgccgacgccggagcagatcaggatgctgaaggagctctactacggctgcggcatccggtcgcccagctcggagcagatccagcgcatcaccgccatgctgcggcagcacggcaagatcgagggcaagaacgtcttctactggttccagaaccacaaggcccgcgagcgccagaagcgccgcctcaccagcctcgacgtcaacgtgcccgccgccggcgcggccgacgccaccaccagccaactcggcgtcctctcgctgtcgtcgccgccgccttcaggcgcggcgcctccctcgcccaccctcggcttctacgccgccggcaatggcggcggatcggctgtgctgctggacacgagttccgactggggcagcagcggcgctgctatggccaccgagacatgcttcctgcaggactacatgggcgtgacggacacgggcagctcgtcgcagtggccacgcttctcgtcgtcggacacgataatggcggcggccgcggcgcgggcggcgacgacgcgggcgcccgagacgctccctctcttcccgacctgcggcgacgacggcggcagcggtagcagcagctacttgccgttctggggtgccgcgtccacaactgccggcgccacttcttccgttgcgatccaacagcaacaccagctgcaggagcagtacagcttttacagcaacagcaacagcacccagctggccggcaccggcaaccaagacgtatcggcaacagcagcagcagccgccgccctggagctgagcctcagctcatggtgctccccttaccctgctgcagggagtatgtgagagcaacgcgagctgccactgctcttcactgatgtctctggaatggaaggaggaggaagtgagaacagatcattcgacaaagcagcattagtccgttgatcggtggaagaccactcgtcagtgttgagttgaatgtttgatcaataaaatacggcaatgctgtaagggttgttttttatgccattgataatacactgtactgttcagttgttgaactctatttcttagccatgccaagtgcttttcttattttgaataacattacagcaaaaagttgaaagacaaaaaaaaaaacccccgaacagagtgctttgggtcccaagcttctttagactgtgttcggcgttccccctaaatttctccccctatatctcactcacttgtcacatcagcgttctctttccccctatatctccacgctctacagcagttccacctatatcaaacctctataccccaccacaacaatattatatactttcatcttcaactaactcatgtaccttccaatttttttctactaataattatttacgtgcacagaaacttagcaaggagagagagagcgggaatttaaatgctcggcgttaggcttttagtccgctaggtggctagaccgaggttaggacgctagttcactaggggcctagtggtgttttaagacgtcacggtcaccacgcgtggaccgaagcttgcatgcctgcagtgcagcgtgacccggtcgtgcccctctctagagataatgagcattgcatgtctaagttataaaaaattaccacatattttttttgtcacacttgtttgaagtgcagtttatctatctttatacatatatttaaactttactctacgaataatataatctatagtactacaataatatcagtgttttagagaatcatataaatgaacagttagacatggtctaaaggacaattgagtattttgacaacaggactctacagttttatctttttagtgtgcatgtgttctcctttttttttgcaaatagcttcacctatataatacttcatccattttattagtacatccatttagggtttagggttaatggtttttatagactaatttttttagtacatctattttattctattttagcctctaaattaagaaaactaaaactctattttagtttttttatttaataatttagatataaaatagaataaaataaagtgactaaaaattaaacaaataccctttaagaaattaaaaaaactaaggaaacatttttcttgtttcgagtagataatgccagcctgttaaacgccgtcgacgagtctaacggacaccaaccagcgaaccagcagcgtcgcgtcgggccaagcgaagcagacggcacggcatctctgtcgctgcctctggacccctctcgagagttccgctccaccgttggacttgctccgctgtcggcatccagaaattgcgtggcggagcggcagacgtgagccggcacggcaggcggcctcctcctcctctcacggcaccggcagctacgggggattcctttcccaccgctccttcgctttcccttcctcgcccgccgtaataaatagacaccccctccacaccctctttccccaacctcgtgttgttcggagcgcacacacacacaaccagatctcccccaaatccacccgtcggcacctccgcttcaaggtacgccgctcgtcctcccccccccccctctctaccttctctagatcggcgttccggtccatgcatggttagggcccggtagttctacttctgttcatgtttgtgttagatccgtgtttgtgttagatccgtgctgctagcgttcgtacacggatgcgacctgtacgtcagacacgttctgattgctaacttgccagtgtttctctttggggaatcctgggatggctctagccgttccgcagacgggatcgatttcatgattttttttgtttcgttgcatagggtttggtttgcccttttcctttatttcaatatatgccgtgcacttgtttgtcgggtcatcttttcatgcttttttttgtcttggttgtgatgatgtggtctggttgggcggtcgttctagatcggagtagaattctgtttcaaactacctggtggatttattaattttggatctgtatgtgtgtgccatacatattcatagttacgaattgaagatgatggatggaaatatcgatctaggataggtatacatgttgatgcgggttttactgatgcatatacagagatgctttttgttcgcttggttgtgatgatgtggtgtggttgggcggtcgttcattcgttctagatcggagtagaatactgtttcaaactacctggtgtatttattaattttggaactgtatgtgtgtgtcatacatcttcatagttacgagtttaagatggatggaaatatcgatctaggataggtatacatgttgatgtgggttttactgatgcatatacatgatggcatatgcagcatctattcatatgctctaaccttgagtacctatctattataataaacaagtatgttttataattattttgatcttgatatacttggatgatggcatatgcagcagctatatgtggatttttttagcactgccttcatacgctatttatttgcttggtactgtttcttttgtcgatgctcaccctgttgtttggtgttacttctgcaggtcgactttaacttagcctaggatccatggccactgtgaacaactggctcgctttctccctctccccgcaggagctgccgccctcccagacgacggactccacactcatctcggccgccaccgccgaccatgtctccggcgatgtctgcttcaacatcccccaagattggagcatgaggggatcagagctttcggcgctcgtcgcggagccgaagctggaggacttcctcggcggcatctccttctccgagcagcatcacaaggccaactgcaacatgatacccagcactagcagcacagtttgctacgcgagctcaggtgctagcaccggctaccatcaccagctgtaccaccagcccaccagctcagcgctccacttcgcggactccgtaatggtggcttcctcggccggtgtccacgacggcggtgccatgctcagcgcggccgccgctaacggtgtcgctggcgctgccagtgccaacggcggcggcatcgggctgtccatgattaagaactggctgcggagccaaccggcgcccatgcagccgagggtggcggcggctgagggcgcgcaggggctctctttgtccatgaacatggcggggacgacccaaggcgctgctggcatgccacttctcgctggagagcgcgcacgggcgcccgagagtgtatcgacgtcagcacagggtggagccgtcgtcgtcacggcgccgaaggaggatagcggtggcagcggtgttgccggcgctctagtagccgtgagcacggacacgggtggcagcggcggcgcgtcggctgacaacacggcaaggaagacggtggacacgttcgggcagcgcacgtcgatttaccgtggcgtgacaaggcatagatggactgggagatatgaggcacatctttgggataacagttgcagaagggaagggcaaactcgtaagggtcgtcaagtctatttaggtggctatgataaagaggagaaagctgctagggcttatgatcttgctgctctgaagtactggggtgccacaacaacaacaaattttccagtgagtaactacgaaaaggagctcgaggacatgaagcacatgacaaggcaggagtttgtagcgtctctgagaaggaagagcagtggtttctccagaggtgcatccatttacaggggagtgactaggcatcaccaacatggaagatggcaagcacggattggacgagttgcagggaacaaggatctttacttgggcaccttcagcacccaggaggaggcagcggaggcgtacgacatcgcggcgatcaagttccgcggcctcaacgccgtcaccaacttcgacatgagccgctacgacgtgaagagcatcctggacagcagcgccctccccatcggcagcgccgccaagcgcctcaaggaggccgaggccgcagcgtccgcgcagcaccaccacgccggcgtggtgagctacgacgtcggccgcatcgcctcgcagctcggcgacggcggagccctggcggcggcgtacggcgcgcactaccacggcgccgcctggccgaccatcgcgttccagccgggcgccgccagcacaggcctgtaccacccgtacgcgcagcagccaatgcgcggcggcgggtggtgcaagcaggagcaggaccacgcggtgatcgcggccgcgcacagcctgcaggacctccaccacctgaacctgggcgcggccggcgcgcacgactttttctcggcagggcagcaggccgccgccgctgcgatgcacggcctgggtagcatcgacagtgcgtcgctcgagcacagcaccggctccaactccgtcgtctacaacggcggggtcggcgacagcaacggcgccagcgccgtcggcggcagtggcggtggctacatgatgccgatgagcgctgccggagcaaccactacatcggcaatggtgagccacgagcaggtgcatgcacgggcctacgacgaagccaagcaggctgctcagatggggtacgagagctacctggtgaacgcggagaacaatggtggcggaaggatgtctgcatgggggactgtcgtgtctgcagccgcggcggcagcagcaagcagcaacgacaacatggccgccgacgtcgggcatggcggcgcgcagctcttcagtgtctggaacgacacttaagcgtacctagtggtacctgacatcttatagtctgcaacctctcgtgtctgaattcctatctttatcaagtgttattgcttccacgactataggacagctttcgtcgaaagcttttgctcatgtgatctcgaaggattcatctagtctgatttttcgtgacttgtatcggttttattggattcatccaacatatatcaataaaaaatgagttgtgtttcctttcttcctagttcagttaaaattatttccctcctgcgcttgtgctgtaattgtctgtgtacctgttgtttgtgactgtgttagttcccttggatatgatttcgtatttgatatgtacatggagatagcttagcttcattattggagtatgaagttagtatgacatagtcactctcctggaaaattgacactgcaaaccatatttttattctgaaccacaaatcctagtcagtccgctggcatatgccgtccgtttgctgaatccagaacgtgggtttggagatgtacggctgagatgcctctatgcgaaggggatttcgtggtgaaacgagatgggagtagagcaacgcccgtggaagatgcttcaaacttccacacttttgagcaacgatcggcagtagtaaggtagacgatttcaagatcaaagcatatgaagataaacaacatcaacaacaaaatttgttggggttctatagagagaaacagagctacatacatacactgttttgtatctaccatctgagatgatgaaaagatgaaaaactaaagaatgccccggcgccaacgccaggacacgccgcgcgcgcgtcacccgagccatctcttgacccagccggcgctgtatatttacacacgttgcagcatcgatcaccacctgttcgatcgcgtcgccgtcaccggcgcgccgcgacttattgaactagtctagggcgcggctaacaacctagcttagattgccttgtctaaacccttaggctaacgcgccacggtaacccggtccgggcctagaaggccccagagctggtcaccccatacgattggaagcttcaagtttgtacaaaaaagcaggctccggccagagttacccggaccgaagcttgcatgcctgcagtgcagcgtgacccggtcgtgcccctctctagagataatgagcattgcatgtctaagttataaaaaattaccacatattttttttgtcacacttgtttgaagtgcagtttatctatctttatacatatatttaaactttactctacgaataatataatctatagtactacaataatatcagtgttttagagaatcatataaatgaacagttagacatggtctaaaggacaattgagtattttgacaacaggactctacagttttatctttttagtgtgcatgtgttctcctttttttttgcaaatagcttcacctatataatacttcatccattttattagtacatccatttagggtttagggttaatggtttttatagactaatttttttagtacatctattttattctattttagcctctaaattaagaaaactaaaactctattttagtttttttatttaataatttagatataaaatagaataaaataaagtgactaaaaattaaacaaataccctttaagaaattaaaaaaactaaggaaacatttttcttgtttcgagtagataatgccagcctgttaaacgccgtcgacgagtctaacggacaccaaccagcgaaccagcagcgtcgcgtcgggccaagcgaagcagacggcacggcatctctgtcgctgcctctggacccctctcgagagttccgctccaccgttggacttgctccgctgtcggcatccagaaattgcgtggcggagcggcagacgtgagccggcacggcaggcggcctcctcctcctctcacggcaccggcagctacgggggattcctttcccaccgctccttcgctttcccttcctcgcccgccgtaataaatagacaccccctccacaccctctttccccaacctcgtgttgttcggagcgcacacacacacaaccagatctcccccaaatccacccgtcggcacctccgcttcaaggtacgccgctcgtcctcccccccccccctctctaccttctctagatcggcgttccggtccatgcatggttagggcccggtagttctacttctgttcatgtttgtgttagatccgtgtttgtgttagatccgtgctgctagcgttcgtacacggatgcgacctgtacgtcagacacgttctgattgctaacttgccagtgtttctctttggggaatcctgggatggctctagccgttccgcagacgggatcgatttcatgattttttttgtttcgttgcatagggtttggtttgcccttttcctttatttcaatatatgccgtgcacttgtttgtcgggtcatcttttcatgcttttttttgtcttggttgtgatgatgtggtctggttgggcggtcgttctagatcggagtagaattctgtttcaaactacctggtggatttattaattttggatctgtatgtgtgtgccatacatattcatagttacgaattgaagatgatggatggaaatatcgatctaggataggtatacatgttgatgcgggttttactgatgcatatacagagatgctttttgttcgcttggttgtgatgatgtggtgtggttgggcggtcgttcattcgttctagatcggagtagaatactgtttcaaactacctggtgtatttattaattttggaactgtatgtgtgtgtcatacatcttcatagttacgagtttaagatggatggaaatatcgatctaggataggtatacatgttgatgtgggttttactgatgcatatacatgatggcatatgcagcatctattcatatgctctaaccttgagtacctatctattataataaacaagtatgttttataattattttgatcttgatatacttggatgatggcatatgcagcagctatatgtggatttttttagccctgccttcatacgctatttatttgcttggtactgtttcttttgtcgatgctcaccctgttgtttggtgttacttctgcaggtcgactttaacttagcctaggatgattcacattgtggatcatgttgatttagatgcttggagtgtgcctgaggtccttagaccactttatgaatccccgaagattcttgcacagaaaacaactattgctgcactgcgtcacattaggcaaattgcgcatgaatctagtggggaaatgccctatggagggggccgacagccagcagttttgagaacatttagccagaggcttagcaggggtttcaatgatgctgtcaatgggtttccagatgacggttggtcactgatgagcagtgacggtgctgaggatgttactattgctatcaactcttctccaaacaaacttattggtcctcatgtcaactcttcccagctgtttactgcgatcggaggtggcatcctgtgtgctaaggcatcaatgctgcttcagaatgtgccacctgccctactagtacgatttctgagggagcatcgctccgaatgggctgatcctggtgttgatgcttattctgccgctgctcttagggctagtccatatgcagttcctggcttgcgtgctagtgggtttatgggcagccaggttattctgccgcttgcacataccttagagcacgaagagttcttggaggttattaggcttgagggacacagcctctgccatgacgaagttgttctgtcacgagatatgtatcttctgcagttgtgcagtggtgtggatgaaaatgcagctggtgcatgtgcacagcttgtgtttgcacccatcgatgaatcttttgccgacgatgcgccactgctaccctcaggcttccgtgtcattccactggatgcaaagacggatccaccatcaggcacacgcacacttgacctcgcatctaccctcgaggttggatctggtgggacaacgcgtgcttcgagtgacgcctccagcacctgcaacacaagatcagtgctgaccattgctttccagttctcatatgagaatcacctacgagagagcgtcgcagccatggccaggcaatacgtcaggactgtggtggcgtcggtgcagagggtagccatggcaatagctccttcgcgcattggtggacagcttgaaatgaagcaaactccaggatctcctgaggcacacacgctggcaaggtggatcggcaggagctacaggttccacactggagccgaactcctccgcacggacacccaatgcacggatgcttccttgaaagcgctgtggcaacactcggactcgatcatgtgctgttccctgaaggctgctcccgtgttcacctttgccaaccaagccggcctggacatgctggagacgacgctgattgcgctccaggacatctcccttgagaagatccttgatgacgatggcaggaaggcgctctgcaccgagtaccctaagattatgcaacagggcttcgcgtacctccccggtggcgtgtgtgtgtcgagcatggggcggccggtgtcgtacgagcaggcggtggcgtggaaggtcctgagcgacgacgacaccccgcactgccttgccttcatgttcgtgaactggtccttcgtgtgaggtaccgttaacagatctactaactatctatactgtaataatgttgtatagccgccggatagctagctagtttagtcattcagcggcgatgggtaataataaagtgtcatccatccatcaccatgcgtggcaacgtgagcaatgacctgattgaacaaattgaaatgaaaagaagaaatatgttatatgtcaacgagatttcctcataatgccactgacgacgtgtgtccaagaaatgtatcagtgatacgtatattcacaatttttttatgacttatactcacaatttgtttttttactacttatactcacaatttgttgtgcgtaccataacaatttcgatcgaatatatatcagaaagttgacgaaagtaagctcactcaaaaagttaaatgggctgcggaagctgcgtcaggcccaagttttggctattctatccggtatccacgattttgatggctgagggacatatgttcgcttaagcttcggtccgggcctagaaggccgatctcccgggcacccagctttcttgtacaaagtggccgttaacggatcggccagaatggcccggaccgggttaccgaattcgagctcggtaccctggttcacaaactcaatacaacacacagtggagtagggtattacgctccggcggcccgaaccactctaaatccttgtgtcctcgtgtgctcttccaccattaatgactgtaattgcagggacacgaagagttgtagcgcttttgccaacaagatccgctatatgctagtagagtggaacctgcacagcaacaagcatccaataatctgagaataagaattatgtgtggtgatggttctcatctctgcaactcgccattttcgcgagagaaccaaatccaagttggtgaagatcatgatttgggctcatgggctggcatagtagctattacctttgcaattgtggttcgaatctatccgatattctccttttcagggagagctaatgcttatgcttattgggtattttggtttgacactgcttcacgcccaaaaaaaggcaactatgtctgagttggatatggcccaaaaaaaggcagctatgtctgagttggatatggaagtcttctttcgtttagggtgaagtaagaccaagctcatgagcttattatcttaggtcggaacaaattagttgataggcatggcacatttatcaaattataatgattttaacagaaaagcaacacctctttttcagcagcaccagctttgcaagctgcaattgacactccaagcatagtatttgctccaaactcagcctgcatttcgcacaatatcatatctatttccatttggataaaatatattttccagaaatatgggaacagaatcaagatacagaaaaaagttgtggtagtagtggtaagtggaaacacaagtacagtgaaaagatagcattatttctgaacagtcaaattaaccgaaataagtagtatcacatactgcccctaaattgactacacccaatgtaaagaattgcttgagcatattgagccatcagttgtttgtttgtgtaacggatttgacaatgcagagttcaggagcaaaaaaccgcaaaggagagaaagagggaaaggatctcctagtatcccaccttgtggcgcgccctgtcaagtgcatgatggcctggtcgatctgcgtctgctgctgcggttccatcccaacgagtgcctccgacaccttgtcgttgatcacccgcaccgcgtaggcgacccccctggcgaggaacttccgcctctcggaggccccggccgcgtcggcggcggcgccctcgagcgcgcccacgctagccgtagatgctcggtgcacggccttgttggtgtgcaactcgacctcaacggccggtgcgctacgcccgtcaaggatctggcgcgcccgcaccctcgtgatcacggtgggcgcctcccgcctcatgtggccgacgatgaaaagcgccgggttaggggccttggcgcgcaccgccgtattcagggcctcctcgctcttgcgcgagagcaggtgcttccccaggtactcctgcactgacaaggctgccacagcggtggaatttgtcctcacgacttcgccacgtcgtcctcacctccctggcttcccacgactccgccgtatcgaggtgctcggtgggtcgtcttaatccgaagtccgaactaggaagacgagacagagaggtctgaggaatgggcctcgtttgatgttgagctgaattatttttccagcataagcccaggtcttggtccatgaacaaaattactagaaacccagcccagtactacgatctaaaagagggactgccactggatagctctctctagcattctccacgctccaatacagcggcgtcgtgtctatccgggtctatccgcgaacacgtgagaactctccagaaactgctttctcctccacttcatctctctcgctttccctctataaaaagaccccttctaggaattgagggagacagcaagcaccaagcagcgatccgaagctcaatcaattcactcaaacctcttccccaaatcttcgattagatcttcgttgacaagaagactagaaccgaacctgacatgtccaacctgctcacggttcaccagaaccttccggctcttccagtggacgcgacgtccgatgaagtcaggaagaacctcatggacatgttccgcgacaggcaagcgttcagcgagcacacctggaagatgctgctctccgtctgccgctcctgggctgcatggtgcaagctgaacaacaggaagtggttccccgctgagcccgaggacgtgagggattaccttctgtacctgcaagcgcgaggtttgtttctgcttctacctttgatatatatataataattatcattaattagtagtaatataatatttcaaatatttttttcaaaataaaagaatgtagtatatagcaattgcttttctgtagtttataagtgtgtatattttaatttataacttttctaatatatgaccaaaacatggtgatgcctaggtctggcagtgaagaccatccagcaacaccttggacaactgaacatgcttcacaggcgctccggcctcccgcgccccagcgactcgaacgccgtgagcctcgtcatgcgccgcatcaggaaggaaaacgtcgatgccggcgaaagggcaaagcaggccctcgcgttcgagaggaccgatttcgaccaggtccgcagcctgatggagaacagcgacaggtgccaggacattaggaacctggcgttcctcggaattgcatacaacacgctcctcaggatcgcggaaattgcccgcattcgcgtgaaggacattagccgcaccgacggcggcaggatgcttatccacattggcaggaccaagacgctcgtttccaccgcaggcgtcgaaaaggccctcagcctcggagtgaccaagctcgtcgaacgctggatctccgtgtccggcgtcgcggacgacccaaacaactacctcttctgccgcgtccgcaagaacggggtggctgcccctagcgccaccagccaactcagcacgagggccttggaaggtattttcgaggccacccaccgcctgatctacggcgcgaaggatgacagcggtcaacgctacctcgcatggtccgggcactccgcccgcgttggagctgctagggacatggcccgcgccggtgtttccatccccgaaatcatgcaggcgggtggatggacgaacgtgaacattgtcatgaactacattcgcaaccttgacagcgagacgggcgcaatggttcgcctcctggaagatggtgactgaggtacccaacctagacttgtccatcttctggattggccaacttaattaatgtatgaaataaaaggatgcacacatagtgacatgctaatcactataatgtgggcatcaaagttgtgtgttatgtgtaattactagttatctgaataaaagagaaagagatcatccatatttcttatcctaaatgaatgtcacgtgtctttataattctttgatgaaccagatgcatttcattaaccaaatccatatacatataaatattaatcatatataattaatatcaattgggttagcaaaacaaatctagtctaggtgtgttttgcgatccgatatcgaattggccacggtaccagctgctgctgttctagggttcacaagtctgcctatttgtcttccccaatggagctatggttgtctggtctggtccttggtcgtgtcccgtttcattgtgtactatttacctgtaatgtgtatccttaagtctggtttgatggtgtctgaaacgttttgctgtggtagagcagcatggaagaactataatgaataagtgatccctaatcattgtgtccaaattttgcttctgctatacccttttgtgctgtttcttatgttttgcttaaaaatttgatctgacaaacaaatttgtctaaattatgctcttgttctgactgtgtactgtacacatttgtattgctaccggtttggcacatagttttctctttgattgcagatcaaacccttctgattgcagattgcttggctatggctgatgtgctcactgttcttctttagcttgtatattgctgatggtggcttggctacggctgaaaaagttgctgctgcgccgacttggcaactgttgctccagtaatgctttgtcctctcttcctagccgccgacttggcacttggcagctgttgctcctgtaatgcgttgttatctcttatctcttgagatgtactatgattttgaggctgtttgacttgtgccagattgccagtgctgatgctatattatctcaggtttttatgctagtatatgttttactgtgtgctgcctgtgtcgagttacgtaatctattgaaccgctatgcgtgttgatgccctgttgttgcttgccagattgatgcccctgttgcttgcagcttgcaagctgtagtgaaatcctaaaattccaaaccaaatctattctgaacttttgaagatctgtgatgtccggaagaaaagattcaaacagataaacgggactctccagaatctataaaataaatgatcgacaaacgctttgctttggtaggcttcaagcttggtcacccggtccgggcctagaaggccagcttcggccgccccgggcaactttattatacaaagttgatagataaatcagatatctggttcctaaggacccggcggaccgattaaactgattcggtccgacgcgttacctaataacttcgtatagcatacattatacgaagttattagctaactaactagtaagcttaagccatgggtcgacggatccgttaactagcgtggcatttggcaccgccgcacactatgcgagctaggagtgctagtttacagatgaaactatgaaaccaagaaaacacaattgtccgtagctagcgcgtggcgtcgtgtcaagcttcacacagtatcttcgttcttcactataaatcgcgcctgttgttcgtgagacccaccaccgtggataacagtcccctaataataagcgatcaacagcactgctgatggctgaacaccgaggcgccgccgcgcgtaaccatccgccggagcagcccgtcgtgccggcgaacgacgccttccccgaccgcgcccagcagctctgcctcgacgccgggcgcgcgctcgcgatgtgcggcgtgctcgtcgccgtccctcccgcattttacgcgtcgacgtcgcggacgacaccgcacttgccttcgtcggcttcgtcctctggatcatcggtgcgtggctgtgcctcctggcgctcacgcccttggctccacgggcggtgagggcgggcggggccgccgccagcaccttgctgatcaggtgcctgtccctttcatgaactactagcgcccgcgcccgcggccgccgggcacaagagaacacatcgatgttcgctgcgtacgtcagcaataaggcactctttgtcagtagtcgagtgcatatgttgggtgtttgccctgggagatttcaagtgttgtggccattatcccgcaggataaaaaatcggcggcttttggattgatacggaaaataacgatgtttcatgctcgtgttgtgtgtgtgacatcttgtcagccaagtttttaaccgttgctactccccctctgtgggctcagtgtgtggaccggaatacgtcgtacataggccgtagcctaagcccaatatgccgtttttcaggttggcctgtgtgacgacaagcgggtctcaaaagcccatcacgcaactggcctgcaattattggaggagagcgcgtcgagttggttccagaggctgcgtggtggggccggactctgcgacgacctctcgttcgcgtccgatttggttgccgtgagccgtgacgtaacgcctccttccgttcctccctatataagttccacccccgggtccggtttccccaagccccagtgacccccgatcccgatcgcgaaatctccgcacccgccggcaagggaccgaagcaagcctctctcccgaccgtcgcatcaaggtacgcgtccgctcgatctgtcctcttccttctcgatttgacttgctgtggtgcccgatcacgggatcagaatcgcaccagtgtagatttcgcatgttctaagatgtgttagtttccaggctaatccagttctcttgacgcccgatccgatcgagctccgtgtttatttcagcctaatcgtagtattcccctaaaatttcctcattagggggttcgcaagattgttggtcgacaggttcacttatgctcgatcgcttacttttagtcgattcatgctgcgtactattgttgccccccgtggttttatcttttctcgtgtgaaatccagtagatatagtagatatcgtagcattaggttttaattcaatcgattgattattgtatcatcaaaattgagaagttcgaatcatgcctatcatgctgcctcaaccgaaatcctgtatattgaagtttcaattcaattgattgatcattcattagattcaaccaaaatctagaaggttagatgacgcatgtcatgctgcctgcgtagtttacctttgatctgtttatgattaccttatcagtaggatatttgtgattttgggaagtagcactaactgattcatgctgacatgatgttccctttcagattatactgttgagtcctatctaattgatgctttgtatgctatatgaatacgtcatggtaaattagcagttaattagcatattagcaattgggcgtacctcatcaggattgctcttgtagatgtgtgtggtgatgtttcttgttcaattcatgttctgctttaaaagtatgtgttctctgtttgttaattaagattcatggttataatgatttggacctaattaatcagggttgcccttttagatgcgtggttacttgttgagttcatttttttcctgctatagttgtatgcgtttgttcattcatggttagatttgatttgtttcttctctattccatgccttccatatacttcaattgtagcttaacatgagatttctgtatatgcaggtcgaccgccggggatccacacgacaccatggcccagtccaagcacggcctgaccaaggagatgaccatgaagtaccgcatggagggctgcgtggacggccacaagttcgtgatcaccggcgagggcatcggctaccccttcaagggcaagcaggccatcaacctgtgcgtggtggagggcggccccttgcccttcgccgaggacatcttgtccgccgccttcatgtacggcaaccgcgtgttcaccgagtacccccaggacatcgtcgactacttcaagaactcctgccccgccggctacacctgggaccgctccttcctgttcgaggacggcgccgtgtgcatctgcaacgccgacatcaccgtgagcgtggaggagaactgcatgtaccacgagtccaagttctacggcgtgaacttccccgccgacggccccgtgatgaagaagatgaccgacaactgggagccctcctgcgagaagatcatccccgtgcccaagcagggcatcttgaagggcgacgtgagcatgtacctgctgctgaaggacggtggccgcttgcgctgccagttcgacaccgtgtacaaggccaagtccgtgccccgcaagatgcccgactggcacttcatccagcacaagctgacccgcgaggaccgcagcgacgccaagaaccagaagtggcacctgaccgagcacgccatcgcctccggctccgccttgccctccggactcagatctcgatagagtcaacctagacttgtccatcttctggattggccaacttaattaatgtatgaaataaaaggatgcacacatagtgacatgctaatcactataatgtgggcatcaaagttgtgtgttatgtgtaattactagttatctgaataaaagagaaagagatcatccatatttcttatcctaaatgaatgtcacgtgtctttataattctttgatgaaccagatgcatttcattaaccaaatccatatacatataaatattaatcatatataattaatatcaattgggttagcaaaacaaatctagtctaggtgtgttttgcgaattgcggcgcccttactttaacgcctctaaccaacacccctttatctttataaggaacaataaacagaatttgccccactgttctaaatcacctaataatatccccagctaaaaacaataaaggtttcctagaattaagacaagcatgactgttcctccaggagggtttggaacattgttgcagtcttgcagatacgggcgaagggtgagaaacagagcggagggctggaggtgacctcggtagtcgacgccggagttgagcttgacaacgacggggcggcccctgatggacttgaggaagtccgatggcgtcttcaccgtcccgccggcgcccgaggcgggcctgtcgctgccgccgccgccgctgctcatcttgcgcgctgtgcccccggcggtgtccctgtgttgcggatcgcgggtgggccaggtggatgcgagggcgacccgtttggactccggccggagccgccggatccctggtcggtgtcagtgccgtttactctgggccccacgtgtcagtaccgtctgtagatgacaacaacccgtcgtccacagtcatgtccaaaatatcctttcttcttttttttcgattcggatatctatcttccttttttttttccaaaaatcttcttgacgcaccagcgcgcacgtttgtggtaaacgccgacacgtcggtcccacgtcgatagaccccacccaccagtgagtagcgtgtacgtattcgggggtgacggacgtgtcgccgtcgtcttgctagtcccattcccatctgagccacacatctctgaacaaaaaaaaggagggaggcctccacgcacatccccctccgtgccacccgccccaaaccctcgcgccgcctccgagacagccgccgcaaccatggccaccgccgccgccgcgtctaccgcgctcactggcgccactaccgctgcgcccaaggcgaggcgccgggcgcacctcctggccacccgccgcgccctcgccgcgcccatcaggtgctcagcggcgtcacccgccatgccgatggctcccccggccaccccgctccggccgtggggccccaccgagccccgcaagggtgctgacatcctcgtcgagtccctcgagcgctgcggcgtccgcgacgtcttcgcctaccccggcggcgcgtccatggagatccaccaggcactcacccgctcccccgtcatcgccaaccacctcttccgccacgagcaaggggaggcctttgccgcctccggctacgcgcgctcctcgggccgcgtcggcgtctgcatcgccacctccggccccggcgccaccaacctagtctccgcgctcgccgacgcgctgctcgattccgtccccatggtcgccatcacgggacaggtggcgcgacgcatgattggcaccgacgccttccaggagacgcccatcgtcgaggtcacccgctccatcaccaagcacaactacctggtcctcgacgtcgacgacatcccccgcgtcgtgcaggaggctttcttcctcgcctcctctggtcgaccagggccggtgcttgtcgacatccccaaggacatccagcagcagatggcggtgcctgtctgggacaagcccatgagtctgcctgggtacattgcgcgccttcccaagccccctgcgactgagttgcttgagcaggtgctgcgtcttgttggtgaatcgcggcgccctgttctttatgtgggcggtggctgcgcagcatctggtgaggagttgcgacgctttgtggagctgactggaatcccggtcacaactactcttatgggcctcggcaacttccccagcgacgacccactgtctctgcgcatgctaggtatgcatgggacggtgtatgcaaattatgcagtggataaggccgatctgttgcttgcacttggtgtgcggtttgatgatcgcgtgacagggaagattgaggcttttgcaagcagggctaagattgtgcacgttgatattgatccggctgagattggcaagaacaagcagccacatgtgtccatctgtgcagatgttaagcttgctttgcagggcatgaatgctcttcttgaaggaagcacatcaaagaagagctttgactttggctcatggaacgatgagttggatcagcagaagagggaattcccccttgggtataaaacatctaatgaggagatccagccacaatatgctattcaggttcttgatgagctgacgaaaggcgaggccatcatcggcacaggtgttgggcagcaccagatgtgggcggcacagtactacacttacaagcggccaaggcagtggttgtcttcagctggtcttggggctatgggatttggtttgccggctgctgctggtgcttctgtggcaaacccaggtgtcactgttgttgacatcgatggagatggtagctttctcatgaacgttcaggagctagctatgatccgaattgagaacctcccagtgaaggtctttgtgctaaacaaccagcacctggggatggtggtgcagttggaggacaggttctataaggccaacagagcgcacacatacttgggaaacccagagaatgaaagtgagatatatccagatttcgtgacgatcgccaaagggttcaacattccagcggtccgtgtgacaaagaagaacgaagtccgcgcagcgataaagaagatgctcgagactccagggccgtacctcttggatataatcgtcccacaccaggagcatgtgttgcctatgatccctagtggtggggctttcaaggatatgatcctggatggtgatggcaggactgtgtactgactagctagtcagttaacagatctgccagatcctcggtgtacaaataacccgtcttatcctatgagacgggccggcgtcagtgtgttctggaggaatttttatgtcagagcctttttctttgtgtgcttgatgtagatgccaagggaagcttattggctgttgaagcttgatgcaaaataaattatggaactctgttttttgtttatctaataataactagcaaatatgcttccattgcattgaaactaacagccttttgtgtttccaagttttattttgtgacaatgtcatctatttcaattagttgtggaatcggaaacttgcaggactaacttggaaactccaatccctcagcatcctggactttttcctggtgtaatccatgtagatattattttaatcatcattttagttctggaggtttttccatctccggttttgctcccctttcttcaaaaaaaaaaaaaaaatgccgtaggcgccgcaacgcccacctgttgttcaaactcatgggcacgagtggctcgaagattttatacaacaattgctgtagtttcaccgttgctggtgaagaagcatttttttaaaaaaatatagtggtattcattttaattagtttagttgtgcagcgagcaaaatttggacatgctctgctcggaatctgatcgacctagacacagattagcagcagtagctttgtcatctgttccaagagttgcgatctgatagaagaaaaaaaaaccttcccttcaatgtaaaaccgaaactaacaagaaagaagcacagtgccgtttaggcaagtatggagtacgtattaagcatgtagaaggccatgcatgaaccactaacaagaaagaagcgcagtgccattcaggcaagcataagcatgtagattggcatgcatgaacaactaacagtagatcgtctctggtctgattagaagttttttgggaagccaagaaatcatgtacaactggttccatctcaaattccgtggcaaaaagaggcctaagcaacatacctcgagtagatcacattcaagcttggtcacccggtccgtcaatattctgattccgatgacttcgtaggttcctagctcaagccgctcgtgtccaagcgtcacttacgattagctaatgattacggcatctaggaccgactagtggcgcgccgactagctagctaaggtaccgagctcgaattcattccgattaatcgtggcctcttgctcttcaggatgaagagctatgtttaaacgtgcaagcgctactagacaattcagtacattaaaaacgtccgcaatgtgttattaagttgtctaagcgtcaatttgtttacaccacaatatatcctgcca

SEQ ID NO: 59 - DNA, 22746 bp, Artificial sequence
  PHP95987
gtttacccgccaatatatcctgtcaaacactgatagtttaaactgaaggcgggaaacgacaatctgatcatgagcggagaattaagggagtcacgttatgacccccgccgatgacgcgggacaagccgttttacgtttggaactgacagaaccgcaacgttgaaggagccactcagcaagctggtacgattgtaatacgactcactatagggcgaattgagcgctgtttaaacgctcttcaactggaagagcggttacgctgtttaaacgctcttcaactggaagagcggttactaccggttcactagctagctgctaatcgagctagttaccctatgaggtgacatgaagcgctcacggttactatgacggttagcttcacgactgttggtggcagtagcgtacgacttagctatagttccggacttacccttaagcgatttaaatctgcggttaccgaattcgagctcggtacctagtacccttgtacttttggtttcacctgcatagagaaaacccacaagaatatgacagtctgatttgtcagtctcattctcaagcaacatttctctatccgttactttcatggtgaataacacaatccatcatcaatactttgtgttactcagaaactgaaagttattccgagtcttgcatatctttggacctactcgtttttctaccattattgctgattgttaagctctcgctacttgaatcggcattgttggagtgggaaggttcaaaaaattggagttatgactagttgtctctttctatgtacgatggagaaaatgaataaacaactgagaaaatggctcttgtttagttgatgatgctcttaagctttccactggttgccatatatgatttgggcatttcactttgatcttaatgggccttgtaaagcccaagactcatgattatctttagttgatgctcttaattaggtgtgggcaaataattcaaactgtatgtacccgaccaaaaccaaagcaaaaataatcgaaccaaaccgaaaatttaaaaataaccgaatgaaaactaaatcctataactgaaagaactgaaaccgaatcaaaatatttaatgtaaccaaaaatatccgaaatataattatattgtcaaaaatattaataatttctagattaaataattaaaaatacttaaaaatttatataaaatagtaaaaatactcgaaaataaccacaaatattcaaaaacaaccgaaatatcccaaaatattcaaagcaaaataaccgaatggataccaaattttaaaaccgaaaaaactggaacaaaaccaaaatcgaaccaaaatttcaaaaatcgaataaatactaaactttagaacaaaaaaaaacgataaccgaatgtatacgaaccaaagccgaattagataaccgaacgtccaggactactcttaatctttccgccacttatgatttgggctattactttgtttataatgagccttttcaagctcaagttcatgattgtccgtgagatgagaaactgacttgttggattcgaaaccctagctagtattggttaatacttaatacataaatgacctgcattgacatcatcatccaagaaaataaaaattgtatgcttgagatatttagttttcctagctaggttttctttattttagtaccgaatctttaggtgtgccacgttaatttagacccattttttcatacttaccaactgagtctagtttaatcatgactataatcgtataaaatgattcagtcgacgtcattgcgaacgtatataaaatcatccaaattgacgtcattccaaagaggtaagcatgcttatctaagagtccgagcatactaaacaagacgacattttatttgcactccaaatcaaattttgtattgcctaaagaaaaacaatcaaactcaagtttcttaaaattaatttcattcaaactaatcactttcaatatctcacatattattcatgccatttctatttgtctaaacatgatttaaaaaaaaaagtaaaatacaaagattactatgcaaaaactctataaaaaaaaattcaaatttcttatttatttgtgacatcaaattttcaaaataatttttttaattatcggttgatccggtcagtcgataaaaacataaactttcagcgaccgttaaaactttcctactaccgatttagagaaaatcttagcttgaaacgtaattgtaacctgccttcatgcaagtcgcaagatatgtcatcctaagttgtatatgttttctcaaaagatgtatttacttgagaaaatacgtttcaacgttgatggacaaccaattaagaatcaagcacctttcgtaatcaatttaggcttatcgtctaaggtatactgatttacgacagttgactagacttataaggaacaaaataatagaatagtttctaaacacttcacctaatcatagagactaagatggtaattcgtaaacgacaaagcctagtgacactgtccattgtaaaattccacatcatattagtattaaacatatacatgtagtttcctgaacacatgtagtatcaaacacacttcgtggcttcttcctcgaaacctgcggccgcgctatagttccggacttacccttaagataacttcgtatagcatacattatacgaagttatgggcccacgcgtgaagagcggttaccagagctggtcacctttgtccaccaagatggaactgtcttcggccagaatggccatctggattcagcaggcctagaaggccatttatcgctatcaactttgtatagaaaagttgggccgaattcgagctcggtacggccagaatggcccggaccgaagcttcggccgcacactgatagtttaaacatcggaagttgaagacaaagaaggtcttaaatcctggctagcaacactgaactatgccagaaaccacatcaaagcatatcggcaagcttcttggcccattatatccaaagacctcagagaaaggtgagcgaaggctcaattcagaagattggaagctgatcaataggatcaagacaatggtgagaacgcttccaaatctcactattccaccagaagatgcatacattatcattgaaacagatgcatgtgcaactggatggggagcagtatgcaagtggaagaaaaacaaggcagacccaagaaatacagagcaaatctgtaggtatgccagtggaaaatttgataagccaaaaggaacctgtgatgcagaaatctatggggttatgaatggcttagaaaagatgagattgttctacttggacaaaagagagatcacagtcagaactgacagtagtgcaatcgaaaggttctacaacaagagtgctgaacacaagccttctgagatcagatggatcaggttcatggactacatcactggtgcaggaccagagatagtcattgaacacataaaagggaagaggaatggtttagctgacatcttgtccaggctcaaagccaaattagctcagaatgaaccaacggaagagatgatcctgcttacacaagccataagggaagtaattccttatccagatcatccatacactgagcaactcagagaatggggaaacaaaattctcgatccattccccacattcaagaaggacatgttcgaaagaacagagcaagcttttatgctaacagaggaaccagttctactctgtgcatgcaggaagcctgcaattcagttagtgtccagaacatctgccaacccaggaaggaaattcttcaagtgcgcaatgaacaaatgccattgctggtactgggcagatctcattgaagaacacattcaagacagaattgatgaatttctcaagaatcttgaagttctgaagaccggtggcgtgcaaacaatggaggaggaacttatgaaggaagtcaccaagctgaagatagaagaggaggagttcgaggaataccaggccacaccaagggctatgtcgccagtagccgcagaagatgtgctagatctccaagacgtaagcaatgacgattgaggaggcattgacgtcagggatgaccgcagcggagagtactgggcccattcagtggatgctccactgagttgtattattgtgtgcttttcggacaagtgtgctgtccactttcttttggcacctgtgccactttattccttgtctgccacgatgcctttgcttagcttgtaagcaaggatcgcagtgcgtgtgtgacaccaccccccttccgacgctctgcctatataaggcaccgtctgtaagctcttacgatcatcggtagttcaccaaggatcggtagttcaccacatgagtatttgagtcaagtttggcttgaataataagaattacacctttccgcacccgggggatctcgactctagaggatcgctcaggaaggccgctgagatagaggcatggcggccaatgcgggcggcggtggagcgggaggaggcagcggcagcggcagcgtggctgcgccggcggtgtgccgccccagcggctcgcggtggacgccgacgccggagcagatcaggatgctgaaggagctctactacggctgcggcatccggtcgcccagctcggagcagatccagcgcatcaccgccatgctgcggcagcacggcaagatcgagggcaagaacgtcttctactggttccagaaccacaaggcccgcgagcgccagaagcgccgcctcaccagcctcgacgtcaacgtgcccgccgccggcgcggccgacgccaccaccagccaactcggcgtcctctcgctgtcgtcgccgccgccttcaggcgcggcgcctccctcgcccaccctcggcttctacgccgccggcaatggcggcggatcggctgtgctgctggacacgagttccgactggggcagcagcggcgctgccatggccaccgagacatgcttcctgcaggactacatgggcgtgacggacacgggcagctcgtcgcagtggccacgcttctcgtcgtcggacacgataatggcggcggccgcggcgcgggcggcgacgacgcgggcgcccgagacgctccctctcttcccgacctgcggcgacgacggcggcagcggtagcagcagctacttgccgttctggggtgccgcgtccacaactgccggcgccacttcttccgttgcgatccagcagcaacaccagctgcaggagcagtacagcttttacagcaacagcaacagcacccagctggccggcaccggcaaccaagacgtatcggcaacagcagcagcagccgccgccctggagctgagcctcagctcatggtgctccccttaccctgctgcagggagtatgtgagagcaacgcgagctgccactgctcttcactgatgtctctggaatggaaggaggaggaagtgagcatagcgttggtgcgttgctgtcaagggcgaattcacatggttaacctagacttgtccatcttctggattggccaacttaattaatgtatgaaataaaaggatgcacacatagtgacatgctaatcactataatgtgggcatcaaagttgtgtgttatgtgtaattactagttatctgaataaaagagaaagagatcatccatatttcttatcctaaatgaatgtcacgtgtctttataattctttgatgaaccagatgcatttcattaaccaaatccatatacatataaatattaatcatatataattaatatcaattgggttagcaaaacaaatctagtctaggtgtgttttgcgaatgcggccgccaccgcggtggagctcgaattccggtccgggcctagaaggccagcttcaagtttgtacaaaaaagcaggctccggccagaatggcccggaccgggttaccgaattcgagctcggtaccatttaaattgcgcccgccacggccgtggaggtcgtattccggtcagcttgcatccctgcagtgcagcgtgacccggtcgtgcccctctctagagataatgagcattgcatgtctaagttataaaaaattaccacatattttttttgtcacacttgtttgaagtgcagtttatctatctttatacatatatttaaactttactctacgaataatataatctatagtactacaataatatcagtgttttagagaatcatataaatgaacagttagacatggtctaaaggacaattgagtattttgacaacaggactctacagttttatctttttagtgtgcatgtgttctcctttttttttgcaaatagcttcacctatataatacttcatccattttattagtacatccatttagggtttagggttaatggtttttatagactaatttttttagtacatctattttattctattttagcctctaaattaagaaaactaaaactctattttagtttttttatttaataatttagatataaaatagaataaaataaagtgactaaaaattaaacaaataccctttaagaaattaaaaaaactaaggaaacatttttcttgtttcgagtagataatgccagcctgttaaacgccgtcgacgagtctaacggacaccaaccagcgaaccagcagcgtcgcgtcgggccaagcgaagcagacggcacggcatctctgtcgctgcctctggacccctctcgagagttccgctccaccgttggacttgctccgctgtcggcatccagaaattgcgtggcggagcggcagacgtgagccggcacggcaggcggcctcctcctcctctcacggcaccggcagctacgggggattcctttcccaccgctccttcgctttcccttcctcgcccgccgtaataaatagacaccccctccacaccctctttccccaacctcgtgttgttcggagcgcacacacacacaaccagatctcccccaaatccacccgtcggcacctccgcttcaaggtacgccgctcgtcctcccccccccccctctctaccttctctagatcggcgttccggtccatgcatggttagggcccggtagttctacttctgttcatgtttgtgttagatccgtgtttgtgttagatccgtgctgctagcgttcgtacacggatgcgacctgtacgtcagacacgttctgattgctaacttgccagtgtttctctttggggaatcctgggatggctctagccgttccgcagacgggatcgatttcatgattttttttgtttcgttgcatagggtttggtttgcccttttcctttatttcaatatatgccgtgcacttgtttgtcgggtcatcttttcatgcttttttttgtcttggttgtgatgatgtggtctggttgggcggtcgttctagatcggagtagaattctgtttcaaactacctggtggatttattaattttggatctgtatgtgtgtgccatacatattcatagttacgaattgaagatgatggatggaaatatcgatctaggataggtatacatgttgatgcgggttttactgatgcatatacagagatgctttttgttcgcttggttgtgatgatgtggtgtggttgggcggtcgttcattcgttctagatcggagtagaatactgtttcaaactacctggtgtatttattaattttggaactgtatgtgtgtgtcatacatcttcatagttacgagtttaagatggatggaaatatcgatctaggataggtatacatgttgatgtgggttttactgatgcatatacatgatggcatatgcagcatctattcatatgctctaaccttgagtacctatctattataataaacaagtatgttttataattattttgatcttgatatacttggatgatggcatatgcagcagctatatgtggatttttttagccctgccttcatacgctatttatttgcttggtactgtttcttttgtcgatgctcaccctgttgtttggtgttacttctgcaggtcgactctagaggatccatggccactgtgaacaactggctcgctttctccctctccccgcaggagctgccgccctcccagacgacggactccacactcatctcggccgccaccgccgaccatgtctccggcgatgtctgcttcaacatcccccaagattggagcatgaggggatcagagctttcggcgctcgtcgcggagccgaagctggaggacttcctcggcggcatctccttctccgagcagcatcacaaggccaactgcaacatgatacccagcactagcagcacagtttgctacgcgagctcaggtgctagcaccggctaccatcaccagctgtaccaccagcccaccagctcagcgctccacttcgcggactccgtaatggtggcttcctcggccggtgtccacgacggcggtgccatgctcagcgcggccgccgctaacggtgtcgctggcgctgccagtgccaacggcggcggcatcgggctgtccatgattaagaactggctgcggagccaaccggcgcccatgcagccgagggtggcggcggctgagggcgcgcaggggctctctttgtccatgaacatggcggggacgacccaaggcgctgctggcatgccacttctcgctggagagcgcgcacgggcgcccgagagtgtatcgacgtcagcacagggtggagccgtcgtcgtcacggcgccgaaggaggatagcggtggcagcggtgttgccggcgctctagtagccgtgagcacggacacgggtggcagcggcggcgcgtcggctgacaacacggcaaggaagacggtggacacgttcgggcagcgcacgtcgatttaccgtggcgtgacaaggcatagatggactgggagatatgaggcacatctttgggataacagttgcagaagggaagggcaaactcgtaagggtcgtcaagtctatttaggtggctatgataaagaggagaaagctgctagggcttatgatcttgctgctctgaagtactggggtgccacaacaacaacaaattttccagtgagtaactacgaaaaggagctcgaggacatgaagcacatgacaaggcaggagtttgtagcgtctctgagaaggaagagcagtggtttctccagaggtgcatccatttacaggggagtgactaggcatcaccaacatggaagatggcaagcacggattggacgagttgcagggaacaaggatctttacttgggcaccttcagcacccaggaggaggcagcggaggcgtacgacatcgcggcgatcaagttccgcggcctcaacgccgtcaccaacttcgacatgagccgctacgacgtgaagagcatcctggacagcagcgccctccccatcggcagcgccgccaagcgcctcaaggaggccgaggccgcagcgtccgcgcagcaccaccacgccggcgtggtgagctacgacgtcggccgcatcgcctcgcagctcggcgacggcggagccctggcggcggcgtacggcgcgcactaccacggcgccgcctggccgaccatcgcgttccagccgggcgccgccagcacaggcctgtaccacccgtacgcgcagcagccaatgcgcggcggcgggtggtgcaagcaggagcaggaccacgcggtgatcgcggccgcgcacagcctgcaggacctccaccacctgaacctgggcgcggccggcgcgcacgactttttctcggcagggcagcaggccgccgccgctgcgatgcacggcctgggtagcatcgacagtgcgtcgctcgagcacagcaccggctccaactccgtcgtctacaacggcggggtcggcgacagcaacggcgccagcgccgtcggcggcagtggcggtggctacatgatgccgatgagcgctgccggagcaaccactacatcggcaatggtgagccacgagcaggtgcatgcacgggcctacgacgaagccaagcaggctgctcagatggggtacgagagctacctggtgaacgcggagaacaatggtggcggaaggatgtctgcatgggggactgtcgtgtctgcagccgcggcggcagcagcaagcagcaacgacaacatggccgccgacgtcgggcatggcggcgcgcagctcttcagtgtctggaacgacacttaagcgtacgtgccggcctggctctccgaaagggcgtattccagcacactggcggccgttactagacccaacctagacttgtccatcttctggattggccaacttaattaatgtatgaaataaaaggatgcacacatagtgacatgctaatcactataatgtgggcatcaaagttgtgtgttatgtgtaattactagttatctgaataaaagagaaagagatcatccatatttcttatcctaaatgaatgtcacgtgtctttataattctttgatgaaccagatgcatttcattaaccaaatccatatacatataaatattaatcatatataattaatatcaattgggttagcaaaacaaatctagtctaggtgtgttttgcgaatgcggcctccgggcacccagctttcttgtacaaagtggccgttaacggatcggccagaatggcccggaccgggttaccgaattcgagctcggtaccctggttcacaaactcaatacaacacacagtggagtagggtattacgctccggcggcccgaaccactctaaatccttgtgtcctcgtgtgctcttccaccattaatgactgtaattgcagggacacgaagagttgtagcgcttttgccaacaagatccgctatatgctagtagagtggaacctgcacagcaacaagcatccaataatctgagaataagaattatgtgtggtgatggttctcatctctgcaactcgccattttcgcgagagaaccaaatccaagttggtgaagatcatgatttgggctcatgggctggcatagtagctattacctttgcaattgtggttcgaatctatccgatattctccttttcagggagagctaatgcttatgcttattgggtattttggtttgacactgcttcacgcccaaaaaaaggcaactatgtctgagttggatatggcccaaaaaaaggcagctatgtctgagttggatatggaagtcttctttcgtttagggtgaagtaagaccaagctcatgagcttattatcttaggtcggaacaaattagttgataggcatggcacatttatcaaattataatgattttaacagaaaagcaacacctctttttcagcagcaccagctttgcaagctgcaattgacactccaagcatagtatttgctccaaactcagcctgcatttcgcacaatatcatatctatttccatttggataaaatatattttccagaaatatgggaacagaatcaagatacagaaaaaagttgtggtagtagtggtaagtggaaacacaagtacagtgaaaagatagcattatttctgaacagtcaaattaaccgaaataagtagtatcacatactgcccctaaattgactacacccaatgtaaagaattgcttgagcatattgagccatcagttgtttgtttgtgtaacggatttgacaatgcagagttcaggagcaaaaaaccgcaaaggagagaaagagggaaaggatctcctagtatcccaccttgtggcgcgccctgtcaagtgcatgatggcctggtcgatctgcgtctgctgctgcggttccatcccaacgagtgcctccgacaccttgtcgttgatcacccgcaccgcgtaggcgacccccctggcgaggaacttccgcctctcggaggccccggccgcgtcggcggcggcgccctcgagcgcgcccacgctagccgtagatgctcggtgcacggccttgttggtgtgcaactcgacctcaacggccggtgcgctacgcccgtcaaggatctggcgcgcccgcaccctcgtgatcacggtgggcgcctcccgcctcatgtggccgacgatgaaaagcgccgggttaggggccttggcgcgcaccgccgtattcagggcctcctcgctcttgcgcgagagcaggtgcttccccaggtactcctgcactgacaaggctgccacagcggtggaatttgtcctcacgacttcgccacgtcgtcctcacctccctggcttcccacgactccgccgtatcgaggtgctcggtgggtcgtcttaatccgaagtccgaactaggaagacgagacagagaggtctgaggaatgggcctcgtttgatgttgagctgaattatttttccagcataagcccaggtcttggtccatgaacaaaattactagaaacccagcccagtactacgatctaaaagagggactgccactggatagctctctctagcattctccacgctccaatacagcggcgtcgtgtctatccgggtctatccgcgaacacgtgagaactctccagaaactgctttctcctccacttcatctctctcgctttccctctataaaaagaccccttctaggaattgagggagacagcaagcaccaagcagcgatccgaagctcaatcaattcactcaaacctcttccccaaatcttcgattagatcttcgttgacaagaagactagaaccgaacctgacatgtccaacctgctcacggttcaccagaaccttccggctcttccagtggacgcgacgtccgatgaagtcaggaagaacctcatggacatgttccgcgacaggcaagcgttcagcgagcacacctggaagatgctgctctccgtctgccgctcctgggctgcatggtgcaagctgaacaacaggaagtggttccccgctgagcccgaggacgtgagggattaccttctgtacctgcaagcgcgaggtttgtttctgcttctacctttgatatatatataataattatcattaattagtagtaatataatatttcaaatatttttttcaaaataaaagaatgtagtatatagcaattgcttttctgtagtttataagtgtgtatattttaatttataacttttctaatatatgaccaaaacatggtgatgcctaggtctggcagtgaagaccatccagcaacaccttggacaactgaacatgcttcacaggcgctccggcctcccgcgccccagcgactcgaacgccgtgagcctcgtcatgcgccgcatcaggaaggaaaacgtcgatgccggcgaaagggcaaagcaggccctcgcgttcgagaggaccgatttcgaccaggtccgcagcctgatggagaacagcgacaggtgccaggacattaggaacctggcgttcctcggaattgcatacaacacgctcctcaggatcgcggaaattgcccgcattcgcgtgaaggacattagccgcaccgacggcggcaggatgcttatccacattggcaggaccaagacgctcgtttccaccgcaggcgtcgaaaaggccctcagcctcggagtgaccaagctcgtcgaacgctggatctccgtgtccggcgtcgcggacgacccaaacaactacctcttctgccgcgtccgcaagaacggggtggctgcccctagcgccaccagccaactcagcacgagggccttggaaggtattttcgaggccacccaccgcctgatctacggcgcgaaggatgacagcggtcaacgctacctcgcatggtccgggcactccgcccgcgttggagctgctagggacatggcccgcgccggtgtttccatccccgaaatcatgcaggcgggtggatggacgaacgtgaacattgtcatgaactacattcgcaaccttgacagcgagacgggcgcaatggttcgcctcctggaagatggtgactgaggtacccaacctagacttgtccatcttctggattggccaacttaattaatgtatgaaataaaaggatgcacacatagtgacatgctaatcactataatgtgggcatcaaagttgtgtgttatgtgtaattactagttatctgaataaaagagaaagagatcatccatatttcttatcctaaatgaatgtcacgtgtctttataattctttgatgaaccagatgcatttcattaaccaaatccatatacatataaatattaatcatatataattaatatcaattgggttagcaaaacaaatctagtctaggtgtgttttgcgatccgatatcgaattggccacggtaccagctgctgctgttctagggttcacaagtctgcctatttgtcttccccaatggagctatggttgtctggtctggtccttggtcgtgtcccgtttcattgtgtactatttacctgtaatgtgtatccttaagtctggtttgatggtgtctgaaacgttttgctgtggtagagcagcatggaagaactataatgaataagtgatccctaatcattgtgtccaaattttgcttctgctatacccttttgtgctgtttcttatgttttgcttaaaaatttgatctgacaaacaaatttgtctaaattatgctcttgttctgactgtgtactgtacacatttgtattgctaccggtttggcacatagttttctctttgattgcagatcaaacccttctgattgcagattgcttggctatggctgatgtgctcactgttcttctttagcttgtatattgctgatggtggcttggctacggctgaaaaagttgctgctgcgccgacttggcaactgttgctccagtaatgctttgtcctctcttcctagccgccgacttggcacttggcagctgttgctcctgtaatgcgttgttatctcttatctcttgagatgtactatgattttgaggctgtttgacttgtgccagattgccagtgctgatgctatattatctcaggtttttatgctagtatatgttttactgtgtgctgcctgtgtcgagttacgtaatctattgaaccgctatgcgtgttgatgccctgttgttgcttgccagattgatgcccctgttgcttgcagcttgcaagctgtagtgaaatcctaaaattccaaaccaaatctattctgaacttttgaagatctgtgatgtccggaagaaaagattcaaacagataaacgggactctccagaatctataaaataaatgatcgacaaacgctttgctttggtaggcttcaagcttggtcacccggtccgggcctagaaggccagcttcggccgccccgggcaactttattatacaaagttgatagataaatcagatatctggttcctaaggacccggcggaccgattaaactgattcggtccgacgcgttacctaataacttcgtatagcatacattatacgaagttattagctaactaactagtaagcttaagccatgggtcgacggatccgttaactagcgtggcatttggcaccgccgcacactatgcgagctaggagtgctagtttacagatgaaactatgaaaccaagaaaacacaattgtccgtagctagcgcgtggcgtcgtgtcaagcttcacacagtatcttcgttcttcactataaatcgcgcctgttgttcgtgagacccaccaccgtggataacagtcccctaataataagcgatcaacagcactgctgatggctgaacaccgaggcgccgccgcgcgtaaccatccgccggagcagcccgtcgtgccggcgaacgacgccttccccgaccgcgcccagcagctctgcctcgacgccgggcgcgcgctcgcgatgtgcggcgtgctcgtcgccgtccctcccgcattttacgcgtcgacgtcgcggacgacaccgcacttgccttcgtcggcttcgtcctctggatcatcggtgcgtggctgtgcctcctggcgctcacgcccttggctccacgggcggtgagggcgggcggggccgccgccagcaccttgctgatcaggtgcctgtccctttcatgaactactagcgcccgcgcccgcggccgccgggcacaagagaacacatcgatgttcgctgcgtacgtcagcaataaggcactctttgtcagtagtcgagtgcatatgttgggtgtttgccctgggagatttcaagtgttgtggccattatcccgcaggataaaaaatcggcggcttttggattgatacggaaaataacgatgtttcatgctcgtgttgtgtgtgtgacatcttgtcagccaagtttttaaccgttgctactccccctctgtgggctcagtgtgtggaccggaatacgtcgtacataggccgtagcctaagcccaatatgccgtttttcaggttggcctgtgtgacgacaagcgggtctcaaaagcccatcacgcaactggcctgcaattattggaggagagcgcgtcgagttggttccagaggctgcgtggtggggccggactctgcgacgacctctcgttcgcgtccgatttggttgccgtgagccgtgacgtaacgcctccttccgttcctccctatataagttccacccccgggtccggtttccccaagccccagtgacccccgatcccgatcgcgaaatctccgcacccgccggcaagggaccgaagcaagcctctctcccgaccgtcgcatcaaggtacgcgtccgctcgatctgtcctcttccttctcgatttgacttgctgtggtgcccgatcacgggatcagaatcgcaccagtgtagatttcgcatgttctaagatgtgttagtttccaggctaatccagttctcttgacgcccgatccgatcgagctccgtgtttatttcagcctaatcgtagtattcccctaaaatttcctcattagggggttcgcaagattgttggtcgacaggttcacttatgctcgatcgcttacttttagtcgattcatgctgcgtactattgttgccccccgtggttttatcttttctcgtgtgaaatccagtagatatagtagatatcgtagcattaggttttaattcaatcgattgattattgtatcatcaaaattgagaagttcgaatcatgcctatcatgctgcctcaaccgaaatcctgtatattgaagtttcaattcaattgattgatcattcattagattcaaccaaaatctagaaggttagatgacgcatgtcatgctgcctgcgtagtttacctttgatctgtttatgattaccttatcagtaggatatttgtgattttgggaagtagcactaactgattcatgctgacatgatgttccctttcagattatactgttgagtcctatctaattgatgctttgtatgctatatgaatacgtcatggtaaattagcagttaattagcatattagcaattgggcgtacctcatcaggattgctcttgtagatgtgtgtggtgatgtttcttgttcaattcatgttctgctttaaaagtatgtgttctctgtttgttaattaagattcatggttataatgatttggacctaattaatcagggttgcccttttagatgcgtggttacttgttgagttcatttttttcctgctatagttgtatgcgtttgttcattcatggttagatttgatttgtttcttctctattccatgccttccatatacttcaattgtagcttaacatgagatttctgtatatgcaggtcgaccgccggggatccacacgacaccatggcccagtccaagcacggcctgaccaaggagatgaccatgaagtaccgcatggagggctgcgtggacggccacaagttcgtgatcaccggcgagggcatcggctaccccttcaagggcaagcaggccatcaacctgtgcgtggtggagggcggccccttgcccttcgccgaggacatcttgtccgccgccttcatgtacggcaaccgcgtgttcaccgagtacccccaggacatcgtcgactacttcaagaactcctgccccgccggctacacctgggaccgctccttcctgttcgaggacggcgccgtgtgcatctgcaacgccgacatcaccgtgagcgtggaggagaactgcatgtaccacgagtccaagttctacggcgtgaacttccccgccgacggccccgtgatgaagaagatgaccgacaactgggagccctcctgcgagaagatcatccccgtgcccaagcagggcatcttgaagggcgacgtgagcatgtacctgctgctgaaggacggtggccgcttgcgctgccagttcgacaccgtgtacaaggccaagtccgtgccccgcaagatgcccgactggcacttcatccagcacaagctgacccgcgaggaccgcagcgacgccaagaaccagaagtggcacctgaccgagcacgccatcgcctccggctccgccttgccctccggactcagatctcgatagagtcaacctagacttgtccatcttctggattggccaacttaattaatgtatgaaataaaaggatgcacacatagtgacatgctaatcactataatgtgggcatcaaagttgtgtgttatgtgtaattactagttatctgaataaaagagaaagagatcatccatatttcttatcctaaatgaatgtcacgtgtctttataattctttgatgaaccagatgcatttcattaaccaaatccatatacatataaatattaatcatatataattaatatcaattgggttagcaaaacaaatctagtctaggtgtgttttgcgaattgcggcgcccttactttaacgcctctaaccaacacccctttatctttataaggaacaataaacagaatttgccccactgttctaaatcacctaataatatccccagctaaaaacaataaaggtttcctagaattaagacaagcatgactgttcctccaggagggtttggaacattgttgcagtcttgcagatacgggcgaagggtgagaaacagagcggagggctggaggtgacctcggtagtcgacgccggagttgagcttgacaacgacggggcggcccctgatggacttgaggaagtccgatggcgtcttcaccgtcccgccggcgcccgaggcgggcctgtcgctgccgccgccgccgctgctcatcttgcgcgctgtgcccccggcggtgtccctgtgttgcggatcgcgggtgggccaggtggatgcgagggcgacccgtttggactccggccggagccgccggatccctggtcggtgtcagtgccgtttactctgggccccacgtgtcagtaccgtctgtagatgacaacaacccgtcgtccacagtcatgtccaaaatatcctttcttcttttttttcgattcggatatctatcttccttttttttttccaaaaatcttcttgacgcaccagcgcgcacgtttgtggtaaacgccgacacgtcggtcccacgtcgatagaccccacccaccagtgagtagcgtgtacgtattcgggggtgacggacgtgtcgccgtcgtcttgctagtcccattcccatctgagccacacatctctgaacaaaaaaaaggagggaggcctccacgcacatccccctccgtgccacccgccccaaaccctcgcgccgcctccgagacagccgccgcaaccatggccaccgccgccgccgcgtctaccgcgctcactggcgccactaccgctgcgcccaaggcgaggcgccgggcgcacctcctggccacccgccgcgccctcgccgcgcccatcaggtgctcagcggcgtcacccgccatgccgatggctcccccggccaccccgctccggccgtggggccccaccgagccccgcaagggtgctgacatcctcgtcgagtccctcgagcgctgcggcgtccgcgacgtcttcgcctaccccggcggcgcgtccatggagatccaccaggcactcacccgctcccccgtcatcgccaaccacctcttccgccacgagcaaggggaggcctttgccgcctccggctacgcgcgctcctcgggccgcgtcggcgtctgcatcgccacctccggccccggcgccaccaacctagtctccgcgctcgccgacgcgctgctcgattccgtccccatggtcgccatcacgggacaggtggcgcgacgcatgattggcaccgacgccttccaggagacgcccatcgtcgaggtcacccgctccatcaccaagcacaactacctggtcctcgacgtcgacgacatcccccgcgtcgtgcaggaggctttcttcctcgcctcctctggtcgaccagggccggtgcttgtcgacatccccaaggacatccagcagcagatggcggtgcctgtctgggacaagcccatgagtctgcctgggtacattgcgcgccttcccaagccccctgcgactgagttgcttgagcaggtgctgcgtcttgttggtgaatcgcggcgccctgttctttatgtgggcggtggctgcgcagcatctggtgaggagttgcgacgctttgtggagctgactggaatcccggtcacaactactcttatgggcctcggcaacttccccagcgacgacccactgtctctgcgcatgctaggtatgcatgggacggtgtatgcaaattatgcagtggataaggccgatctgttgcttgcacttggtgtgcggtttgatgatcgcgtgacagggaagattgaggcttttgcaagcagggctaagattgtgcacgttgatattgatccggctgagattggcaagaacaagcagccacatgtgtccatctgtgcagatgttaagcttgctttgcagggcatgaatgctcttcttgaaggaagcacatcaaagaagagctttgactttggctcatggaacgatgagttggatcagcagaagagggaattcccccttgggtataaaacatctaatgaggagatccagccacaatatgctattcaggttcttgatgagctgacgaaaggcgaggccatcatcggcacaggtgttgggcagcaccagatgtgggcggcacagtactacacttacaagcggccaaggcagtggttgtcttcagctggtcttggggctatgggatttggtttgccggctgctgctggtgcttctgtggcaaacccaggtgtcactgttgttgacatcgatggagatggtagctttctcatgaacgttcaggagctagctatgatccgaattgagaacctcccagtgaaggtctttgtgctaaacaaccagcacctggggatggtggtgcagttggaggacaggttctataaggccaacagagcgcacacatacttgggaaacccagagaatgaaagtgagatatatccagatttcgtgacgatcgccaaagggttcaacattccagcggtccgtgtgacaaagaagaacgaagtccgcgcagcgataaagaagatgctcgagactccagggccgtacctcttggatataatcgtcccacaccaggagcatgtgttgcctatgatccctagtggtggggctttcaaggatatgatcctggatggtgatggcaggactgtgtactgactagctagtcagttaacagatctgccagatcctcggtgtacaaataacccgtcttatcctatgagacgggccggcgtcagtgtgttctggaggaatttttatgtcagagcctttttctttgtgtgcttgatgtagatgccaagggaagcttattggctgttgaagcttgatgcaaaataaattatggaactctgttttttgtttatctaataataactagcaaatatgcttccattgcattgaaactaacagccttttgtgtttccaagttttattttgtgacaatgtcatctatttcaattagttgtggaatcggaaacttgcaggactaacttggaaactccaatccctcagcatcctggactttttcctggtgtaatccatgtagatattattttaatcatcattttagttctggaggtttttccatctccggttttgctcccctttcttcaaaaaaaaaaaaaaaatgccgtaggcgccgcaacgcccacctgttgttcaaactcatgggcacgagtggctcgaagattttatacaacaattgctgtagtttcaccgttgctggtgaagaagcatttttttaaaaaaatatagtggtattcattttaattagtttagttgtgcagcgagcaaaatttggacatgctctgctcggaatctgatcgacctagacacagattagcagcagtagctttgtcatctgttccaagagttgcgatctgatagaagaaaaaaaaaccttcccttcaatgtaaaaccgaaactaacaagaaagaagcacagtgccgtttaggcaagtatggagtacgtattaagcatgtagaaggccatgcatgaaccactaacaagaaagaagcgcagtgccattcaggcaagcataagcatgtagattggcatgcatgaacaactaacagtagatcgtctctggtctgattagaagttttttgggaagccaagaaatcatgtacaactggttccatctcaaattccgtggcaaaaagaggcctaagcaacatacctcgagtagatcacattcaagcttggtcacccggtccgtcaatattctgattccgatgacttcgtaggttcctagctcaagccgctcgtgtccaagcgtcacttacgattagctaatgattacggcatctaggaccgactagtggcgcgccgactagctagctaaggtaccgagctcgaattcattccgattaatcgtggcctcttgctcttcaggatgaagagctatgtttaaacgtgcaagcgctactagacaattcagtacattaaaaacgtccgcaatgtgttattaagttgtctaagcgtcaatttgtttacaccacaatatatcctgcca

SEQ ID NO: 60 - DNA, 22118 bp, Artificial sequence
  PHP95989
gtttacccgccaatatatcctgtcaaacactgatagtttaaactgaaggcgggaaacgacaatctgatcatgagcggagaattaagggagtcacgttatgacccccgccgatgacgcgggacaagccgttttacgtttggaactgacagaaccgcaacgttgaaggagccactcagcaagctggtacgattgtaatacgactcactatagggcgaattgagcgctgtttaaacgctcttcaactggaagagcggttacgctgtttaaacgctcttcaactggaagagcggttactaccggttcactagctagctgctaatcgagctagttaccctatgaggtgacatgaagcgctcacggttactatgacggttagcttcacgactgttggtggcagtagcgtacgacttagctatagttccggacttacccttaagcgatttaaatctgcggttaccgaattcgagctcggtacctagtacccttgtacttttggtttcacctgcatagagaaaacccacaagaatatgacagtctgatttgtcagtctcattctcaagcaacatttctctatccgttactttcatggtgaataacacaatccatcatcaatactttgtgttactcagaaactgaaagttattccgagtcttgcatatctttggacctactcgtttttctaccattattgctgattgttaagctctcgctacttgaatcggcattgttggagtgggaaggttcaaaaaattggagttatgactagttgtctctttctatgtacgatggagaaaatgaataaacaactgagaaaatggctcttgtttagttgatgatgctcttaagctttccactggttgccatatatgatttgggcatttcactttgatcttaatgggccttgtaaagcccaagactcatgattatctttagttgatgctcttaattaggtgtgggcaaataattcaaactgtatgtacccgaccaaaaccaaagcaaaaataatcgaaccaaaccgaaaatttaaaaataaccgaatgaaaactaaatcctataactgaaagaactgaaaccgaatcaaaatatttaatgtaaccaaaaatatccgaaatataattatattgtcaaaaatattaataatttctagattaaataattaaaaatacttaaaaatttatataaaatagtaaaaatactcgaaaataaccacaaatattcaaaaacaaccgaaatatcccaaaatattcaaagcaaaataaccgaatggataccaaattttaaaaccgaaaaaactggaacaaaaccaaaatcgaaccaaaatttcaaaaatcgaataaatactaaactttagaacaaaaaaaaacgataaccgaatgtatacgaaccaaagccgaattagataaccgaacgtccaggactactcttaatctttccgccacttatgatttgggctattactttgtttataatgagccttttcaagctcaagttcatgattgtccgtgagatgagaaactgacttgttggattcgaaaccctagctagtattggttaatacttaatacataaatgacctgcattgacatcatcatccaagaaaataaaaattgtatgcttgagatatttagttttcctagctaggttttctttattttagtaccgaatctttaggtgtgccacgttaatttagacccattttttcatacttaccaactgagtctagtttaatcatgactataatcgtataaaatgattcagtcgacgtcattgcgaacgtatataaaatcatccaaattgacgtcattccaaagaggtaagcatgcttatctaagagtccgagcatactaaacaagacgacattttatttgcactccaaatcaaattttgtattgcctaaagaaaaacaatcaaactcaagtttcttaaaattaatttcattcaaactaatcactttcaatatctcacatattattcatgccatttctatttgtctaaacatgatttaaaaaaaaaagtaaaatacaaagattactatgcaaaaactctataaaaaaaaattcaaatttcttatttatttgtgacatcaaattttcaaaataatttttttaattatcggttgatccggtcagtcgataaaaacataaactttcagcgaccgttaaaactttcctactaccgatttagagaaaatcttagcttgaaacgtaattgtaacctgccttcatgcaagtcgcaagatatgtcatcctaagttgtatatgttttctcaaaagatgtatttacttgagaaaatacgtttcaacgttgatggacaaccaattaagaatcaagcacctttcgtaatcaatttaggcttatcgtctaaggtatactgatttacgacagttgactagacttataaggaacaaaataatagaatagtttctaaacacttcacctaatcatagagactaagatggtaattcgtaaacgacaaagcctagtgacactgtccattgtaaaattccacatcatattagtattaaacatatacatgtagtttcctgaacacatgtagtatcaaacacacttcgtggcttcttcctcgaaacctgcggccgcgctatagttccggacttacccttaagataacttcgtatagcatacattatacgaagttatgggcccacgcgtgaagagcggttaccagagctggtcacctttgtccaccaagatggaactgtcttcggccagaatggccatctggattcagcaggcctagaaggccatttatcgctatcaactttgtatagaaaagttgggccgaattcgagctcggtacggccagaatggcccggaccgaagcttagaacatgaaaaaaggactcaccaggacaggagtattgcatctatgtttttattcgaatatttctcgttacacaatagaaaaacaaaacaaatccacggaaaggataatgagcttatacgtggacaatattgagactatatttctatggttgaaatcatgtgaatttatgagagctgtacttactcactaaaacaaacaaaaaactaaaacaaacaaaaaactgaaacaaacaaaatcctccataaaaagatgaatcgaacattttctttttgtcatgatacatatatatatatatatatatatatatatatgtatatgtatatatatatatatatgtatatatatatatacacacacacacacacatatatatatatatatatatatatgtatgtatgtatatatgtatatatatatgtgtgtgtgtgtgtgaatatgttgcatatatattgagaaatggaaattaagtacaataatattctctacatagaggcgttaatgcgtcaattttgtgtgttaaagacataatctaatacaacattgaagattttctatgaatttggaaagtatgtaacactgatagtttaaactgaaggcgggaaacgacaatctgatcatgagcggagaattaagggagtcacgttatgacccccgccgatgacgcgggacaagccgttttacgtttggaactgacagaaccgcaacgttgaaggagccactcagccgcgggtttctggagtttaatgagctaagcacatacgtcagaaaccattattgcgcgttcaaaagtcgcctaaggtcactatcagctagcaaatatttcttgtcaaaaatgctccactgacgttccataaattcccctcggtatccaattagagtctcatattcactctcccgggggatctcgactctagaggatcgctcaggaaggccgctgagatagaggcatggcggccaatgcgggcggcggtggagcgggaggaggcagcggcagcggcagcgtggctgcgccggcggtgtgccgccccagcggctcgcggtggacgccgacgccggagcagatcaggatgctgaaggagctctactacggctgcggcatccggtcgcccagctcggagcagatccagcgcatcaccgccatgctgcggcagcacggcaagatcgagggcaagaacgtcttctactggttccagaaccacaaggcccgcgagcgccagaagcgccgcctcaccagcctcgacgtcaacgtgcccgccgccggcgcggccgacgccaccaccagccaactcggcgtcctctcgctgtcgtcgccgccgccttcaggcgcggcgcctccctcgcccaccctcggcttctacgccgccggcaatggcggcggatcggctgtgctgctggacacgagttccgactggggcagcagcggcgctgccatggccaccgagacatgcttcctgcaggactacatgggcgtgacggacacgggcagctcgtcgcagtggccacgcttctcgtcgtcggacacgataatggcggcggccgcggcgcgggcggcgacgacgcgggcgcccgagacgctccctctcttcccgacctgcggcgacgacggcggcagcggtagcagcagctacttgccgttctggggtgccgcgtccacaactgccggcgccacttcttccgttgcgatccagcagcaacaccagctgcaggagcagtacagcttttacagcaacagcaacagcacccagctggccggcaccggcaaccaagacgtatcggcaacagcagcagcagccgccgccctggagctgagcctcagctcatggtgctccccttaccctgctgcagggagtatgtgagagcaacgcgagctgccactgctcttcactgatgtctctggaatggaaggaggaggaagtgagcatagcgttggtgcgttgctgtcaagggcgaattcacatggttaacctagacttgtccatcttctggattggccaacttaattaatgtatgaaataaaaggatgcacacatagtgacatgctaatcactataatgtgggcatcaaagttgtgtgttatgtgtaattactagttatctgaataaaagagaaagagatcatccatatttcttatcctaaatgaatgtcacgtgtctttataattctttgatgaaccagatgcatttcattaaccaaatccatatacatataaatattaatcatatataattaatatcaattgggttagcaaaacaaatctagtctaggtgtgttttgcgaatgcggccgccaccgcggtggagctcgaattccggtccgggcctagaaggccagcttcaagtttgtacaaaaaagcaggctccggccagaatggcccggaccgggttaccgaattcgagctcggtaccatttaaattgcgcccgccacggccgtggaggtcgtattccggtcagcttgcatccctgcagtgcagcgtgacccggtcgtgcccctctctagagataatgagcattgcatgtctaagttataaaaaattaccacatattttttttgtcacacttgtttgaagtgcagtttatctatctttatacatatatttaaactttactctacgaataatataatctatagtactacaataatatcagtgttttagagaatcatataaatgaacagttagacatggtctaaaggacaattgagtattttgacaacaggactctacagttttatctttttagtgtgcatgtgttctcctttttttttgcaaatagcttcacctatataatacttcatccattttattagtacatccatttagggtttagggttaatggtttttatagactaatttttttagtacatctattttattctattttagcctctaaattaagaaaactaaaactctattttagtttttttatttaataatttagatataaaatagaataaaataaagtgactaaaaattaaacaaataccctttaagaaattaaaaaaactaaggaaacatttttcttgtttcgagtagataatgccagcctgttaaacgccgtcgacgagtctaacggacaccaaccagcgaaccagcagcgtcgcgtcgggccaagcgaagcagacggcacggcatctctgtcgctgcctctggacccctctcgagagttccgctccaccgttggacttgctccgctgtcggcatccagaaattgcgtggcggagcggcagacgtgagccggcacggcaggcggcctcctcctcctctcacggcaccggcagctacgggggattcctttcccaccgctccttcgctttcccttcctcgcccgccgtaataaatagacaccccctccacaccctctttccccaacctcgtgttgttcggagcgcacacacacacaaccagatctcccccaaatccacccgtcggcacctccgcttcaaggtacgccgctcgtcctcccccccccccctctctaccttctctagatcggcgttccggtccatgcatggttagggcccggtagttctacttctgttcatgtttgtgttagatccgtgtttgtgttagatccgtgctgctagcgttcgtacacggatgcgacctgtacgtcagacacgttctgattgctaacttgccagtgtttctctttggggaatcctgggatggctctagccgttccgcagacgggatcgatttcatgattttttttgtttcgttgcatagggtttggtttgcccttttcctttatttcaatatatgccgtgcacttgtttgtcgggtcatcttttcatgcttttttttgtcttggttgtgatgatgtggtctggttgggcggtcgttctagatcggagtagaattctgtttcaaactacctggtggatttattaattttggatctgtatgtgtgtgccatacatattcatagttacgaattgaagatgatggatggaaatatcgatctaggataggtatacatgttgatgcgggttttactgatgcatatacagagatgctttttgttcgcttggttgtgatgatgtggtgtggttgggcggtcgttcattcgttctagatcggagtagaatactgtttcaaactacctggtgtatttattaattttggaactgtatgtgtgtgtcatacatcttcatagttacgagtttaagatggatggaaatatcgatctaggataggtatacatgttgatgtgggttttactgatgcatatacatgatggcatatgcagcatctattcatatgctctaaccttgagtacctatctattataataaacaagtatgttttataattattttgatcttgatatacttggatgatggcatatgcagcagctatatgtggatttttttagccctgccttcatacgctatttatttgcttggtactgtttcttttgtcgatgctcaccctgttgtttggtgttacttctgcaggtcgactctagaggatccatggccactgtgaacaactggctcgctttctccctctccccgcaggagctgccgccctcccagacgacggactccacactcatctcggccgccaccgccgaccatgtctccggcgatgtctgcttcaacatcccccaagattggagcatgaggggatcagagctttcggcgctcgtcgcggagccgaagctggaggacttcctcggcggcatctccttctccgagcagcatcacaaggccaactgcaacatgatacccagcactagcagcacagtttgctacgcgagctcaggtgctagcaccggctaccatcaccagctgtaccaccagcccaccagctcagcgctccacttcgcggactccgtaatggtggcttcctcggccggtgtccacgacggcggtgccatgctcagcgcggccgccgctaacggtgtcgctggcgctgccagtgccaacggcggcggcatcgggctgtccatgattaagaactggctgcggagccaaccggcgcccatgcagccgagggtggcggcggctgagggcgcgcaggggctctctttgtccatgaacatggcggggacgacccaaggcgctgctggcatgccacttctcgctggagagcgcgcacgggcgcccgagagtgtatcgacgtcagcacagggtggagccgtcgtcgtcacggcgccgaaggaggatagcggtggcagcggtgttgccggcgctctagtagccgtgagcacggacacgggtggcagcggcggcgcgtcggctgacaacacggcaaggaagacggtggacacgttcgggcagcgcacgtcgatttaccgtggcgtgacaaggcatagatggactgggagatatgaggcacatctttgggataacagttgcagaagggaagggcaaactcgtaagggtcgtcaagtctatttaggtggctatgataaagaggagaaagctgctagggcttatgatcttgctgctctgaagtactggggtgccacaacaacaacaaattttccagtgagtaactacgaaaaggagctcgaggacatgaagcacatgacaaggcaggagtttgtagcgtctctgagaaggaagagcagtggtttctccagaggtgcatccatttacaggggagtgactaggcatcaccaacatggaagatggcaagcacggattggacgagttgcagggaacaaggatctttacttgggcaccttcagcacccaggaggaggcagcggaggcgtacgacatcgcggcgatcaagttccgcggcctcaacgccgtcaccaacttcgacatgagccgctacgacgtgaagagcatcctggacagcagcgccctccccatcggcagcgccgccaagcgcctcaaggaggccgaggccgcagcgtccgcgcagcaccaccacgccggcgtggtgagctacgacgtcggccgcatcgcctcgcagctcggcgacggcggagccctggcggcggcgtacggcgcgcactaccacggcgccgcctggccgaccatcgcgttccagccgggcgccgccagcacaggcctgtaccacccgtacgcgcagcagccaatgcgcggcggcgggtggtgcaagcaggagcaggaccacgcggtgatcgcggccgcgcacagcctgcaggacctccaccacctgaacctgggcgcggccggcgcgcacgactttttctcggcagggcagcaggccgccgccgctgcgatgcacggcctgggtagcatcgacagtgcgtcgctcgagcacagcaccggctccaactccgtcgtctacaacggcggggtcggcgacagcaacggcgccagcgccgtcggcggcagtggcggtggctacatgatgccgatgagcgctgccggagcaaccactacatcggcaatggtgagccacgagcaggtgcatgcacgggcctacgacgaagccaagcaggctgctcagatggggtacgagagctacctggtgaacgcggagaacaatggtggcggaaggatgtctgcatgggggactgtcgtgtctgcagccgcggcggcagcagcaagcagcaacgacaacatggccgccgacgtcgggcatggcggcgcgcagctcttcagtgtctggaacgacacttaagcgtacgtgccggcctggctctccgaaagggcgtattccagcacactggcggccgttactagacccaacctagacttgtccatcttctggattggccaacttaattaatgtatgaaataaaaggatgcacacatagtgacatgctaatcactataatgtgggcatcaaagttgtgtgttatgtgtaattactagttatctgaataaaagagaaagagatcatccatatttcttatcctaaatgaatgtcacgtgtctttataattctttgatgaaccagatgcatttcattaaccaaatccatatacatataaatattaatcatatataattaatatcaattgggttagcaaaacaaatctagtctaggtgtgttttgcgaatgcggcctccgggcacccagctttcttgtacaaagtggccgttaacggatcggccagaatggcccggaccgggttaccgaattcgagctcggtaccctggttcacaaactcaatacaacacacagtggagtagggtattacgctccggcggcccgaaccactctaaatccttgtgtcctcgtgtgctcttccaccattaatgactgtaattgcagggacacgaagagttgtagcgcttttgccaacaagatccgctatatgctagtagagtggaacctgcacagcaacaagcatccaataatctgagaataagaattatgtgtggtgatggttctcatctctgcaactcgccattttcgcgagagaaccaaatccaagttggtgaagatcatgatttgggctcatgggctggcatagtagctattacctttgcaattgtggttcgaatctatccgatattctccttttcagggagagctaatgcttatgcttattgggtattttggtttgacactgcttcacgcccaaaaaaaggcaactatgtctgagttggatatggcccaaaaaaaggcagctatgtctgagttggatatggaagtcttctttcgtttagggtgaagtaagaccaagctcatgagcttattatcttaggtcggaacaaattagttgataggcatggcacatttatcaaattataatgattttaacagaaaagcaacacctctttttcagcagcaccagctttgcaagctgcaattgacactccaagcatagtatttgctccaaactcagcctgcatttcgcacaatatcatatctatttccatttggataaaatatattttccagaaatatgggaacagaatcaagatacagaaaaaagttgtggtagtagtggtaagtggaaacacaagtacagtgaaaagatagcattatttctgaacagtcaaattaaccgaaataagtagtatcacatactgcccctaaattgactacacccaatgtaaagaattgcttgagcatattgagccatcagttgtttgtttgtgtaacggatttgacaatgcagagttcaggagcaaaaaaccgcaaaggagagaaagagggaaaggatctcctagtatcccaccttgtggcgcgccctgtcaagtgcatgatggcctggtcgatctgcgtctgctgctgcggttccatcccaacgagtgcctccgacaccttgtcgttgatcacccgcaccgcgtaggcgacccccctggcgaggaacttccgcctctcggaggccccggccgcgtcggcggcggcgccctcgagcgcgcccacgctagccgtagatgctcggtgcacggccttgttggtgtgcaactcgacctcaacggccggtgcgctacgcccgtcaaggatctggcgcgcccgcaccctcgtgatcacggtgggcgcctcccgcctcatgtggccgacgatgaaaagcgccgggttaggggccttggcgcgcaccgccgtattcagggcctcctcgctcttgcgcgagagcaggtgcttccccaggtactcctgcactgacaaggctgccacagcggtggaatttgtcctcacgacttcgccacgtcgtcctcacctccctggcttcccacgactccgccgtatcgaggtgctcggtgggtcgtcttaatccgaagtccgaactaggaagacgagacagagaggtctgaggaatgggcctcgtttgatgttgagctgaattatttttccagcataagcccaggtcttggtccatgaacaaaattactagaaacccagcccagtactacgatctaaaagagggactgccactggatagctctctctagcattctccacgctccaatacagcggcgtcgtgtctatccgggtctatccgcgaacacgtgagaactctccagaaactgctttctcctccacttcatctctctcgctttccctctataaaaagaccccttctaggaattgagggagacagcaagcaccaagcagcgatccgaagctcaatcaattcactcaaacctcttccccaaatcttcgattagatcttcgttgacaagaagactagaaccgaacctgacatgtccaacctgctcacggttcaccagaaccttccggctcttccagtggacgcgacgtccgatgaagtcaggaagaacctcatggacatgttccgcgacaggcaagcgttcagcgagcacacctggaagatgctgctctccgtctgccgctcctgggctgcatggtgcaagctgaacaacaggaagtggttccccgctgagcccgaggacgtgagggattaccttctgtacctgcaagcgcgaggtttgtttctgcttctacctttgatatatatataataattatcattaattagtagtaatataatatttcaaatatttttttcaaaataaaagaatgtagtatatagcaattgcttttctgtagtttataagtgtgtatattttaatttataacttttctaatatatgaccaaaacatggtgatgcctaggtctggcagtgaagaccatccagcaacaccttggacaactgaacatgcttcacaggcgctccggcctcccgcgccccagcgactcgaacgccgtgagcctcgtcatgcgccgcatcaggaaggaaaacgtcgatgccggcgaaagggcaaagcaggccctcgcgttcgagaggaccgatttcgaccaggtccgcagcctgatggagaacagcgacaggtgccaggacattaggaacctggcgttcctcggaattgcatacaacacgctcctcaggatcgcggaaattgcccgcattcgcgtgaaggacattagccgcaccgacggcggcaggatgcttatccacattggcaggaccaagacgctcgtttccaccgcaggcgtcgaaaaggccctcagcctcggagtgaccaagctcgtcgaacgctggatctccgtgtccggcgtcgcggacgacccaaacaactacctcttctgccgcgtccgcaagaacggggtggctgcccctagcgccaccagccaactcagcacgagggccttggaaggtattttcgaggccacccaccgcctgatctacggcgcgaaggatgacagcggtcaacgctacctcgcatggtccgggcactccgcccgcgttggagctgctagggacatggcccgcgccggtgtttccatccccgaaatcatgcaggcgggtggatggacgaacgtgaacattgtcatgaactacattcgcaaccttgacagcgagacgggcgcaatggttcgcctcctggaagatggtgactgaggtacccaacctagacttgtccatcttctggattggccaacttaattaatgtatgaaataaaaggatgcacacatagtgacatgctaatcactataatgtgggcatcaaagttgtgtgttatgtgtaattactagttatctgaataaaagagaaagagatcatccatatttcttatcctaaatgaatgtcacgtgtctttataattctttgatgaaccagatgcatttcattaaccaaatccatatacatataaatattaatcatatataattaatatcaattgggttagcaaaacaaatctagtctaggtgtgttttgcgatccgatatcgaattggccacggtaccagctgctgctgttctagggttcacaagtctgcctatttgtcttccccaatggagctatggttgtctggtctggtccttggtcgtgtcccgtttcattgtgtactatttacctgtaatgtgtatccttaagtctggtttgatggtgtctgaaacgttttgctgtggtagagcagcatggaagaactataatgaataagtgatccctaatcattgtgtccaaattttgcttctgctatacccttttgtgctgtttcttatgttttgcttaaaaatttgatctgacaaacaaatttgtctaaattatgctcttgttctgactgtgtactgtacacatttgtattgctaccggtttggcacatagttttctctttgattgcagatcaaacccttctgattgcagattgcttggctatggctgatgtgctcactgttcttctttagcttgtatattgctgatggtggcttggctacggctgaaaaagttgctgctgcgccgacttggcaactgttgctccagtaatgctttgtcctctcttcctagccgccgacttggcacttggcagctgttgctcctgtaatgcgttgttatctcttatctcttgagatgtactatgattttgaggctgtttgacttgtgccagattgccagtgctgatgctatattatctcaggtttttatgctagtatatgttttactgtgtgctgcctgtgtcgagttacgtaatctattgaaccgctatgcgtgttgatgccctgttgttgcttgccagattgatgcccctgttgcttgcagcttgcaagctgtagtgaaatcctaaaattccaaaccaaatctattctgaacttttgaagatctgtgatgtccggaagaaaagattcaaacagataaacgggactctccagaatctataaaataaatgatcgacaaacgctttgctttggtaggcttcaagcttggtcacccggtccgggcctagaaggccagcttcggccgccccgggcaactttattatacaaagttgatagataaatcagatatctggttcctaaggacccggcggaccgattaaactgattcggtccgacgcgttacctaataacttcgtatagcatacattatacgaagttattagctaactaactagtaagcttaagccatgggtcgacggatccgttaactagcgtggcatttggcaccgccgcacactatgcgagctaggagtgctagtttacagatgaaactatgaaaccaagaaaacacaattgtccgtagctagcgcgtggcgtcgtgtcaagcttcacacagtatcttcgttcttcactataaatcgcgcctgttgttcgtgagacccaccaccgtggataacagtcccctaataataagcgatcaacagcactgctgatggctgaacaccgaggcgccgccgcgcgtaaccatccgccggagcagcccgtcgtgccggcgaacgacgccttccccgaccgcgcccagcagctctgcctcgacgccgggcgcgcgctcgcgatgtgcggcgtgctcgtcgccgtccctcccgcattttacgcgtcgacgtcgcggacgacaccgcacttgccttcgtcggcttcgtcctctggatcatcggtgcgtggctgtgcctcctggcgctcacgcccttggctccacgggcggtgagggcgggcggggccgccgccagcaccttgctgatcaggtgcctgtccctttcatgaactactagcgcccgcgcccgcggccgccgggcacaagagaacacatcgatgttcgctgcgtacgtcagcaataaggcactctttgtcagtagtcgagtgcatatgttgggtgtttgccctgggagatttcaagtgttgtggccattatcccgcaggataaaaaatcggcggcttttggattgatacggaaaataacgatgtttcatgctcgtgttgtgtgtgtgacatcttgtcagccaagtttttaaccgttgctactccccctctgtgggctcagtgtgtggaccggaatacgtcgtacataggccgtagcctaagcccaatatgccgtttttcaggttggcctgtgtgacgacaagcgggtctcaaaagcccatcacgcaactggcctgcaattattggaggagagcgcgtcgagttggttccagaggctgcgtggtggggccggactctgcgacgacctctcgttcgcgtccgatttggttgccgtgagccgtgacgtaacgcctccttccgttcctccctatataagttccacccccgggtccggtttccccaagccccagtgacccccgatcccgatcgcgaaatctccgcacccgccggcaagggaccgaagcaagcctctctcccgaccgtcgcatcaaggtacgcgtccgctcgatctgtcctcttccttctcgatttgacttgctgtggtgcccgatcacgggatcagaatcgcaccagtgtagatttcgcatgttctaagatgtgttagtttccaggctaatccagttctcttgacgcccgatccgatcgagctccgtgtttatttcagcctaatcgtagtattcccctaaaatttcctcattagggggttcgcaagattgttggtcgacaggttcacttatgctcgatcgcttacttttagtcgattcatgctgcgtactattgttgccccccgtggttttatcttttctcgtgtgaaatccagtagatatagtagatatcgtagcattaggttttaattcaatcgattgattattgtatcatcaaaattgagaagttcgaatcatgcctatcatgctgcctcaaccgaaatcctgtatattgaagtttcaattcaattgattgatcattcattagattcaaccaaaatctagaaggttagatgacgcatgtcatgctgcctgcgtagtttacctttgatctgtttatgattaccttatcagtaggatatttgtgattttgggaagtagcactaactgattcatgctgacatgatgttccctttcagattatactgttgagtcctatctaattgatgctttgtatgctatatgaatacgtcatggtaaattagcagttaattagcatattagcaattgggcgtacctcatcaggattgctcttgtagatgtgtgtggtgatgtttcttgttcaattcatgttctgctttaaaagtatgtgttctctgtttgttaattaagattcatggttataatgatttggacctaattaatcagggttgcccttttagatgcgtggttacttgttgagttcatttttttcctgctatagttgtatgcgtttgttcattcatggttagatttgatttgtttcttctctattccatgccttccatatacttcaattgtagcttaacatgagatttctgtatatgcaggtcgaccgccggggatccacacgacaccatggcccagtccaagcacggcctgaccaaggagatgaccatgaagtaccgcatggagggctgcgtggacggccacaagttcgtgatcaccggcgagggcatcggctaccccttcaagggcaagcaggccatcaacctgtgcgtggtggagggcggccccttgcccttcgccgaggacatcttgtccgccgccttcatgtacggcaaccgcgtgttcaccgagtacccccaggacatcgtcgactacttcaagaactcctgccccgccggctacacctgggaccgctccttcctgttcgaggacggcgccgtgtgcatctgcaacgccgacatcaccgtgagcgtggaggagaactgcatgtaccacgagtccaagttctacggcgtgaacttccccgccgacggccccgtgatgaagaagatgaccgacaactgggagccctcctgcgagaagatcatccccgtgcccaagcagggcatcttgaagggcgacgtgagcatgtacctgctgctgaaggacggtggccgcttgcgctgccagttcgacaccgtgtacaaggccaagtccgtgccccgcaagatgcccgactggcacttcatccagcacaagctgacccgcgaggaccgcagcgacgccaagaaccagaagtggcacctgaccgagcacgccatcgcctccggctccgccttgccctccggactcagatctcgatagagtcaacctagacttgtccatcttctggattggccaacttaattaatgtatgaaataaaaggatgcacacatagtgacatgctaatcactataatgtgggcatcaaagttgtgtgttatgtgtaattactagttatctgaataaaagagaaagagatcatccatatttcttatcctaaatgaatgtcacgtgtctttataattctttgatgaaccagatgcatttcattaaccaaatccatatacatataaatattaatcatatataattaatatcaattgggttagcaaaacaaatctagtctaggtgtgttttgcgaattgcggcgcccttactttaacgcctctaaccaacacccctttatctttataaggaacaataaacagaatttgccccactgttctaaatcacctaataatatccccagctaaaaacaataaaggtttcctagaattaagacaagcatgactgttcctccaggagggtttggaacattgttgcagtcttgcagatacgggcgaagggtgagaaacagagcggagggctggaggtgacctcggtagtcgacgccggagttgagcttgacaacgacggggcggcccctgatggacttgaggaagtccgatggcgtcttcaccgtcccgccggcgcccgaggcgggcctgtcgctgccgccgccgccgctgctcatcttgcgcgctgtgcccccggcggtgtccctgtgttgcggatcgcgggtgggccaggtggatgcgagggcgacccgtttggactccggccggagccgccggatccctggtcggtgtcagtgccgtttactctgggccccacgtgtcagtaccgtctgtagatgacaacaacccgtcgtccacagtcatgtccaaaatatcctttcttcttttttttcgattcggatatctatcttccttttttttttccaaaaatcttcttgacgcaccagcgcgcacgtttgtggtaaacgccgacacgtcggtcccacgtcgatagaccccacccaccagtgagtagcgtgtacgtattcgggggtgacggacgtgtcgccgtcgtcttgctagtcccattcccatctgagccacacatctctgaacaaaaaaaaggagggaggcctccacgcacatccccctccgtgccacccgccccaaaccctcgcgccgcctccgagacagccgccgcaaccatggccaccgccgccgccgcgtctaccgcgctcactggcgccactaccgctgcgcccaaggcgaggcgccgggcgcacctcctggccacccgccgcgccctcgccgcgcccatcaggtgctcagcggcgtcacccgccatgccgatggctcccccggccaccccgctccggccgtggggccccaccgagccccgcaagggtgctgacatcctcgtcgagtccctcgagcgctgcggcgtccgcgacgtcttcgcctaccccggcggcgcgtccatggagatccaccaggcactcacccgctcccccgtcatcgccaaccacctcttccgccacgagcaaggggaggcctttgccgcctccggctacgcgcgctcctcgggccgcgtcggcgtctgcatcgccacctccggccccggcgccaccaacctagtctccgcgctcgccgacgcgctgctcgattccgtccccatggtcgccatcacgggacaggtggcgcgacgcatgattggcaccgacgccttccaggagacgcccatcgtcgaggtcacccgctccatcaccaagcacaactacctggtcctcgacgtcgacgacatcccccgcgtcgtgcaggaggctttcttcctcgcctcctctggtcgaccagggccggtgcttgtcgacatccccaaggacatccagcagcagatggcggtgcctgtctgggacaagcccatgagtctgcctgggtacattgcgcgccttcccaagccccctgcgactgagttgcttgagcaggtgctgcgtcttgttggtgaatcgcggcgccctgttctttatgtgggcggtggctgcgcagcatctggtgaggagttgcgacgctttgtggagctgactggaatcccggtcacaactactcttatgggcctcggcaacttccccagcgacgacccactgtctctgcgcatgctaggtatgcatgggacggtgtatgcaaattatgcagtggataaggccgatctgttgcttgcacttggtgtgcggtttgatgatcgcgtgacagggaagattgaggcttttgcaagcagggctaagattgtgcacgttgatattgatccggctgagattggcaagaacaagcagccacatgtgtccatctgtgcagatgttaagcttgctttgcagggcatgaatgctcttcttgaaggaagcacatcaaagaagagctttgactttggctcatggaacgatgagttggatcagcagaagagggaattcccccttgggtataaaacatctaatgaggagatccagccacaatatgctattcaggttcttgatgagctgacgaaaggcgaggccatcatcggcacaggtgttgggcagcaccagatgtgggcggcacagtactacacttacaagcggccaaggcagtggttgtcttcagctggtcttggggctatgggatttggtttgccggctgctgctggtgcttctgtggcaaacccaggtgtcactgttgttgacatcgatggagatggtagctttctcatgaacgttcaggagctagctatgatccgaattgagaacctcccagtgaaggtctttgtgctaaacaaccagcacctggggatggtggtgcagttggaggacaggttctataaggccaacagagcgcacacatacttgggaaacccagagaatgaaagtgagatatatccagatttcgtgacgatcgccaaagggttcaacattccagcggtccgtgtgacaaagaagaacgaagtccgcgcagcgataaagaagatgctcgagactccagggccgtacctcttggatataatcgtcccacaccaggagcatgtgttgcctatgatccctagtggtggggctttcaaggatatgatcctggatggtgatggcaggactgtgtactgactagctagtcagttaacagatctgccagatcctcggtgtacaaataacccgtcttatcctatgagacgggccggcgtcagtgtgttctggaggaatttttatgtcagagcctttttctttgtgtgcttgatgtagatgccaagggaagcttattggctgttgaagcttgatgcaaaataaattatggaactctgttttttgtttatctaataataactagcaaatatgcttccattgcattgaaactaacagccttttgtgtttccaagttttattttgtgacaatgtcatctatttcaattagttgtggaatcggaaacttgcaggactaacttggaaactccaatccctcagcatcctggactttttcctggtgtaatccatgtagatattattttaatcatcattttagttctggaggtttttccatctccggttttgctcccctttcttcaaaaaaaaaaaaaaaatgccgtaggcgccgcaacgcccacctgttgttcaaactcatgggcacgagtggctcgaagattttatacaacaattgctgtagtttcaccgttgctggtgaagaagcatttttttaaaaaaatatagtggtattcattttaattagtttagttgtgcagcgagcaaaatttggacatgctctgctcggaatctgatcgacctagacacagattagcagcagtagctttgtcatctgttccaagagttgcgatctgatagaagaaaaaaaaaccttcccttcaatgtaaaaccgaaactaacaagaaagaagcacagtgccgtttaggcaagtatggagtacgtattaagcatgtagaaggccatgcatgaaccactaacaagaaagaagcgcagtgccattcaggcaagcataagcatgtagattggcatgcatgaacaactaacagtagatcgtctctggtctgattagaagttttttgggaagccaagaaatcatgtacaactggttccatctcaaattccgtggcaaaaagaggcctaagcaacatacctcgagtagatcacattcaagcttggtcacccggtccgtcaatattctgattccgatgacttcgtaggttcctagctcaagccgctcgtgtccaagcgtcacttacgattagctaatgattacggcatctaggaccgactagtggcgcgccgactagctagctaaggtaccgagctcgaattcattccgattaatcgtggcctcttgctcttcaggatgaagagctatgtttaaacgtgcaagcgctactagacaattcagtacattaaaaacgtccgcaatgtgttattaagttgtctaagcgtcaatttgtttacaccacaatatatcctgcca

SEQ ID NO: 61 - DNA, 20120 bp, Artificial sequence
  PHP95990
gtttacccgccaatatatcctgtcaaacactgatagtttaaactgaaggcgggaaacgacaatctgatcatgagcggagaattaagggagtcacgttatgacccccgccgatgacgcgggacaagccgttttacgtttggaactgacagaaccgcaacgttgaaggagccactcagcaagctggtacgattgtaatacgactcactatagggcgaattgagcgctgtttaaacgctcttcaactggaagagcggttacgctgtttaaacgctcttcaactggaagagcggttactaccggttcactagctagctgctaatcgagctagttaccctatgaggtgacatgaagcgctcacggttactatgacggttagcttcacgactgttggtggcagtagcgtacgacttagctatagttccggacttacccttaagcgatttaaatctgcggttaccgaattcgagctcggtacctagtacccttgtacttttggtttcacctgcatagagaaaacccacaagaatatgacagtctgatttgtcagtctcattctcaagcaacatttctctatccgttactttcatggtgaataacacaatccatcatcaatactttgtgttactcagaaactgaaagttattccgagtcttgcatatctttggacctactcgtttttctaccattattgctgattgttaagctctcgctacttgaatcggcattgttggagtgggaaggttcaaaaaattggagttatgactagttgtctctttctatgtacgatggagaaaatgaataaacaactgagaaaatggctcttgtttagttgatgatgctcttaagctttccactggttgccatatatgatttgggcatttcactttgatcttaatgggccttgtaaagcccaagactcatgattatctttagttgatgctcttaattaggtgtgggcaaataattcaaactgtatgtacccgaccaaaaccaaagcaaaaataatcgaaccaaaccgaaaatttaaaaataaccgaatgaaaactaaatcctataactgaaagaactgaaaccgaatcaaaatatttaatgtaaccaaaaatatccgaaatataattatattgtcaaaaatattaataatttctagattaaataattaaaaatacttaaaaatttatataaaatagtaaaaatactcgaaaataaccacaaatattcaaaaacaaccgaaatatcccaaaatattcaaagcaaaataaccgaatggataccaaattttaaaaccgaaaaaactggaacaaaaccaaaatcgaaccaaaatttcaaaaatcgaataaatactaaactttagaacaaaaaaaaacgataaccgaatgtatacgaaccaaagccgaattagataaccgaacgtccaggactactcttaatctttccgccacttatgatttgggctattactttgtttataatgagccttttcaagctcaagttcatgattgtccgtgagatgagaaactgacttgttggattcgaaaccctagctagtattggttaatacttaatacataaatgacctgcattgacatcatcatccaagaaaataaaaattgtatgcttgagatatttagttttcctagctaggttttctttattttagtaccgaatctttaggtgtgccacgttaatttagacccattttttcatacttaccaactgagtctagtttaatcatgactataatcgtataaaatgattcagtcgacgtcattgcgaacgtatataaaatcatccaaattgacgtcattccaaagaggtaagcatgcttatctaagagtccgagcatactaaacaagacgacattttatttgcactccaaatcaaattttgtattgcctaaagaaaaacaatcaaactcaagtttcttaaaattaatttcattcaaactaatcactttcaatatctcacatattattcatgccatttctatttgtctaaacatgatttaaaaaaaaaagtaaaatacaaagattactatgcaaaaactctataaaaaaaaattcaaatttcttatttatttgtgacatcaaattttcaaaataatttttttaattatcggttgatccggtcagtcgataaaaacataaactttcagcgaccgttaaaactttcctactaccgatttagagaaaatcttagcttgaaacgtaattgtaacctgccttcatgcaagtcgcaagatatgtcatcctaagttgtatatgttttctcaaaagatgtatttacttgagaaaatacgtttcaacgttgatggacaaccaattaagaatcaagcacctttcgtaatcaatttaggcttatcgtctaaggtatactgatttacgacagttgactagacttataaggaacaaaataatagaatagtttctaaacacttcacctaatcatagagactaagatggtaattcgtaaacgacaaagcctagtgacactgtccattgtaaaattccacatcatattagtattaaacatatacatgtagtttcctgaacacatgtagtatcaaacacacttcgtggcttcttcctcgaaacctgcggccgcgctatagttccggacttacccttaagataacttcgtatagcatacattatacgaagttatgggcccacgcgtgaagagcggttaccagagctggtcacctttgtccaccaagatggaactgtcttcggccagaatggccatctggattcagcaggcctagaaggccatttatcgctatcaactttgtatagaaaagttgggccgaattcgagctcggtacggccagaatggcccggaccgaagcttgcggccgcacactgatagtttaaactgaaggcgggaaacgacaatctgatcatgagcggagaattaagggagtcacgttatgacccccgccgatgacgcgggacaagccgttttacgtttggaactgacagaaccgcaacgttgaaggagccactcagccgcgggtttctggagtttaatgagctaagcacatacgtcagaaaccattattgcgcgttcaaaagtcgcctaaggtcactatcagctagcaaatatttcttgtcaaaaatgctccactgacgttccataaattcccctcggtatccaattagagtctcatattcactctcccgggggatctcgactctagaggatcgctcaggaaggccgctgagatagaggcatggcggccaatgcgggcggcggtggagcgggaggaggcagcggcagcggcagcgtggctgcgccggcggtgtgccgccccagcggctcgcggtggacgccgacgccggagcagatcaggatgctgaaggagctctactacggctgcggcatccggtcgcccagctcggagcagatccagcgcatcaccgccatgctgcggcagcacggcaagatcgagggcaagaacgtcttctactggttccagaaccacaaggcccgcgagcgccagaagcgccgcctcaccagcctcgacgtcaacgtgcccgccgccggcgcggccgacgccaccaccagccaactcggcgtcctctcgctgtcgtcgccgccgccttcaggcgcggcgcctccctcgcccaccctcggcttctacgccgccggcaatggcggcggatcggctgtgctgctggacacgagttccgactggggcagcagcggcgctgccatggccaccgagacatgcttcctgcaggactacatgggcgtgacggacacgggcagctcgtcgcagtggccacgcttctcgtcgtcggacacgataatggcggcggccgcggcgcgggcggcgacgacgcgggcgcccgagacgctccctctcttcccgacctgcggcgacgacggcggcagcggtagcagcagctacttgccgttctggggtgccgcgtccacaactgccggcgccacttcttccgttgcgatccagcagcaacaccagctgcaggagcagtacagcttttacagcaacagcaacagcacccagctggccggcaccggcaaccaagacgtatcggcaacagcagcagcagccgccgccctggagctgagcctcagctcatggtgctccccttaccctgctgcagggagtatgtgagagcaacgcgagctgccactgctcttcactgatgtctctggaatggaaggaggaggaagtgagcatagcgttggtgcgttgctgtcaagggcgaattcacatggttaacctagacttgtccatcttctggattggccaacttaattaatgtatgaaataaaaggatgcacacatagtgacatgctaatcactataatgtgggcatcaaagttgtgtgttatgtgtaattactagttatctgaataaaagagaaagagatcatccatatttcttatcctaaatgaatgtcacgtgtctttataattctttgatgaaccagatgcatttcattaaccaaatccatatacatataaatattaatcatatataattaatatcaattgggttagcaaaacaaatctagtctaggtgtgttttgcgaatgcggccgccaccgcggtggagctcgaattccggtccgggcctagaaggccagcttcaagtttgtacaaaaaagcaggctccggccagagttacccggaccgaagcttgcatgcctgcagtgcagcgtgacccggtcgtgcccctctctagagataatgagcattgcatgtctaagttataaaaaattaccacatattttttttgtcacacttgtttgaagtgcagtttatctatctttatacatatatttaaactttactctacgaataatataatctatagtactacaataatatcagtgttttagagaatcatataaatgaacagttagacatggtctaaaggacaattgagtattttgacaacaggactctacagttttatctttttagtgtgcatgtgttctcctttttttttgcaaatagcttcacctatataatacttcatccattttattagtacatccatttagggtttagggttaatggtttttatagactaatttttttagtacatctattttattctattttagcctctaaattaagaaaactaaaactctattttagtttttttatttaataatttagatataaaatagaataaaataaagtgactaaaaattaaacaaataccctttaagaaattaaaaaaactaaggaaacatttttcttgtttcgagtagataatgccagcctgttaaacgccgtcgacgagtctaacggacaccaaccagcgaaccagcagcgtcgcgtcgggccaagcgaagcagacggcacggcatctctgtcgctgcctctggacccctctcgagagttccgctccaccgttggacttgctccgctgtcggcatccagaaattgcgtggcggagcggcagacgtgagccggcacggcaggcggcctcctcctcctctcacggcaccggcagctacgggggattcctttcccaccgctccttcgctttcccttcctcgcccgccgtaataaatagacaccccctccacaccctctttccccaacctcgtgttgttcggagcgcacacacacacaaccagatctcccccaaatccacccgtcggcacctccgcttcaaggtacgccgctcgtcctcccccccccccctctctaccttctctagatcggcgttccggtccatgcatggttagggcccggtagttctacttctgttcatgtttgtgttagatccgtgtttgtgttagatccgtgctgctagcgttcgtacacggatgcgacctgtacgtcagacacgttctgattgctaacttgccagtgtttctctttggggaatcctgggatggctctagccgttccgcagacgggatcgatttcatgattttttttgtttcgttgcatagggtttggtttgcccttttcctttatttcaatatatgccgtgcacttgtttgtcgggtcatcttttcatgcttttttttgtcttggttgtgatgatgtggtctggttgggcggtcgttctagatcggagtagaattctgtttcaaactacctggtggatttattaattttggatctgtatgtgtgtgccatacatattcatagttacgaattgaagatgatggatggaaatatcgatctaggataggtatacatgttgatgcgggttttactgatgcatatacagagatgctttttgttcgcttggttgtgatgatgtggtgtggttgggcggtcgttcattcgttctagatcggagtagaatactgtttcaaactacctggtgtatttattaattttggaactgtatgtgtgtgtcatacatcttcatagttacgagtttaagatggatggaaatatcgatctaggataggtatacatgttgatgtgggttttactgatgcatatacatgatggcatatgcagcatctattcatatgctctaaccttgagtacctatctattataataaacaagtatgttttataattattttgatcttgatatacttggatgatggcatatgcagcagctatatgtggatttttttagccctgccttcatacgctatttatttgcttggtactgtttcttttgtcgatgctcaccctgttgtttggtgttacttctgcaggtcgactttaacttagcctaggatccatggtgagcgccctgagcagggtgatcgagaacccgaccgacccgccggtgaagcaggagctggacaagagcgaccagcaccagccggaccaggaccagccgaggaggaggcactacaggggcgtgaggcagaggccgtggggcaagtgggccgccgagatcagggacccgaagaaggccgccagggtgtggctgggcaccttcgagaccgccgaggaggccgccctggcctacgacagggccgccctgaagttcaagggcaccaaggccaagctgaacttcccggagagggtgcagggcccgaccaccaccaccaccatcagccacgccccgaggggcgtgagcgagagcatgaacagcccgccgccgaggccgggcccgccgagcaccaccaccaccagctggccgatgacctacaaccaggacatcctgcagtacgcccagctgctgaccagcaacaacgaggtggacctgagctactacaccagcaccctgttcagccagccgttcagcaccccgagcagcagcagcagcagcagccagcagacccagcagcagcagctgcagcagcagcagcagcagagggaggaggaggagaagaactacggctacaactactacaactacccgagggagtagggtaccgttaacagatctactaactatctatactgtaataatgttgtatagccgccggatagctagctagtttagtcattcagcggcgatgggtaataataaagtgtcatccatccatcaccatgcgtggcaacgtgagcaatgacctgattgaacaaattgaaatgaaaagaagaaatatgttatatgtcaacgagatttcctcataatgccactgacgacgtgtgtccaagaaatgtatcagtgatacgtatattcacaatttttttatgacttatactcacaatttgtttttttactacttatactcacaatttgttgtgcgtaccataacaatttcgatcgaatatatatcagaaagttgacgaaagtaagctcactcaaaaagttaaatgggctgcggaagctgcgtcaggcccaagttttggctattctatccggtatccacgattttgatggctgagggacatatgttcgcttaagcttcggtccgggcctagaaggccgatctcccgggcacccagctttcttgtacaaagtggccgttaacggatcggccagaatggcccggaccgggttaccgaattcgagctcggtaccctggttcacaaactcaatacaacacacagtggagtagggtattacgctccggcggcccgaaccactctaaatccttgtgtcctcgtgtgctcttccaccattaatgactgtaattgcagggacacgaagagttgtagcgcttttgccaacaagatccgctatatgctagtagagtggaacctgcacagcaacaagcatccaataatctgagaataagaattatgtgtggtgatggttctcatctctgcaactcgccattttcgcgagagaaccaaatccaagttggtgaagatcatgatttgggctcatgggctggcatagtagctattacctttgcaattgtggttcgaatctatccgatattctccttttcagggagagctaatgcttatgcttattgggtattttggtttgacactgcttcacgcccaaaaaaaggcaactatgtctgagttggatatggcccaaaaaaaggcagctatgtctgagttggatatggaagtcttctttcgtttagggtgaagtaagaccaagctcatgagcttattatcttaggtcggaacaaattagttgataggcatggcacatttatcaaattataatgattttaacagaaaagcaacacctctttttcagcagcaccagctttgcaagctgcaattgacactccaagcatagtatttgctccaaactcagcctgcatttcgcacaatatcatatctatttccatttggataaaatatattttccagaaatatgggaacagaatcaagatacagaaaaaagttgtggtagtagtggtaagtggaaacacaagtacagtgaaaagatagcattatttctgaacagtcaaattaaccgaaataagtagtatcacatactgcccctaaattgactacacccaatgtaaagaattgcttgagcatattgagccatcagttgtttgtttgtgtaacggatttgacaatgcagagttcaggagcaaaaaaccgcaaaggagagaaagagggaaaggatctcctagtatcccaccttgtggcgcgccctgtcaagtgcatgatggcctggtcgatctgcgtctgctgctgcggttccatcccaacgagtgcctccgacaccttgtcgttgatcacccgcaccgcgtaggcgacccccctggcgaggaacttccgcctctcggaggccccggccgcgtcggcggcggcgccctcgagcgcgcccacgctagccgtagatgctcggtgcacggccttgttggtgtgcaactcgacctcaacggccggtgcgctacgcccgtcaaggatctggcgcgcccgcaccctcgtgatcacggtgggcgcctcccgcctcatgtggccgacgatgaaaagcgccgggttaggggccttggcgcgcaccgccgtattcagggcctcctcgctcttgcgcgagagcaggtgcttccccaggtactcctgcactgacaaggctgccacagcggtggaatttgtcctcacgacttcgccacgtcgtcctcacctccctggcttcccacgactccgccgtatcgaggtgctcggtgggtcgtcttaatccgaagtccgaactaggaagacgagacagagaggtctgaggaatgggcctcgtttgatgttgagctgaattatttttccagcataagcccaggtcttggtccatgaacaaaattactagaaacccagcccagtactacgatctaaaagagggactgccactggatagctctctctagcattctccacgctccaatacagcggcgtcgtgtctatccgggtctatccgcgaacacgtgagaactctccagaaactgctttctcctccacttcatctctctcgctttccctctataaaaagaccccttctaggaattgagggagacagcaagcaccaagcagcgatccgaagctcaatcaattcactcaaacctcttccccaaatcttcgattagatcttcgttgacaagaagactagaaccgaacctgacatgtccaacctgctcacggttcaccagaaccttccggctcttccagtggacgcgacgtccgatgaagtcaggaagaacctcatggacatgttccgcgacaggcaagcgttcagcgagcacacctggaagatgctgctctccgtctgccgctcctgggctgcatggtgcaagctgaacaacaggaagtggttccccgctgagcccgaggacgtgagggattaccttctgtacctgcaagcgcgaggtttgtttctgcttctacctttgatatatatataataattatcattaattagtagtaatataatatttcaaatatttttttcaaaataaaagaatgtagtatatagcaattgcttttctgtagtttataagtgtgtatattttaatttataacttttctaatatatgaccaaaacatggtgatgcctaggtctggcagtgaagaccatccagcaacaccttggacaactgaacatgcttcacaggcgctccggcctcccgcgccccagcgactcgaacgccgtgagcctcgtcatgcgccgcatcaggaaggaaaacgtcgatgccggcgaaagggcaaagcaggccctcgcgttcgagaggaccgatttcgaccaggtccgcagcctgatggagaacagcgacaggtgccaggacattaggaacctggcgttcctcggaattgcatacaacacgctcctcaggatcgcggaaattgcccgcattcgcgtgaaggacattagccgcaccgacggcggcaggatgcttatccacattggcaggaccaagacgctcgtttccaccgcaggcgtcgaaaaggccctcagcctcggagtgaccaagctcgtcgaacgctggatctccgtgtccggcgtcgcggacgacccaaacaactacctcttctgccgcgtccgcaagaacggggtggctgcccctagcgccaccagccaactcagcacgagggccttggaaggtattttcgaggccacccaccgcctgatctacggcgcgaaggatgacagcggtcaacgctacctcgcatggtccgggcactccgcccgcgttggagctgctagggacatggcccgcgccggtgtttccatccccgaaatcatgcaggcgggtggatggacgaacgtgaacattgtcatgaactacattcgcaaccttgacagcgagacgggcgcaatggttcgcctcctggaagatggtgactgaggtacccaacctagacttgtccatcttctggattggccaacttaattaatgtatgaaataaaaggatgcacacatagtgacatgctaatcactataatgtgggcatcaaagttgtgtgttatgtgtaattactagttatctgaataaaagagaaagagatcatccatatttcttatcctaaatgaatgtcacgtgtctttataattctttgatgaaccagatgcatttcattaaccaaatccatatacatataaatattaatcatatataattaatatcaattgggttagcaaaacaaatctagtctaggtgtgttttgcgatccgatatcgaattggccacggtaccagctgctgctgttctagggttcacaagtctgcctatttgtcttccccaatggagctatggttgtctggtctggtccttggtcgtgtcccgtttcattgtgtactatttacctgtaatgtgtatccttaagtctggtttgatggtgtctgaaacgttttgctgtggtagagcagcatggaagaactataatgaataagtgatccctaatcattgtgtccaaattttgcttctgctatacccttttgtgctgtttcttatgttttgcttaaaaatttgatctgacaaacaaatttgtctaaattatgctcttgttctgactgtgtactgtacacatttgtattgctaccggtttggcacatagttttctctttgattgcagatcaaacccttctgattgcagattgcttggctatggctgatgtgctcactgttcttctttagcttgtatattgctgatggtggcttggctacggctgaaaaagttgctgctgcgccgacttggcaactgttgctccagtaatgctttgtcctctcttcctagccgccgacttggcacttggcagctgttgctcctgtaatgcgttgttatctcttatctcttgagatgtactatgattttgaggctgtttgacttgtgccagattgccagtgctgatgctatattatctcaggtttttatgctagtatatgttttactgtgtgctgcctgtgtcgagttacgtaatctattgaaccgctatgcgtgttgatgccctgttgttgcttgccagattgatgcccctgttgcttgcagcttgcaagctgtagtgaaatcctaaaattccaaaccaaatctattctgaacttttgaagatctgtgatgtccggaagaaaagattcaaacagataaacgggactctccagaatctataaaataaatgatcgacaaacgctttgctttggtaggcttcaagcttggtcacccggtccgggcctagaaggccagcttcggccgccccgggcaactttattatacaaagttgatagataaatcagatatctggttcctaaggacccggcggaccgattaaactgattcggtccgacgcgttacctaataacttcgtatagcatacattatacgaagttattagctaactaactagtaagcttaagccatgggtcgacggatccgttaactagcgtggcatttggcaccgccgcacactatgcgagctaggagtgctagtttacagatgaaactatgaaaccaagaaaacacaattgtccgtagctagcgcgtggcgtcgtgtcaagcttcacacagtatcttcgttcttcactataaatcgcgcctgttgttcgtgagacccaccaccgtggataacagtcccctaataataagcgatcaacagcactgctgatggctgaacaccgaggcgccgccgcgcgtaaccatccgccggagcagcccgtcgtgccggcgaacgacgccttccccgaccgcgcccagcagctctgcctcgacgccgggcgcgcgctcgcgatgtgcggcgtgctcgtcgccgtccctcccgcattttacgcgtcgacgtcgcggacgacaccgcacttgccttcgtcggcttcgtcctctggatcatcggtgcgtggctgtgcctcctggcgctcacgcccttggctccacgggcggtgagggcgggcggggccgccgccagcaccttgctgatcaggtgcctgtccctttcatgaactactagcgcccgcgcccgcggccgccgggcacaagagaacacatcgatgttcgctgcgtacgtcagcaataaggcactctttgtcagtagtcgagtgcatatgttgggtgtttgccctgggagatttcaagtgttgtggccattatcccgcaggataaaaaatcggcggcttttggattgatacggaaaataacgatgtttcatgctcgtgttgtgtgtgtgacatcttgtcagccaagtttttaaccgttgctactccccctctgtgggctcagtgtgtggaccggaatacgtcgtacataggccgtagcctaagcccaatatgccgtttttcaggttggcctgtgtgacgacaagcgggtctcaaaagcccatcacgcaactggcctgcaattattggaggagagcgcgtcgagttggttccagaggctgcgtggtggggccggactctgcgacgacctctcgttcgcgtccgatttggttgccgtgagccgtgacgtaacgcctccttccgttcctccctatataagttccacccccgggtccggtttccccaagccccagtgacccccgatcccgatcgcgaaatctccgcacccgccggcaagggaccgaagcaagcctctctcccgaccgtcgcatcaaggtacgcgtccgctcgatctgtcctcttccttctcgatttgacttgctgtggtgcccgatcacgggatcagaatcgcaccagtgtagatttcgcatgttctaagatgtgttagtttccaggctaatccagttctcttgacgcccgatccgatcgagctccgtgtttatttcagcctaatcgtagtattcccctaaaatttcctcattagggggttcgcaagattgttggtcgacaggttcacttatgctcgatcgcttacttttagtcgattcatgctgcgtactattgttgccccccgtggttttatcttttctcgtgtgaaatccagtagatatagtagatatcgtagcattaggttttaattcaatcgattgattattgtatcatcaaaattgagaagttcgaatcatgcctatcatgctgcctcaaccgaaatcctgtatattgaagtttcaattcaattgattgatcattcattagattcaaccaaaatctagaaggttagatgacgcatgtcatgctgcctgcgtagtttacctttgatctgtttatgattaccttatcagtaggatatttgtgattttgggaagtagcactaactgattcatgctgacatgatgttccctttcagattatactgttgagtcctatctaattgatgctttgtatgctatatgaatacgtcatggtaaattagcagttaattagcatattagcaattgggcgtacctcatcaggattgctcttgtagatgtgtgtggtgatgtttcttgttcaattcatgttctgctttaaaagtatgtgttctctgtttgttaattaagattcatggttataatgatttggacctaattaatcagggttgcccttttagatgcgtggttacttgttgagttcatttttttcctgctatagttgtatgcgtttgttcattcatggttagatttgatttgtttcttctctattccatgccttccatatacttcaattgtagcttaacatgagatttctgtatatgcaggtcgaccgccggggatccacacgacaccatggcccagtccaagcacggcctgaccaaggagatgaccatgaagtaccgcatggagggctgcgtggacggccacaagttcgtgatcaccggcgagggcatcggctaccccttcaagggcaagcaggccatcaacctgtgcgtggtggagggcggccccttgcccttcgccgaggacatcttgtccgccgccttcatgtacggcaaccgcgtgttcaccgagtacccccaggacatcgtcgactacttcaagaactcctgccccgccggctacacctgggaccgctccttcctgttcgaggacggcgccgtgtgcatctgcaacgccgacatcaccgtgagcgtggaggagaactgcatgtaccacgagtccaagttctacggcgtgaacttccccgccgacggccccgtgatgaagaagatgaccgacaactgggagccctcctgcgagaagatcatccccgtgcccaagcagggcatcttgaagggcgacgtgagcatgtacctgctgctgaaggacggtggccgcttgcgctgccagttcgacaccgtgtacaaggccaagtccgtgccccgcaagatgcccgactggcacttcatccagcacaagctgacccgcgaggaccgcagcgacgccaagaaccagaagtggcacctgaccgagcacgccatcgcctccggctccgccttgccctccggactcagatctcgatagagtcaacctagacttgtccatcttctggattggccaacttaattaatgtatgaaataaaaggatgcacacatagtgacatgctaatcactataatgtgggcatcaaagttgtgtgttatgtgtaattactagttatctgaataaaagagaaagagatcatccatatttcttatcctaaatgaatgtcacgtgtctttataattctttgatgaaccagatgcatttcattaaccaaatccatatacatataaatattaatcatatataattaatatcaattgggttagcaaaacaaatctagtctaggtgtgttttgcgaattgcggcgcccttactttaacgcctctaaccaacacccctttatctttataaggaacaataaacagaatttgccccactgttctaaatcacctaataatatccccagctaaaaacaataaaggtttcctagaattaagacaagcatgactgttcctccaggagggtttggaacattgttgcagtcttgcagatacgggcgaagggtgagaaacagagcggagggctggaggtgacctcggtagtcgacgccggagttgagcttgacaacgacggggcggcccctgatggacttgaggaagtccgatggcgtcttcaccgtcccgccggcgcccgaggcgggcctgtcgctgccgccgccgccgctgctcatcttgcgcgctgtgcccccggcggtgtccctgtgttgcggatcgcgggtgggccaggtggatgcgagggcgacccgtttggactccggccggagccgccggatccctggtcggtgtcagtgccgtttactctgggccccacgtgtcagtaccgtctgtagatgacaacaacccgtcgtccacagtcatgtccaaaatatcctttcttcttttttttcgattcggatatctatcttccttttttttttccaaaaatcttcttgacgcaccagcgcgcacgtttgtggtaaacgccgacacgtcggtcccacgtcgatagaccccacccaccagtgagtagcgtgtacgtattcgggggtgacggacgtgtcgccgtcgtcttgctagtcccattcccatctgagccacacatctctgaacaaaaaaaaggagggaggcctccacgcacatccccctccgtgccacccgccccaaaccctcgcgccgcctccgagacagccgccgcaaccatggccaccgccgccgccgcgtctaccgcgctcactggcgccactaccgctgcgcccaaggcgaggcgccgggcgcacctcctggccacccgccgcgccctcgccgcgcccatcaggtgctcagcggcgtcacccgccatgccgatggctcccccggccaccccgctccggccgtggggccccaccgagccccgcaagggtgctgacatcctcgtcgagtccctcgagcgctgcggcgtccgcgacgtcttcgcctaccccggcggcgcgtccatggagatccaccaggcactcacccgctcccccgtcatcgccaaccacctcttccgccacgagcaaggggaggcctttgccgcctccggctacgcgcgctcctcgggccgcgtcggcgtctgcatcgccacctccggccccggcgccaccaacctagtctccgcgctcgccgacgcgctgctcgattccgtccccatggtcgccatcacgggacaggtggcgcgacgcatgattggcaccgacgccttccaggagacgcccatcgtcgaggtcacccgctccatcaccaagcacaactacctggtcctcgacgtcgacgacatcccccgcgtcgtgcaggaggctttcttcctcgcctcctctggtcgaccagggccggtgcttgtcgacatccccaaggacatccagcagcagatggcggtgcctgtctgggacaagcccatgagtctgcctgggtacattgcgcgccttcccaagccccctgcgactgagttgcttgagcaggtgctgcgtcttgttggtgaatcgcggcgccctgttctttatgtgggcggtggctgcgcagcatctggtgaggagttgcgacgctttgtggagctgactggaatcccggtcacaactactcttatgggcctcggcaacttccccagcgacgacccactgtctctgcgcatgctaggtatgcatgggacggtgtatgcaaattatgcagtggataaggccgatctgttgcttgcacttggtgtgcggtttgatgatcgcgtgacagggaagattgaggcttttgcaagcagggctaagattgtgcacgttgatattgatccggctgagattggcaagaacaagcagccacatgtgtccatctgtgcagatgttaagcttgctttgcagggcatgaatgctcttcttgaaggaagcacatcaaagaagagctttgactttggctcatggaacgatgagttggatcagcagaagagggaattcccccttgggtataaaacatctaatgaggagatccagccacaatatgctattcaggttcttgatgagctgacgaaaggcgaggccatcatcggcacaggtgttgggcagcaccagatgtgggcggcacagtactacacttacaagcggccaaggcagtggttgtcttcagctggtcttggggctatgggatttggtttgccggctgctgctggtgcttctgtggcaaacccaggtgtcactgttgttgacatcgatggagatggtagctttctcatgaacgttcaggagctagctatgatccgaattgagaacctcccagtgaaggtctttgtgctaaacaaccagcacctggggatggtggtgcagttggaggacaggttctataaggccaacagagcgcacacatacttgggaaacccagagaatgaaagtgagatatatccagatttcgtgacgatcgccaaagggttcaacattccagcggtccgtgtgacaaagaagaacgaagtccgcgcagcgataaagaagatgctcgagactccagggccgtacctcttggatataatcgtcccacaccaggagcatgtgttgcctatgatccctagtggtggggctttcaaggatatgatcctggatggtgatggcaggactgtgtactgactagctagtcagttaacagatctgccagatcctcggtgtacaaataacccgtcttatcctatgagacgggccggcgtcagtgtgttctggaggaatttttatgtcagagcctttttctttgtgtgcttgatgtagatgccaagggaagcttattggctgttgaagcttgatgcaaaataaattatggaactctgttttttgtttatctaataataactagcaaatatgcttccattgcattgaaactaacagccttttgtgtttccaagttttattttgtgacaatgtcatctatttcaattagttgtggaatcggaaacttgcaggactaacttggaaactccaatccctcagcatcctggactttttcctggtgtaatccatgtagatattattttaatcatcattttagttctggaggtttttccatctccggttttgctcccctttcttcaaaaaaaaaaaaaaaatgccgtaggcgccgcaacgcccacctgttgttcaaactcatgggcacgagtggctcgaagattttatacaacaattgctgtagtttcaccgttgctggtgaagaagcatttttttaaaaaaatatagtggtattcattttaattagtttagttgtgcagcgagcaaaatttggacatgctctgctcggaatctgatcgacctagacacagattagcagcagtagctttgtcatctgttccaagagttgcgatctgatagaagaaaaaaaaaccttcccttcaatgtaaaaccgaaactaacaagaaagaagcacagtgccgtttaggcaagtatggagtacgtattaagcatgtagaaggccatgcatgaaccactaacaagaaagaagcgcagtgccattcaggcaagcataagcatgtagattggcatgcatgaacaactaacagtagatcgtctctggtctgattagaagttttttgggaagccaagaaatcatgtacaactggttccatctcaaattccgtggcaaaaagaggcctaagcaacatacctcgagtagatcacattcaagcttggtcacccggtccgtcaatattctgattccgatgacttcgtaggttcctagctcaagccgctcgtgtccaagcgtcacttacgattagctaatgattacggcatctaggaccgactagtggcgcgccgactagctagctaaggtaccgagctcgaattcattccgattaatcgtggcctcttgctcttcaggatgaagagctatgtttaaacgtgcaagcgctactagacaattcagtacattaaaaacgtccgcaatgtgttattaagttgtctaagcgtcaatttgtttacaccacaatatatcctgcca

SEQ ID NO: 62 - DNA, 21019 bp, Artificial sequence
  PHP96030
gtttacccgccaatatatcctgtcaaacactgatagtttaaactgaaggcgggaaacgacaatctgatcatgagcggagaattaagggagtcacgttatgacccccgccgatgacgcgggacaagccgttttacgtttggaactgacagaaccgcaacgttgaaggagccactcagcaagctggtacgattgtaatacgactcactatagggcgaattgagcgctgtttaaacgctcttcaactggaagagcggttacgctgtttaaacgctcttcaactggaagagcggttactaccggttcactagctagctgctaatcgagctagttaccctatgaggtgacatgaagcgctcacggttactatgacggttagcttcacgactgttggtggcagtagcgtacgacttagctatagttccggacttacccttaagcgatttaaatctgcggttaccgaattcgagctcggtacctagtacccttgtacttttggtttcacctgcatagagaaaacccacaagaatatgacagtctgatttgtcagtctcattctcaagcaacatttctctatccgttactttcatggtgaataacacaatccatcatcaatactttgtgttactcagaaactgaaagttattccgagtcttgcatatctttggacctactcgtttttctaccattattgctgattgttaagctctcgctacttgaatcggcattgttggagtgggaaggttcaaaaaattggagttatgactagttgtctctttctatgtacgatggagaaaatgaataaacaactgagaaaatggctcttgtttagttgatgatgctcttaagctttccactggttgccatatatgatttgggcatttcactttgatcttaatgggccttgtaaagcccaagactcatgattatctttagttgatgctcttaattaggtgtgggcaaataattcaaactgtatgtacccgaccaaaaccaaagcaaaaataatcgaaccaaaccgaaaatttaaaaataaccgaatgaaaactaaatcctataactgaaagaactgaaaccgaatcaaaatatttaatgtaaccaaaaatatccgaaatataattatattgtcaaaaatattaataatttctagattaaataattaaaaatacttaaaaatttatataaaatagtaaaaatactcgaaaataaccacaaatattcaaaaacaaccgaaatatcccaaaatattcaaagcaaaataaccgaatggataccaaattttaaaaccgaaaaaactggaacaaaaccaaaatcgaaccaaaatttcaaaaatcgaataaatactaaactttagaacaaaaaaaaacgataaccgaatgtatacgaaccaaagccgaattagataaccgaacgtccaggactactcttaatctttccgccacttatgatttgggctattactttgtttataatgagccttttcaagctcaagttcatgattgtccgtgagatgagaaactgacttgttggattcgaaaccctagctagtattggttaatacttaatacataaatgacctgcattgacatcatcatccaagaaaataaaaattgtatgcttgagatatttagttttcctagctaggttttctttattttagtaccgaatctttaggtgtgccacgttaatttagacccattttttcatacttaccaactgagtctagtttaatcatgactataatcgtataaaatgattcagtcgacgtcattgcgaacgtatataaaatcatccaaattgacgtcattccaaagaggtaagcatgcttatctaagagtccgagcatactaaacaagacgacattttatttgcactccaaatcaaattttgtattgcctaaagaaaaacaatcaaactcaagtttcttaaaattaatttcattcaaactaatcactttcaatatctcacatattattcatgccatttctatttgtctaaacatgatttaaaaaaaaaagtaaaatacaaagattactatgcaaaaactctataaaaaaaaattcaaatttcttatttatttgtgacatcaaattttcaaaataatttttttaattatcggttgatccggtcagtcgataaaaacataaactttcagcgaccgttaaaactttcctactaccgatttagagaaaatcttagcttgaaacgtaattgtaacctgccttcatgcaagtcgcaagatatgtcatcctaagttgtatatgttttctcaaaagatgtatttacttgagaaaatacgtttcaacgttgatggacaaccaattaagaatcaagcacctttcgtaatcaatttaggcttatcgtctaaggtatactgatttacgacagttgactagacttataaggaacaaaataatagaatagtttctaaacacttcacctaatcatagagactaagatggtaattcgtaaacgacaaagcctagtgacactgtccattgtaaaattccacatcatattagtattaaacatatacatgtagtttcctgaacacatgtagtatcaaacacacttcgtggcttcttcctcgaaacctgcggccgcgctatagttccggacttacccttaagataacttcgtatagcatacattatacgaagttatgggcccacgcgtgaagagcggttaccagagctggtcacctttgtccaccaagatggaactgtcttcggccagaatggccatctggattcagcaggcctagaaggccatttatcgctatcaactttgtatagaaaagttgggccgaattcgagctcggtacggccagaatggcccggaccgaagcttgcggccgcacactgatagtttaaactgaaggcgggaaacgacaatctgatcatgagcggagaattaagggagtcacgttatgacccccgccgatgacgcgggacaagccgttttacgtttggaactgacagaaccgcaacgttgaaggagccactcagccgcgggtttctggagtttaatgagctaagcacatacgtcagaaaccattattgcgcgttcaaaagtcgcctaaggtcactatcagctagcaaatatttcttgtcaaaaatgctccactgacgttccataaattcccctcggtatccaattagagtctcatattcactctcccgggggatctcgactctagaggatcgctcaggaaggccgctgagatagaggcatggcggccaatgcgggcggcggtggagcgggaggaggcagcggcagcggcagcgtggctgcgccggcggtgtgccgccccagcggctcgcggtggacgccgacgccggagcagatcaggatgctgaaggagctctactacggctgcggcatccggtcgcccagctcggagcagatccagcgcatcaccgccatgctgcggcagcacggcaagatcgagggcaagaacgtcttctactggttccagaaccacaaggcccgcgagcgccagaagcgccgcctcaccagcctcgacgtcaacgtgcccgccgccggcgcggccgacgccaccaccagccaactcggcgtcctctcgctgtcgtcgccgccgccttcaggcgcggcgcctccctcgcccaccctcggcttctacgccgccggcaatggcggcggatcggctgtgctgctggacacgagttccgactggggcagcagcggcgctgccatggccaccgagacatgcttcctgcaggactacatgggcgtgacggacacgggcagctcgtcgcagtggccacgcttctcgtcgtcggacacgataatggcggcggccgcggcgcgggcggcgacgacgcgggcgcccgagacgctccctctcttcccgacctgcggcgacgacggcggcagcggtagcagcagctacttgccgttctggggtgccgcgtccacaactgccggcgccacttcttccgttgcgatccagcagcaacaccagctgcaggagcagtacagcttttacagcaacagcaacagcacccagctggccggcaccggcaaccaagacgtatcggcaacagcagcagcagccgccgccctggagctgagcctcagctcatggtgctccccttaccctgctgcagggagtatgtgagagcaacgcgagctgccactgctcttcactgatgtctctggaatggaaggaggaggaagtgagcatagcgttggtgcgttgctgtcaagggcgaattcacatggttaacctagacttgtccatcttctggattggccaacttaattaatgtatgaaataaaaggatgcacacatagtgacatgctaatcactataatgtgggcatcaaagttgtgtgttatgtgtaattactagttatctgaataaaagagaaagagatcatccatatttcttatcctaaatgaatgtcacgtgtctttataattctttgatgaaccagatgcatttcattaaccaaatccatatacatataaatattaatcatatataattaatatcaattgggttagcaaaacaaatctagtctaggtgtgttttgcgaatgcggccgccaccgcggtggagctcgaattccggtccgggcctagaaggccagcttcaagtttgtacaaaaaagcaggctccggccagagttacccggaccgaagcttgcatgcctgcagtgcagcgtgacccggtcgtgcccctctctagagataatgagcattgcatgtctaagttataaaaaattaccacatattttttttgtcacacttgtttgaagtgcagtttatctatctttatacatatatttaaactttactctacgaataatataatctatagtactacaataatatcagtgttttagagaatcatataaatgaacagttagacatggtctaaaggacaattgagtattttgacaacaggactctacagttttatctttttagtgtgcatgtgttctcctttttttttgcaaatagcttcacctatataatacttcatccattttattagtacatccatttagggtttagggttaatggtttttatagactaatttttttagtacatctattttattctattttagcctctaaattaagaaaactaaaactctattttagtttttttatttaataatttagatataaaatagaataaaataaagtgactaaaaattaaacaaataccctttaagaaattaaaaaaactaaggaaacatttttcttgtttcgagtagataatgccagcctgttaaacgccgtcgacgagtctaacggacaccaaccagcgaaccagcagcgtcgcgtcgggccaagcgaagcagacggcacggcatctctgtcgctgcctctggacccctctcgagagttccgctccaccgttggacttgctccgctgtcggcatccagaaattgcgtggcggagcggcagacgtgagccggcacggcaggcggcctcctcctcctctcacggcaccggcagctacgggggattcctttcccaccgctccttcgctttcccttcctcgcccgccgtaataaatagacaccccctccacaccctctttccccaacctcgtgttgttcggagcgcacacacacacaaccagatctcccccaaatccacccgtcggcacctccgcttcaaggtacgccgctcgtcctcccccccccccctctctaccttctctagatcggcgttccggtccatgcatggttagggcccggtagttctacttctgttcatgtttgtgttagatccgtgtttgtgttagatccgtgctgctagcgttcgtacacggatgcgacctgtacgtcagacacgttctgattgctaacttgccagtgtttctctttggggaatcctgggatggctctagccgttccgcagacgggatcgatttcatgattttttttgtttcgttgcatagggtttggtttgcccttttcctttatttcaatatatgccgtgcacttgtttgtcgggtcatcttttcatgcttttttttgtcttggttgtgatgatgtggtctggttgggcggtcgttctagatcggagtagaattctgtttcaaactacctggtggatttattaattttggatctgtatgtgtgtgccatacatattcatagttacgaattgaagatgatggatggaaatatcgatctaggataggtatacatgttgatgcgggttttactgatgcatatacagagatgctttttgttcgcttggttgtgatgatgtggtgtggttgggcggtcgttcattcgttctagatcggagtagaatactgtttcaaactacctggtgtatttattaattttggaactgtatgtgtgtgtcatacatcttcatagttacgagtttaagatggatggaaatatcgatctaggataggtatacatgttgatgtgggttttactgatgcatatacatgatggcatatgcagcatctattcatatgctctaaccttgagtacctatctattataataaacaagtatgttttataattattttgatcttgatatacttggatgatggcatatgcagcagctatatgtggatttttttagccctgccttcatacgctatttatttgcttggtactgtttcttttgtcgatgctcaccctgttgtttggtgttacttctgcaggtcgactttaacttagcctaggatgattcacattgtggatcatgttgatttagatgcttggagtgtgcctgaggtccttagaccactttatgaatccccgaagattcttgcacagaaaacaactattgctgcactgcgtcacattaggcaaattgcgcatgaatctagtggggaaatgccctatggagggggccgacagccagcagttttgagaacatttagccagaggcttagcaggggtttcaatgatgctgtcaatgggtttccagatgacggttggtcactgatgagcagtgacggtgctgaggatgttactattgctatcaactcttctccaaacaaacttattggtcctcatgtcaactcttcccagctgtttactgcgatcggaggtggcatcctgtgtgctaaggcatcaatgctgcttcagaatgtgccacctgccctactagtacgatttctgagggagcatcgctccgaatgggctgatcctggtgttgatgcttattctgccgctgctcttagggctagtccatatgcagttcctggcttgcgtgctagtgggtttatgggcagccaggttattctgccgcttgcacataccttagagcacgaagagttcttggaggttattaggcttgagggacacagcctctgccatgacgaagttgttctgtcacgagatatgtatcttctgcagttgtgcagtggtgtggatgaaaatgcagctggtgcatgtgcacagcttgtgtttgcacccatcgatgaatcttttgccgacgatgcgccactgctaccctcaggcttccgtgtcattccactggatgcaaagacggatccaccatcaggcacacgcacacttgacctcgcatctaccctcgaggttggatctggtgggacaacgcgtgcttcgagtgacgcctccagcacctgcaacacaagatcagtgctgaccattgctttccagttctcatatgagaatcacctacgagagagcgtcgcagccatggccaggcaatacgtcaggactgtggtggcgtcggtgcagagggtagccatggcaatagctccttcgcgcattggtggacagcttgaaatgaagcaaactccaggatctcctgaggcacacacgctggcaaggtggatcggcaggagctacaggttccacactggagccgaactcctccgcacggacacccaatgcacggatgcttccttgaaagcgctgtggcaacactcggactcgatcatgtgctgttccctgaaggctgctcccgtgttcacctttgccaaccaagccggcctggacatgctggagacgacgctgattgcgctccaggacatctcccttgagaagatccttgatgacgatggcaggaaggcgctctgcaccgagtaccctaagattatgcaacagggcttcgcgtacctccccggtggcgtgtgtgtgtcgagcatggggcggccggtgtcgtacgagcaggcggtggcgtggaaggtcctgagcgacgacgacaccccgcactgccttgccttcatgttcgtgaactggtccttcgtgtgaggtaccgttaacagatctactaactatctatactgtaataatgttgtatagccgccggatagctagctagtttagtcattcagcggcgatgggtaataataaagtgtcatccatccatcaccatgcgtggcaacgtgagcaatgacctgattgaacaaattgaaatgaaaagaagaaatatgttatatgtcaacgagatttcctcataatgccactgacgacgtgtgtccaagaaatgtatcagtgatacgtatattcacaatttttttatgacttatactcacaatttgtttttttactacttatactcacaatttgttgtgcgtaccataacaatttcgatcgaatatatatcagaaagttgacgaaagtaagctcactcaaaaagttaaatgggctgcggaagctgcgtcaggcccaagttttggctattctatccggtatccacgattttgatggctgagggacatatgttcgcttaagcttcggtccgggcctagaaggccgatctcccgggcacccagctttcttgtacaaagtggccgttaacggatcggccagaatggcccggaccgggttaccgaattcgagctcggtaccctggttcacaaactcaatacaacacacagtggagtagggtattacgctccggcggcccgaaccactctaaatccttgtgtcctcgtgtgctcttccaccattaatgactgtaattgcagggacacgaagagttgtagcgcttttgccaacaagatccgctatatgctagtagagtggaacctgcacagcaacaagcatccaataatctgagaataagaattatgtgtggtgatggttctcatctctgcaactcgccattttcgcgagagaaccaaatccaagttggtgaagatcatgatttgggctcatgggctggcatagtagctattacctttgcaattgtggttcgaatctatccgatattctccttttcagggagagctaatgcttatgcttattgggtattttggtttgacactgcttcacgcccaaaaaaaggcaactatgtctgagttggatatggcccaaaaaaaggcagctatgtctgagttggatatggaagtcttctttcgtttagggtgaagtaagaccaagctcatgagcttattatcttaggtcggaacaaattagttgataggcatggcacatttatcaaattataatgattttaacagaaaagcaacacctctttttcagcagcaccagctttgcaagctgcaattgacactccaagcatagtatttgctccaaactcagcctgcatttcgcacaatatcatatctatttccatttggataaaatatattttccagaaatatgggaacagaatcaagatacagaaaaaagttgtggtagtagtggtaagtggaaacacaagtacagtgaaaagatagcattatttctgaacagtcaaattaaccgaaataagtagtatcacatactgcccctaaattgactacacccaatgtaaagaattgcttgagcatattgagccatcagttgtttgtttgtgtaacggatttgacaatgcagagttcaggagcaaaaaaccgcaaaggagagaaagagggaaaggatctcctagtatcccaccttgtggcgcgccctgtcaagtgcatgatggcctggtcgatctgcgtctgctgctgcggttccatcccaacgagtgcctccgacaccttgtcgttgatcacccgcaccgcgtaggcgacccccctggcgaggaacttccgcctctcggaggccccggccgcgtcggcggcggcgccctcgagcgcgcccacgctagccgtagatgctcggtgcacggccttgttggtgtgcaactcgacctcaacggccggtgcgctacgcccgtcaaggatctggcgcgcccgcaccctcgtgatcacggtgggcgcctcccgcctcatgtggccgacgatgaaaagcgccgggttaggggccttggcgcgcaccgccgtattcagggcctcctcgctcttgcgcgagagcaggtgcttccccaggtactcctgcactgacaaggctgccacagcggtggaatttgtcctcacgacttcgccacgtcgtcctcacctccctggcttcccacgactccgccgtatcgaggtgctcggtgggtcgtcttaatccgaagtccgaactaggaagacgagacagagaggtctgaggaatgggcctcgtttgatgttgagctgaattatttttccagcataagcccaggtcttggtccatgaacaaaattactagaaacccagcccagtactacgatctaaaagagggactgccactggatagctctctctagcattctccacgctccaatacagcggcgtcgtgtctatccgggtctatccgcgaacacgtgagaactctccagaaactgctttctcctccacttcatctctctcgctttccctctataaaaagaccccttctaggaattgagggagacagcaagcaccaagcagcgatccgaagctcaatcaattcactcaaacctcttccccaaatcttcgattagatcttcgttgacaagaagactagaaccgaacctgacatgtccaacctgctcacggttcaccagaaccttccggctcttccagtggacgcgacgtccgatgaagtcaggaagaacctcatggacatgttccgcgacaggcaagcgttcagcgagcacacctggaagatgctgctctccgtctgccgctcctgggctgcatggtgcaagctgaacaacaggaagtggttccccgctgagcccgaggacgtgagggattaccttctgtacctgcaagcgcgaggtttgtttctgcttctacctttgatatatatataataattatcattaattagtagtaatataatatttcaaatatttttttcaaaataaaagaatgtagtatatagcaattgcttttctgtagtttataagtgtgtatattttaatttataacttttctaatatatgaccaaaacatggtgatgcctaggtctggcagtgaagaccatccagcaacaccttggacaactgaacatgcttcacaggcgctccggcctcccgcgccccagcgactcgaacgccgtgagcctcgtcatgcgccgcatcaggaaggaaaacgtcgatgccggcgaaagggcaaagcaggccctcgcgttcgagaggaccgatttcgaccaggtccgcagcctgatggagaacagcgacaggtgccaggacattaggaacctggcgttcctcggaattgcatacaacacgctcctcaggatcgcggaaattgcccgcattcgcgtgaaggacattagccgcaccgacggcggcaggatgcttatccacattggcaggaccaagacgctcgtttccaccgcaggcgtcgaaaaggccctcagcctcggagtgaccaagctcgtcgaacgctggatctccgtgtccggcgtcgcggacgacccaaacaactacctcttctgccgcgtccgcaagaacggggtggctgcccctagcgccaccagccaactcagcacgagggccttggaaggtattttcgaggccacccaccgcctgatctacggcgcgaaggatgacagcggtcaacgctacctcgcatggtccgggcactccgcccgcgttggagctgctagggacatggcccgcgccggtgtttccatccccgaaatcatgcaggcgggtggatggacgaacgtgaacattgtcatgaactacattcgcaaccttgacagcgagacgggcgcaatggttcgcctcctggaagatggtgactgaggtacccaacctagacttgtccatcttctggattggccaacttaattaatgtatgaaataaaaggatgcacacatagtgacatgctaatcactataatgtgggcatcaaagttgtgtgttatgtgtaattactagttatctgaataaaagagaaagagatcatccatatttcttatcctaaatgaatgtcacgtgtctttataattctttgatgaaccagatgcatttcattaaccaaatccatatacatataaatattaatcatatataattaatatcaattgggttagcaaaacaaatctagtctaggtgtgttttgcgatccgatatcgaattggccacggtaccagctgctgctgttctagggttcacaagtctgcctatttgtcttccccaatggagctatggttgtctggtctggtccttggtcgtgtcccgtttcattgtgtactatttacctgtaatgtgtatccttaagtctggtttgatggtgtctgaaacgttttgctgtggtagagcagcatggaagaactataatgaataagtgatccctaatcattgtgtccaaattttgcttctgctatacccttttgtgctgtttcttatgttttgcttaaaaatttgatctgacaaacaaatttgtctaaattatgctcttgttctgactgtgtactgtacacatttgtattgctaccggtttggcacatagttttctctttgattgcagatcaaacccttctgattgcagattgcttggctatggctgatgtgctcactgttcttctttagcttgtatattgctgatggtggcttggctacggctgaaaaagttgctgctgcgccgacttggcaactgttgctccagtaatgctttgtcctctcttcctagccgccgacttggcacttggcagctgttgctcctgtaatgcgttgttatctcttatctcttgagatgtactatgattttgaggctgtttgacttgtgccagattgccagtgctgatgctatattatctcaggtttttatgctagtatatgttttactgtgtgctgcctgtgtcgagttacgtaatctattgaaccgctatgcgtgttgatgccctgttgttgcttgccagattgatgcccctgttgcttgcagcttgcaagctgtagtgaaatcctaaaattccaaaccaaatctattctgaacttttgaagatctgtgatgtccggaagaaaagattcaaacagataaacgggactctccagaatctataaaataaatgatcgacaaacgctttgctttggtaggcttcaagcttggtcacccggtccgggcctagaaggccagcttcggccgccccgggcaactttattatacaaagttgatagataaatcagatatctggttcctaaggacccggcggaccgattaaactgattcggtccgacgcgttacctaataacttcgtatagcatacattatacgaagttattagctaactaactagtaagcttaagccatgggtcgacggatccgttaactagcgtggcatttggcaccgccgcacactatgcgagctaggagtgctagtttacagatgaaactatgaaaccaagaaaacacaattgtccgtagctagcgcgtggcgtcgtgtcaagcttcacacagtatcttcgttcttcactataaatcgcgcctgttgttcgtgagacccaccaccgtggataacagtcccctaataataagcgatcaacagcactgctgatggctgaacaccgaggcgccgccgcgcgtaaccatccgccggagcagcccgtcgtgccggcgaacgacgccttccccgaccgcgcccagcagctctgcctcgacgccgggcgcgcgctcgcgatgtgcggcgtgctcgtcgccgtccctcccgcattttacgcgtcgacgtcgcggacgacaccgcacttgccttcgtcggcttcgtcctctggatcatcggtgcgtggctgtgcctcctggcgctcacgcccttggctccacgggcggtgagggcgggcggggccgccgccagcaccttgctgatcaggtgcctgtccctttcatgaactactagcgcccgcgcccgcggccgccgggcacaagagaacacatcgatgttcgctgcgtacgtcagcaataaggcactctttgtcagtagtcgagtgcatatgttgggtgtttgccctgggagatttcaagtgttgtggccattatcccgcaggataaaaaatcggcggcttttggattgatacggaaaataacgatgtttcatgctcgtgttgtgtgtgtgacatcttgtcagccaagtttttaaccgttgctactccccctctgtgggctcagtgtgtggaccggaatacgtcgtacataggccgtagcctaagcccaatatgccgtttttcaggttggcctgtgtgacgacaagcgggtctcaaaagcccatcacgcaactggcctgcaattattggaggagagcgcgtcgagttggttccagaggctgcgtggtggggccggactctgcgacgacctctcgttcgcgtccgatttggttgccgtgagccgtgacgtaacgcctccttccgttcctccctatataagttccacccccgggtccggtttccccaagccccagtgacccccgatcccgatcgcgaaatctccgcacccgccggcaagggaccgaagcaagcctctctcccgaccgtcgcatcaaggtacgcgtccgctcgatctgtcctcttccttctcgatttgacttgctgtggtgcccgatcacgggatcagaatcgcaccagtgtagatttcgcatgttctaagatgtgttagtttccaggctaatccagttctcttgacgcccgatccgatcgagctccgtgtttatttcagcctaatcgtagtattcccctaaaatttcctcattagggggttcgcaagattgttggtcgacaggttcacttatgctcgatcgcttacttttagtcgattcatgctgcgtactattgttgccccccgtggttttatcttttctcgtgtgaaatccagtagatatagtagatatcgtagcattaggttttaattcaatcgattgattattgtatcatcaaaattgagaagttcgaatcatgcctatcatgctgcctcaaccgaaatcctgtatattgaagtttcaattcaattgattgatcattcattagattcaaccaaaatctagaaggttagatgacgcatgtcatgctgcctgcgtagtttacctttgatctgtttatgattaccttatcagtaggatatttgtgattttgggaagtagcactaactgattcatgctgacatgatgttccctttcagattatactgttgagtcctatctaattgatgctttgtatgctatatgaatacgtcatggtaaattagcagttaattagcatattagcaattgggcgtacctcatcaggattgctcttgtagatgtgtgtggtgatgtttcttgttcaattcatgttctgctttaaaagtatgtgttctctgtttgttaattaagattcatggttataatgatttggacctaattaatcagggttgcccttttagatgcgtggttacttgttgagttcatttttttcctgctatagttgtatgcgtttgttcattcatggttagatttgatttgtttcttctctattccatgccttccatatacttcaattgtagcttaacatgagatttctgtatatgcaggtcgaccgccggggatccacacgacaccatggcccagtccaagcacggcctgaccaaggagatgaccatgaagtaccgcatggagggctgcgtggacggccacaagttcgtgatcaccggcgagggcatcggctaccccttcaagggcaagcaggccatcaacctgtgcgtggtggagggcggccccttgcccttcgccgaggacatcttgtccgccgccttcatgtacggcaaccgcgtgttcaccgagtacccccaggacatcgtcgactacttcaagaactcctgccccgccggctacacctgggaccgctccttcctgttcgaggacggcgccgtgtgcatctgcaacgccgacatcaccgtgagcgtggaggagaactgcatgtaccacgagtccaagttctacggcgtgaacttccccgccgacggccccgtgatgaagaagatgaccgacaactgggagccctcctgcgagaagatcatccccgtgcccaagcagggcatcttgaagggcgacgtgagcatgtacctgctgctgaaggacggtggccgcttgcgctgccagttcgacaccgtgtacaaggccaagtccgtgccccgcaagatgcccgactggcacttcatccagcacaagctgacccgcgaggaccgcagcgacgccaagaaccagaagtggcacctgaccgagcacgccatcgcctccggctccgccttgccctccggactcagatctcgatagagtcaacctagacttgtccatcttctggattggccaacttaattaatgtatgaaataaaaggatgcacacatagtgacatgctaatcactataatgtgggcatcaaagttgtgtgttatgtgtaattactagttatctgaataaaagagaaagagatcatccatatttcttatcctaaatgaatgtcacgtgtctttataattctttgatgaaccagatgcatttcattaaccaaatccatatacatataaatattaatcatatataattaatatcaattgggttagcaaaacaaatctagtctaggtgtgttttgcgaattgcggcgcccttactttaacgcctctaaccaacacccctttatctttataaggaacaataaacagaatttgccccactgttctaaatcacctaataatatccccagctaaaaacaataaaggtttcctagaattaagacaagcatgactgttcctccaggagggtttggaacattgttgcagtcttgcagatacgggcgaagggtgagaaacagagcggagggctggaggtgacctcggtagtcgacgccggagttgagcttgacaacgacggggcggcccctgatggacttgaggaagtccgatggcgtcttcaccgtcccgccggcgcccgaggcgggcctgtcgctgccgccgccgccgctgctcatcttgcgcgctgtgcccccggcggtgtccctgtgttgcggatcgcgggtgggccaggtggatgcgagggcgacccgtttggactccggccggagccgccggatccctggtcggtgtcagtgccgtttactctgggccccacgtgtcagtaccgtctgtagatgacaacaacccgtcgtccacagtcatgtccaaaatatcctttcttcttttttttcgattcggatatctatcttccttttttttttccaaaaatcttcttgacgcaccagcgcgcacgtttgtggtaaacgccgacacgtcggtcccacgtcgatagaccccacccaccagtgagtagcgtgtacgtattcgggggtgacggacgtgtcgccgtcgtcttgctagtcccattcccatctgagccacacatctctgaacaaaaaaaaggagggaggcctccacgcacatccccctccgtgccacccgccccaaaccctcgcgccgcctccgagacagccgccgcaaccatggccaccgccgccgccgcgtctaccgcgctcactggcgccactaccgctgcgcccaaggcgaggcgccgggcgcacctcctggccacccgccgcgccctcgccgcgcccatcaggtgctcagcggcgtcacccgccatgccgatggctcccccggccaccccgctccggccgtggggccccaccgagccccgcaagggtgctgacatcctcgtcgagtccctcgagcgctgcggcgtccgcgacgtcttcgcctaccccggcggcgcgtccatggagatccaccaggcactcacccgctcccccgtcatcgccaaccacctcttccgccacgagcaaggggaggcctttgccgcctccggctacgcgcgctcctcgggccgcgtcggcgtctgcatcgccacctccggccccggcgccaccaacctagtctccgcgctcgccgacgcgctgctcgattccgtccccatggtcgccatcacgggacaggtggcgcgacgcatgattggcaccgacgccttccaggagacgcccatcgtcgaggtcacccgctccatcaccaagcacaactacctggtcctcgacgtcgacgacatcccccgcgtcgtgcaggaggctttcttcctcgcctcctctggtcgaccagggccggtgcttgtcgacatccccaaggacatccagcagcagatggcggtgcctgtctgggacaagcccatgagtctgcctgggtacattgcgcgccttcccaagccccctgcgactgagttgcttgagcaggtgctgcgtcttgttggtgaatcgcggcgccctgttctttatgtgggcggtggctgcgcagcatctggtgaggagttgcgacgctttgtggagctgactggaatcccggtcacaactactcttatgggcctcggcaacttccccagcgacgacccactgtctctgcgcatgctaggtatgcatgggacggtgtatgcaaattatgcagtggataaggccgatctgttgcttgcacttggtgtgcggtttgatgatcgcgtgacagggaagattgaggcttttgcaagcagggctaagattgtgcacgttgatattgatccggctgagattggcaagaacaagcagccacatgtgtccatctgtgcagatgttaagcttgctttgcagggcatgaatgctcttcttgaaggaagcacatcaaagaagagctttgactttggctcatggaacgatgagttggatcagcagaagagggaattcccccttgggtataaaacatctaatgaggagatccagccacaatatgctattcaggttcttgatgagctgacgaaaggcgaggccatcatcggcacaggtgttgggcagcaccagatgtgggcggcacagtactacacttacaagcggccaaggcagtggttgtcttcagctggtcttggggctatgggatttggtttgccggctgctgctggtgcttctgtggcaaacccaggtgtcactgttgttgacatcgatggagatggtagctttctcatgaacgttcaggagctagctatgatccgaattgagaacctcccagtgaaggtctttgtgctaaacaaccagcacctggggatggtggtgcagttggaggacaggttctataaggccaacagagcgcacacatacttgggaaacccagagaatgaaagtgagatatatccagatttcgtgacgatcgccaaagggttcaacattccagcggtccgtgtgacaaagaagaacgaagtccgcgcagcgataaagaagatgctcgagactccagggccgtacctcttggatataatcgtcccacaccaggagcatgtgttgcctatgatccctagtggtggggctttcaaggatatgatcctggatggtgatggcaggactgtgtactgactagctagtcagttaacagatctgccagatcctcggtgtacaaataacccgtcttatcctatgagacgggccggcgtcagtgtgttctggaggaatttttatgtcagagcctttttctttgtgtgcttgatgtagatgccaagggaagcttattggctgttgaagcttgatgcaaaataaattatggaactctgttttttgtttatctaataataactagcaaatatgcttccattgcattgaaactaacagccttttgtgtttccaagttttattttgtgacaatgtcatctatttcaattagttgtggaatcggaaacttgcaggactaacttggaaactccaatccctcagcatcctggactttttcctggtgtaatccatgtagatattattttaatcatcattttagttctggaggtttttccatctccggttttgctcccctttcttcaaaaaaaaaaaaaaaatgccgtaggcgccgcaacgcccacctgttgttcaaactcatgggcacgagtggctcgaagattttatacaacaattgctgtagtttcaccgttgctggtgaagaagcatttttttaaaaaaatatagtggtattcattttaattagtttagttgtgcagcgagcaaaatttggacatgctctgctcggaatctgatcgacctagacacagattagcagcagtagctttgtcatctgttccaagagttgcgatctgatagaagaaaaaaaaaccttcccttcaatgtaaaaccgaaactaacaagaaagaagcacagtgccgtttaggcaagtatggagtacgtattaagcatgtagaaggccatgcatgaaccactaacaagaaagaagcgcagtgccattcaggcaagcataagcatgtagattggcatgcatgaacaactaacagtagatcgtctctggtctgattagaagttttttgggaagccaagaaatcatgtacaactggttccatctcaaattccgtggcaaaaagaggcctaagcaacatacctcgagtagatcacattcaagcttggtcacccggtccgtcaatattctgattccgatgacttcgtaggttcctagctcaagccgctcgtgtccaagcgtcacttacgattagctaatgattacggcatctaggaccgactagtggcgcgccgactagctagctaaggtaccgagctcgaattcattccgattaatcgtggcctcttgctcttcaggatgaagagctatgtttaaacgtgcaagcgctactagacaattcagtacattaaaaacgtccgcaatgtgttattaagttgtctaagcgtcaatttgtttacaccacaatatatcctgcca

SEQ ID NO: 63 - DNA, 23075 bp, Artificial sequence
  PHP96031
gtttacccgccaatatatcctgtcaaacactgatagtttaaactgaaggcgggaaacgacaatctgatcatgagcggagaattaagggagtcacgttatgacccccgccgatgacgcgggacaagccgttttacgtttggaactgacagaaccgcaacgttgaaggagccactcagcaagctggtacgattgtaatacgactcactatagggcgaattgagcgctgtttaaacgctcttcaactggaagagcggttacgctgtttaaacgctcttcaactggaagagcggttactaccggttcactagctagctgctaatcgagctagttaccctatgaggtgacatgaagcgctcacggttactatgacggttagcttcacgactgttggtggcagtagcgtacgacttagctatagttccggacttacccttaagcgatttaaatctgcggttaccgaattcgagctcggtacctagtacccttgtacttttggtttcacctgcatagagaaaacccacaagaatatgacagtctgatttgtcagtctcattctcaagcaacatttctctatccgttactttcatggtgaataacacaatccatcatcaatactttgtgttactcagaaactgaaagttattccgagtcttgcatatctttggacctactcgtttttctaccattattgctgattgttaagctctcgctacttgaatcggcattgttggagtgggaaggttcaaaaaattggagttatgactagttgtctctttctatgtacgatggagaaaatgaataaacaactgagaaaatggctcttgtttagttgatgatgctcttaagctttccactggttgccatatatgatttgggcatttcactttgatcttaatgggccttgtaaagcccaagactcatgattatctttagttgatgctcttaattaggtgtgggcaaataattcaaactgtatgtacccgaccaaaaccaaagcaaaaataatcgaaccaaaccgaaaatttaaaaataaccgaatgaaaactaaatcctataactgaaagaactgaaaccgaatcaaaatatttaatgtaaccaaaaatatccgaaatataattatattgtcaaaaatattaataatttctagattaaataattaaaaatacttaaaaatttatataaaatagtaaaaatactcgaaaataaccacaaatattcaaaaacaaccgaaatatcccaaaatattcaaagcaaaataaccgaatggataccaaattttaaaaccgaaaaaactggaacaaaaccaaaatcgaaccaaaatttcaaaaatcgaataaatactaaactttagaacaaaaaaaaacgataaccgaatgtatacgaaccaaagccgaattagataaccgaacgtccaggactactcttaatctttccgccacttatgatttgggctattactttgtttataatgagccttttcaagctcaagttcatgattgtccgtgagatgagaaactgacttgttggattcgaaaccctagctagtattggttaatacttaatacataaatgacctgcattgacatcatcatccaagaaaataaaaattgtatgcttgagatatttagttttcctagctaggttttctttattttagtaccgaatctttaggtgtgccacgttaatttagacccattttttcatacttaccaactgagtctagtttaatcatgactataatcgtataaaatgattcagtcgacgtcattgcgaacgtatataaaatcatccaaattgacgtcattccaaagaggtaagcatgcttatctaagagtccgagcatactaaacaagacgacattttatttgcactccaaatcaaattttgtattgcctaaagaaaaacaatcaaactcaagtttcttaaaattaatttcattcaaactaatcactttcaatatctcacatattattcatgccatttctatttgtctaaacatgatttaaaaaaaaaagtaaaatacaaagattactatgcaaaaactctataaaaaaaaattcaaatttcttatttatttgtgacatcaaattttcaaaataatttttttaattatcggttgatccggtcagtcgataaaaacataaactttcagcgaccgttaaaactttcctactaccgatttagagaaaatcttagcttgaaacgtaattgtaacctgccttcatgcaagtcgcaagatatgtcatcctaagttgtatatgttttctcaaaagatgtatttacttgagaaaatacgtttcaacgttgatggacaaccaattaagaatcaagcacctttcgtaatcaatttaggcttatcgtctaaggtatactgatttacgacagttgactagacttataaggaacaaaataatagaatagtttctaaacacttcacctaatcatagagactaagatggtaattcgtaaacgacaaagcctagtgacactgtccattgtaaaattccacatcatattagtattaaacatatacatgtagtttcctgaacacatgtagtatcaaacacacttcgtggcttcttcctcgaaacctgcggccgcgctatagttccggacttacccttaagataacttcgtatagcatacattatacgaagttatgggcccacgcgtgaagagcggttaccagagctggtcacctttgtccaccaagatggaactgtcttcggccagaatggccatctggattcagcaggcctagaaggccatttatcgctatcaactttgtatagaaaagttgggccgaattcgagctcggtacggccagaatggcccggaccgaagcttcggccgcacactgatagtttaaaccctggtaattattggctgtaggattctaaacagagcctaaatagctggaatagctctagccctcaatccaaactaatgatatctatacttatgcaactctaaatttttattctaaaagtaatatttcatttttgtcaacgagattctctactctattccacaatcttttgaagctatatttaccttaaatctgtactctataccaataatcatatattctattatttatttttatctctctcctaaggagcatccctctatgtctgcatggcccccgcctcgggtcccaatctcttgctctgctagtagcacagaagaaaacactagaaatgacttgcttgacttagagtatcagataaacatcatgtttacttaactttaatttgtatcggtttctactatttttataatatttttgtctctatagatactacgtgcaacagtataatcaacctagtttaatccagagcgaaggattttttactaagtacgtgactccatatgcacagcgttccttttatggttcctcactgggcacagcataaacgaaccctgtccaatgttttcagcgcgaacaaacagaaattccatcagcgaacaaacaacatacatgcgagatgaaaataaataataaaaaaagctccgtctcgataggccggcacgaatcgagagcctccatagccagttttttccatcggaacggcggttcgcgcacctaattatatgcaccacacgcctataaagccaaccaacccgtcggaggggcgcaagccagacagaagacagcccgtcagcccctctcgtttttcatccgccttcgcctccaaccgcgtgcgctccacgcctcctccaggaaagcgagaggtgagcgcagtcccctttcccctccttccaattcaattcgtcttctcgttcgcagccctaggatttgggggtctggaggggtttgatcgtttctcgccgtgaatctgctttggtgtaaaccaacggatctcggatcgtagtcttcagaagatcccggattttgcggtttggcccctcctggattcaattcgtcgtatcgttcgcagccctaggatttggggatctggaggggtttgatcgtttctcgccgcgaatctgctctggtgtaaaccaacggatctcgggtcgtagtcttcagaaggtcccggattttgcggtttggcccctcctggattcaattcgtcgtatcgttcgcagccctaggatttggggatctggaggggtttgatcctttctcgccgcgaatctgctctggtataaccaacggatctcgggtcgtagtcttcagaaggtcccggattttgcggtttggtggttcttgctctatgaatcagagggatggttcttcccggatttatgccttgcggccactctgtcgaatcatggggtttcgacccgattcgtaggcgtgctccctgttttggatgggaagtaggcgtgtttgtagtattcgtgcttcgattcgtcaacggagattagaagacctgggatgggatttgaggaaatctaggtatctgtctagcacgtttctagatctattcttcagctgttatatgagagtaattttggaaccctggtggggtatgtttgaccgagtattctgtagattattgtccgtgacttgctggctgttaccgtccttatctctgcatcatctatctgtgctagtttctgcgtgcttctcaaatatttccggcctgtgtagcatgtgactgataatatgattttggcagcttctgcataagaacaacaaatcaaaagcttgatcagctcggtgcctacaaaacctcaacaaccaagtttcccgggggatctcgactctagaggatcgctcaggaaggccgctgagatagaggcatggcggccaatgcgggcggcggtggagcgggaggaggcagcggcagcggcagcgtggctgcgccggcggtgtgccgccccagcggctcgcggtggacgccgacgccggagcagatcaggatgctgaaggagctctactacggctgcggcatccggtcgcccagctcggagcagatccagcgcatcaccgccatgctgcggcagcacggcaagatcgagggcaagaacgtcttctactggttccagaaccacaaggcccgcgagcgccagaagcgccgcctcaccagcctcgacgtcaacgtgcccgccgccggcgcggccgacgccaccaccagccaactcggcgtcctctcgctgtcgtcgccgccgccttcaggcgcggcgcctccctcgcccaccctcggcttctacgccgccggcaatggcggcggatcggctgtgctgctggacacgagttccgactggggcagcagcggcgctgccatggccaccgagacatgcttcctgcaggactacatgggcgtgacggacacgggcagctcgtcgcagtggccacgcttctcgtcgtcggacacgataatggcggcggccgcggcgcgggcggcgacgacgcgggcgcccgagacgctccctctcttcccgacctgcggcgacgacggcggcagcggtagcagcagctacttgccgttctggggtgccgcgtccacaactgccggcgccacttcttccgttgcgatccagcagcaacaccagctgcaggagcagtacagcttttacagcaacagcaacagcacccagctggccggcaccggcaaccaagacgtatcggcaacagcagcagcagccgccgccctggagctgagcctcagctcatggtgctccccttaccctgctgcagggagtatgtgagagcaacgcgagctgccactgctcttcactgatgtctctggaatggaaggaggaggaagtgagcatagcgttggtgcgttgctgtcaagggcgaattcacatggttaacctagacttgtccatcttctggattggccaacttaattaatgtatgaaataaaaggatgcacacatagtgacatgctaatcactataatgtgggcatcaaagttgtgtgttatgtgtaattactagttatctgaataaaagagaaagagatcatccatatttcttatcctaaatgaatgtcacgtgtctttataattctttgatgaaccagatgcatttcattaaccaaatccatatacatataaatattaatcatatataattaatatcaattgggttagcaaaacaaatctagtctaggtgtgttttgcgaatgcggccgccaccgcggtggagctcgaattccggtccgggcctagaaggccagcttcaagtttgtacaaaaaagcaggctccggccagaatggcccggaccgggttaccgaattcgagctcggtaccatttaaattgcgcccgccacggccgtggaggtcgtattccggtcagcttgcatccctgcagtgcagcgtgacccggtcgtgcccctctctagagataatgagcattgcatgtctaagttataaaaaattaccacatattttttttgtcacacttgtttgaagtgcagtttatctatctttatacatatatttaaactttactctacgaataatataatctatagtactacaataatatcagtgttttagagaatcatataaatgaacagttagacatggtctaaaggacaattgagtattttgacaacaggactctacagttttatctttttagtgtgcatgtgttctcctttttttttgcaaatagcttcacctatataatacttcatccattttattagtacatccatttagggtttagggttaatggtttttatagactaatttttttagtacatctattttattctattttagcctctaaattaagaaaactaaaactctattttagtttttttatttaataatttagatataaaatagaataaaataaagtgactaaaaattaaacaaataccctttaagaaattaaaaaaactaaggaaacatttttcttgtttcgagtagataatgccagcctgttaaacgccgtcgacgagtctaacggacaccaaccagcgaaccagcagcgtcgcgtcgggccaagcgaagcagacggcacggcatctctgtcgctgcctctggacccctctcgagagttccgctccaccgttggacttgctccgctgtcggcatccagaaattgcgtggcggagcggcagacgtgagccggcacggcaggcggcctcctcctcctctcacggcaccggcagctacgggggattcctttcccaccgctccttcgctttcccttcctcgcccgccgtaataaatagacaccccctccacaccctctttccccaacctcgtgttgttcggagcgcacacacacacaaccagatctcccccaaatccacccgtcggcacctccgcttcaaggtacgccgctcgtcctcccccccccccctctctaccttctctagatcggcgttccggtccatgcatggttagggcccggtagttctacttctgttcatgtttgtgttagatccgtgtttgtgttagatccgtgctgctagcgttcgtacacggatgcgacctgtacgtcagacacgttctgattgctaacttgccagtgtttctctttggggaatcctgggatggctctagccgttccgcagacgggatcgatttcatgattttttttgtttcgttgcatagggtttggtttgcccttttcctttatttcaatatatgccgtgcacttgtttgtcgggtcatcttttcatgcttttttttgtcttggttgtgatgatgtggtctggttgggcggtcgttctagatcggagtagaattctgtttcaaactacctggtggatttattaattttggatctgtatgtgtgtgccatacatattcatagttacgaattgaagatgatggatggaaatatcgatctaggataggtatacatgttgatgcgggttttactgatgcatatacagagatgctttttgttcgcttggttgtgatgatgtggtgtggttgggcggtcgttcattcgttctagatcggagtagaatactgtttcaaactacctggtgtatttattaattttggaactgtatgtgtgtgtcatacatcttcatagttacgagtttaagatggatggaaatatcgatctaggataggtatacatgttgatgtgggttttactgatgcatatacatgatggcatatgcagcatctattcatatgctctaaccttgagtacctatctattataataaacaagtatgttttataattattttgatcttgatatacttggatgatggcatatgcagcagctatatgtggatttttttagccctgccttcatacgctatttatttgcttggtactgtttcttttgtcgatgctcaccctgttgtttggtgttacttctgcaggtcgactctagaggatccatggccactgtgaacaactggctcgctttctccctctccccgcaggagctgccgccctcccagacgacggactccacactcatctcggccgccaccgccgaccatgtctccggcgatgtctgcttcaacatcccccaagattggagcatgaggggatcagagctttcggcgctcgtcgcggagccgaagctggaggacttcctcggcggcatctccttctccgagcagcatcacaaggccaactgcaacatgatacccagcactagcagcacagtttgctacgcgagctcaggtgctagcaccggctaccatcaccagctgtaccaccagcccaccagctcagcgctccacttcgcggactccgtaatggtggcttcctcggccggtgtccacgacggcggtgccatgctcagcgcggccgccgctaacggtgtcgctggcgctgccagtgccaacggcggcggcatcgggctgtccatgattaagaactggctgcggagccaaccggcgcccatgcagccgagggtggcggcggctgagggcgcgcaggggctctctttgtccatgaacatggcggggacgacccaaggcgctgctggcatgccacttctcgctggagagcgcgcacgggcgcccgagagtgtatcgacgtcagcacagggtggagccgtcgtcgtcacggcgccgaaggaggatagcggtggcagcggtgttgccggcgctctagtagccgtgagcacggacacgggtggcagcggcggcgcgtcggctgacaacacggcaaggaagacggtggacacgttcgggcagcgcacgtcgatttaccgtggcgtgacaaggcatagatggactgggagatatgaggcacatctttgggataacagttgcagaagggaagggcaaactcgtaagggtcgtcaagtctatttaggtggctatgataaagaggagaaagctgctagggcttatgatcttgctgctctgaagtactggggtgccacaacaacaacaaattttccagtgagtaactacgaaaaggagctcgaggacatgaagcacatgacaaggcaggagtttgtagcgtctctgagaaggaagagcagtggtttctccagaggtgcatccatttacaggggagtgactaggcatcaccaacatggaagatggcaagcacggattggacgagttgcagggaacaaggatctttacttgggcaccttcagcacccaggaggaggcagcggaggcgtacgacatcgcggcgatcaagttccgcggcctcaacgccgtcaccaacttcgacatgagccgctacgacgtgaagagcatcctggacagcagcgccctccccatcggcagcgccgccaagcgcctcaaggaggccgaggccgcagcgtccgcgcagcaccaccacgccggcgtggtgagctacgacgtcggccgcatcgcctcgcagctcggcgacggcggagccctggcggcggcgtacggcgcgcactaccacggcgccgcctggccgaccatcgcgttccagccgggcgccgccagcacaggcctgtaccacccgtacgcgcagcagccaatgcgcggcggcgggtggtgcaagcaggagcaggaccacgcggtgatcgcggccgcgcacagcctgcaggacctccaccacctgaacctgggcgcggccggcgcgcacgactttttctcggcagggcagcaggccgccgccgctgcgatgcacggcctgggtagcatcgacagtgcgtcgctcgagcacagcaccggctccaactccgtcgtctacaacggcggggtcggcgacagcaacggcgccagcgccgtcggcggcagtggcggtggctacatgatgccgatgagcgctgccggagcaaccactacatcggcaatggtgagccacgagcaggtgcatgcacgggcctacgacgaagccaagcaggctgctcagatggggtacgagagctacctggtgaacgcggagaacaatggtggcggaaggatgtctgcatgggggactgtcgtgtctgcagccgcggcggcagcagcaagcagcaacgacaacatggccgccgacgtcgggcatggcggcgcgcagctcttcagtgtctggaacgacacttaagcgtacgtgccggcctggctctccgaaagggcgtattccagcacactggcggccgttactagacccaacctagacttgtccatcttctggattggccaacttaattaatgtatgaaataaaaggatgcacacatagtgacatgctaatcactataatgtgggcatcaaagttgtgtgttatgtgtaattactagttatctgaataaaagagaaagagatcatccatatttcttatcctaaatgaatgtcacgtgtctttataattctttgatgaaccagatgcatttcattaaccaaatccatatacatataaatattaatcatatataattaatatcaattgggttagcaaaacaaatctagtctaggtgtgttttgcgaatgcggcctccgggcacccagctttcttgtacaaagtggccgttaacggatcggccagaatggcccggaccgggttaccgaattcgagctcggtaccctggttcacaaactcaatacaacacacagtggagtagggtattacgctccggcggcccgaaccactctaaatccttgtgtcctcgtgtgctcttccaccattaatgactgtaattgcagggacacgaagagttgtagcgcttttgccaacaagatccgctatatgctagtagagtggaacctgcacagcaacaagcatccaataatctgagaataagaattatgtgtggtgatggttctcatctctgcaactcgccattttcgcgagagaaccaaatccaagttggtgaagatcatgatttgggctcatgggctggcatagtagctattacctttgcaattgtggttcgaatctatccgatattctccttttcagggagagctaatgcttatgcttattgggtattttggtttgacactgcttcacgcccaaaaaaaggcaactatgtctgagttggatatggcccaaaaaaaggcagctatgtctgagttggatatggaagtcttctttcgtttagggtgaagtaagaccaagctcatgagcttattatcttaggtcggaacaaattagttgataggcatggcacatttatcaaattataatgattttaacagaaaagcaacacctctttttcagcagcaccagctttgcaagctgcaattgacactccaagcatagtatttgctccaaactcagcctgcatttcgcacaatatcatatctatttccatttggataaaatatattttccagaaatatgggaacagaatcaagatacagaaaaaagttgtggtagtagtggtaagtggaaacacaagtacagtgaaaagatagcattatttctgaacagtcaaattaaccgaaataagtagtatcacatactgcccctaaattgactacacccaatgtaaagaattgcttgagcatattgagccatcagttgtttgtttgtgtaacggatttgacaatgcagagttcaggagcaaaaaaccgcaaaggagagaaagagggaaaggatctcctagtatcccaccttgtggcgcgccctgtcaagtgcatgatggcctggtcgatctgcgtctgctgctgcggttccatcccaacgagtgcctccgacaccttgtcgttgatcacccgcaccgcgtaggcgacccccctggcgaggaacttccgcctctcggaggccccggccgcgtcggcggcggcgccctcgagcgcgcccacgctagccgtagatgctcggtgcacggccttgttggtgtgcaactcgacctcaacggccggtgcgctacgcccgtcaaggatctggcgcgcccgcaccctcgtgatcacggtgggcgcctcccgcctcatgtggccgacgatgaaaagcgccgggttaggggccttggcgcgcaccgccgtattcagggcctcctcgctcttgcgcgagagcaggtgcttccccaggtactcctgcactgacaaggctgccacagcggtggaatttgtcctcacgacttcgccacgtcgtcctcacctccctggcttcccacgactccgccgtatcgaggtgctcggtgggtcgtcttaatccgaagtccgaactaggaagacgagacagagaggtctgaggaatgggcctcgtttgatgttgagctgaattatttttccagcataagcccaggtcttggtccatgaacaaaattactagaaacccagcccagtactacgatctaaaagagggactgccactggatagctctctctagcattctccacgctccaatacagcggcgtcgtgtctatccgggtctatccgcgaacacgtgagaactctccagaaactgctttctcctccacttcatctctctcgctttccctctataaaaagaccccttctaggaattgagggagacagcaagcaccaagcagcgatccgaagctcaatcaattcactcaaacctcttccccaaatcttcgattagatcttcgttgacaagaagactagaaccgaacctgacatgtccaacctgctcacggttcaccagaaccttccggctcttccagtggacgcgacgtccgatgaagtcaggaagaacctcatggacatgttccgcgacaggcaagcgttcagcgagcacacctggaagatgctgctctccgtctgccgctcctgggctgcatggtgcaagctgaacaacaggaagtggttccccgctgagcccgaggacgtgagggattaccttctgtacctgcaagcgcgaggtttgtttctgcttctacctttgatatatatataataattatcattaattagtagtaatataatatttcaaatatttttttcaaaataaaagaatgtagtatatagcaattgcttttctgtagtttataagtgtgtatattttaatttataacttttctaatatatgaccaaaacatggtgatgcctaggtctggcagtgaagaccatccagcaacaccttggacaactgaacatgcttcacaggcgctccggcctcccgcgccccagcgactcgaacgccgtgagcctcgtcatgcgccgcatcaggaaggaaaacgtcgatgccggcgaaagggcaaagcaggccctcgcgttcgagaggaccgatttcgaccaggtccgcagcctgatggagaacagcgacaggtgccaggacattaggaacctggcgttcctcggaattgcatacaacacgctcctcaggatcgcggaaattgcccgcattcgcgtgaaggacattagccgcaccgacggcggcaggatgcttatccacattggcaggaccaagacgctcgtttccaccgcaggcgtcgaaaaggccctcagcctcggagtgaccaagctcgtcgaacgctggatctccgtgtccggcgtcgcggacgacccaaacaactacctcttctgccgcgtccgcaagaacggggtggctgcccctagcgccaccagccaactcagcacgagggccttggaaggtattttcgaggccacccaccgcctgatctacggcgcgaaggatgacagcggtcaacgctacctcgcatggtccgggcactccgcccgcgttggagctgctagggacatggcccgcgccggtgtttccatccccgaaatcatgcaggcgggtggatggacgaacgtgaacattgtcatgaactacattcgcaaccttgacagcgagacgggcgcaatggttcgcctcctggaagatggtgactgaggtacccaacctagacttgtccatcttctggattggccaacttaattaatgtatgaaataaaaggatgcacacatagtgacatgctaatcactataatgtgggcatcaaagttgtgtgttatgtgtaattactagttatctgaataaaagagaaagagatcatccatatttcttatcctaaatgaatgtcacgtgtctttataattctttgatgaaccagatgcatttcattaaccaaatccatatacatataaatattaatcatatataattaatatcaattgggttagcaaaacaaatctagtctaggtgtgttttgcgatccgatatcgaattggccacggtaccagctgctgctgttctagggttcacaagtctgcctatttgtcttccccaatggagctatggttgtctggtctggtccttggtcgtgtcccgtttcattgtgtactatttacctgtaatgtgtatccttaagtctggtttgatggtgtctgaaacgttttgctgtggtagagcagcatggaagaactataatgaataagtgatccctaatcattgtgtccaaattttgcttctgctatacccttttgtgctgtttcttatgttttgcttaaaaatttgatctgacaaacaaatttgtctaaattatgctcttgttctgactgtgtactgtacacatttgtattgctaccggtttggcacatagttttctctttgattgcagatcaaacccttctgattgcagattgcttggctatggctgatgtgctcactgttcttctttagcttgtatattgctgatggtggcttggctacggctgaaaaagttgctgctgcgccgacttggcaactgttgctccagtaatgctttgtcctctcttcctagccgccgacttggcacttggcagctgttgctcctgtaatgcgttgttatctcttatctcttgagatgtactatgattttgaggctgtttgacttgtgccagattgccagtgctgatgctatattatctcaggtttttatgctagtatatgttttactgtgtgctgcctgtgtcgagttacgtaatctattgaaccgctatgcgtgttgatgccctgttgttgcttgccagattgatgcccctgttgcttgcagcttgcaagctgtagtgaaatcctaaaattccaaaccaaatctattctgaacttttgaagatctgtgatgtccggaagaaaagattcaaacagataaacgggactctccagaatctataaaataaatgatcgacaaacgctttgctttggtaggcttcaagcttggtcacccggtccgggcctagaaggccagcttcggccgccccgggcaactttattatacaaagttgatagataaatcagatatctggttcctaaggacccggcggaccgattaaactgattcggtccgacgcgttacctaataacttcgtatagcatacattatacgaagttattagctaactaactagtaagcttaagccatgggtcgacggatccgttaactagcgtggcatttggcaccgccgcacactatgcgagctaggagtgctagtttacagatgaaactatgaaaccaagaaaacacaattgtccgtagctagcgcgtggcgtcgtgtcaagcttcacacagtatcttcgttcttcactataaatcgcgcctgttgttcgtgagacccaccaccgtggataacagtcccctaataataagcgatcaacagcactgctgatggctgaacaccgaggcgccgccgcgcgtaaccatccgccggagcagcccgtcgtgccggcgaacgacgccttccccgaccgcgcccagcagctctgcctcgacgccgggcgcgcgctcgcgatgtgcggcgtgctcgtcgccgtccctcccgcattttacgcgtcgacgtcgcggacgacaccgcacttgccttcgtcggcttcgtcctctggatcatcggtgcgtggctgtgcctcctggcgctcacgcccttggctccacgggcggtgagggcgggcggggccgccgccagcaccttgctgatcaggtgcctgtccctttcatgaactactagcgcccgcgcccgcggccgccgggcacaagagaacacatcgatgttcgctgcgtacgtcagcaataaggcactctttgtcagtagtcgagtgcatatgttgggtgtttgccctgggagatttcaagtgttgtggccattatcccgcaggataaaaaatcggcggcttttggattgatacggaaaataacgatgtttcatgctcgtgttgtgtgtgtgacatcttgtcagccaagtttttaaccgttgctactccccctctgtgggctcagtgtgtggaccggaatacgtcgtacataggccgtagcctaagcccaatatgccgtttttcaggttggcctgtgtgacgacaagcgggtctcaaaagcccatcacgcaactggcctgcaattattggaggagagcgcgtcgagttggttccagaggctgcgtggtggggccggactctgcgacgacctctcgttcgcgtccgatttggttgccgtgagccgtgacgtaacgcctccttccgttcctccctatataagttccacccccgggtccggtttccccaagccccagtgacccccgatcccgatcgcgaaatctccgcacccgccggcaagggaccgaagcaagcctctctcccgaccgtcgcatcaaggtacgcgtccgctcgatctgtcctcttccttctcgatttgacttgctgtggtgcccgatcacgggatcagaatcgcaccagtgtagatttcgcatgttctaagatgtgttagtttccaggctaatccagttctcttgacgcccgatccgatcgagctccgtgtttatttcagcctaatcgtagtattcccctaaaatttcctcattagggggttcgcaagattgttggtcgacaggttcacttatgctcgatcgcttacttttagtcgattcatgctgcgtactattgttgccccccgtggttttatcttttctcgtgtgaaatccagtagatatagtagatatcgtagcattaggttttaattcaatcgattgattattgtatcatcaaaattgagaagttcgaatcatgcctatcatgctgcctcaaccgaaatcctgtatattgaagtttcaattcaattgattgatcattcattagattcaaccaaaatctagaaggttagatgacgcatgtcatgctgcctgcgtagtttacctttgatctgtttatgattaccttatcagtaggatatttgtgattttgggaagtagcactaactgattcatgctgacatgatgttccctttcagattatactgttgagtcctatctaattgatgctttgtatgctatatgaatacgtcatggtaaattagcagttaattagcatattagcaattgggcgtacctcatcaggattgctcttgtagatgtgtgtggtgatgtttcttgttcaattcatgttctgctttaaaagtatgtgttctctgtttgttaattaagattcatggttataatgatttggacctaattaatcagggttgcccttttagatgcgtggttacttgttgagttcatttttttcctgctatagttgtatgcgtttgttcattcatggttagatttgatttgtttcttctctattccatgccttccatatacttcaattgtagcttaacatgagatttctgtatatgcaggtcgaccgccggggatccacacgacaccatggcccagtccaagcacggcctgaccaaggagatgaccatgaagtaccgcatggagggctgcgtggacggccacaagttcgtgatcaccggcgagggcatcggctaccccttcaagggcaagcaggccatcaacctgtgcgtggtggagggcggccccttgcccttcgccgaggacatcttgtccgccgccttcatgtacggcaaccgcgtgttcaccgagtacccccaggacatcgtcgactacttcaagaactcctgccccgccggctacacctgggaccgctccttcctgttcgaggacggcgccgtgtgcatctgcaacgccgacatcaccgtgagcgtggaggagaactgcatgtaccacgagtccaagttctacggcgtgaacttccccgccgacggccccgtgatgaagaagatgaccgacaactgggagccctcctgcgagaagatcatccccgtgcccaagcagggcatcttgaagggcgacgtgagcatgtacctgctgctgaaggacggtggccgcttgcgctgccagttcgacaccgtgtacaaggccaagtccgtgccccgcaagatgcccgactggcacttcatccagcacaagctgacccgcgaggaccgcagcgacgccaagaaccagaagtggcacctgaccgagcacgccatcgcctccggctccgccttgccctccggactcagatctcgatagagtcaacctagacttgtccatcttctggattggccaacttaattaatgtatgaaataaaaggatgcacacatagtgacatgctaatcactataatgtgggcatcaaagttgtgtgttatgtgtaattactagttatctgaataaaagagaaagagatcatccatatttcttatcctaaatgaatgtcacgtgtctttataattctttgatgaaccagatgcatttcattaaccaaatccatatacatataaatattaatcatatataattaatatcaattgggttagcaaaacaaatctagtctaggtgtgttttgcgaattgcggcgcccttactttaacgcctctaaccaacacccctttatctttataaggaacaataaacagaatttgccccactgttctaaatcacctaataatatccccagctaaaaacaataaaggtttcctagaattaagacaagcatgactgttcctccaggagggtttggaacattgttgcagtcttgcagatacgggcgaagggtgagaaacagagcggagggctggaggtgacctcggtagtcgacgccggagttgagcttgacaacgacggggcggcccctgatggacttgaggaagtccgatggcgtcttcaccgtcccgccggcgcccgaggcgggcctgtcgctgccgccgccgccgctgctcatcttgcgcgctgtgcccccggcggtgtccctgtgttgcggatcgcgggtgggccaggtggatgcgagggcgacccgtttggactccggccggagccgccggatccctggtcggtgtcagtgccgtttactctgggccccacgtgtcagtaccgtctgtagatgacaacaacccgtcgtccacagtcatgtccaaaatatcctttcttcttttttttcgattcggatatctatcttccttttttttttccaaaaatcttcttgacgcaccagcgcgcacgtttgtggtaaacgccgacacgtcggtcccacgtcgatagaccccacccaccagtgagtagcgtgtacgtattcgggggtgacggacgtgtcgccgtcgtcttgctagtcccattcccatctgagccacacatctctgaacaaaaaaaaggagggaggcctccacgcacatccccctccgtgccacccgccccaaaccctcgcgccgcctccgagacagccgccgcaaccatggccaccgccgccgccgcgtctaccgcgctcactggcgccactaccgctgcgcccaaggcgaggcgccgggcgcacctcctggccacccgccgcgccctcgccgcgcccatcaggtgctcagcggcgtcacccgccatgccgatggctcccccggccaccccgctccggccgtggggccccaccgagccccgcaagggtgctgacatcctcgtcgagtccctcgagcgctgcggcgtccgcgacgtcttcgcctaccccggcggcgcgtccatggagatccaccaggcactcacccgctcccccgtcatcgccaaccacctcttccgccacgagcaaggggaggcctttgccgcctccggctacgcgcgctcctcgggccgcgtcggcgtctgcatcgccacctccggccccggcgccaccaacctagtctccgcgctcgccgacgcgctgctcgattccgtccccatggtcgccatcacgggacaggtggcgcgacgcatgattggcaccgacgccttccaggagacgcccatcgtcgaggtcacccgctccatcaccaagcacaactacctggtcctcgacgtcgacgacatcccccgcgtcgtgcaggaggctttcttcctcgcctcctctggtcgaccagggccggtgcttgtcgacatccccaaggacatccagcagcagatggcggtgcctgtctgggacaagcccatgagtctgcctgggtacattgcgcgccttcccaagccccctgcgactgagttgcttgagcaggtgctgcgtcttgttggtgaatcgcggcgccctgttctttatgtgggcggtggctgcgcagcatctggtgaggagttgcgacgctttgtggagctgactggaatcccggtcacaactactcttatgggcctcggcaacttccccagcgacgacccactgtctctgcgcatgctaggtatgcatgggacggtgtatgcaaattatgcagtggataaggccgatctgttgcttgcacttggtgtgcggtttgatgatcgcgtgacagggaagattgaggcttttgcaagcagggctaagattgtgcacgttgatattgatccggctgagattggcaagaacaagcagccacatgtgtccatctgtgcagatgttaagcttgctttgcagggcatgaatgctcttcttgaaggaagcacatcaaagaagagctttgactttggctcatggaacgatgagttggatcagcagaagagggaattcccccttgggtataaaacatctaatgaggagatccagccacaatatgctattcaggttcttgatgagctgacgaaaggcgaggccatcatcggcacaggtgttgggcagcaccagatgtgggcggcacagtactacacttacaagcggccaaggcagtggttgtcttcagctggtcttggggctatgggatttggtttgccggctgctgctggtgcttctgtggcaaacccaggtgtcactgttgttgacatcgatggagatggtagctttctcatgaacgttcaggagctagctatgatccgaattgagaacctcccagtgaaggtctttgtgctaaacaaccagcacctggggatggtggtgcagttggaggacaggttctataaggccaacagagcgcacacatacttgggaaacccagagaatgaaagtgagatatatccagatttcgtgacgatcgccaaagggttcaacattccagcggtccgtgtgacaaagaagaacgaagtccgcgcagcgataaagaagatgctcgagactccagggccgtacctcttggatataatcgtcccacaccaggagcatgtgttgcctatgatccctagtggtggggctttcaaggatatgatcctggatggtgatggcaggactgtgtactgactagctagtcagttaacagatctgccagatcctcggtgtacaaataacccgtcttatcctatgagacgggccggcgtcagtgtgttctggaggaatttttatgtcagagcctttttctttgtgtgcttgatgtagatgccaagggaagcttattggctgttgaagcttgatgcaaaataaattatggaactctgttttttgtttatctaataataactagcaaatatgcttccattgcattgaaactaacagccttttgtgtttccaagttttattttgtgacaatgtcatctatttcaattagttgtggaatcggaaacttgcaggactaacttggaaactccaatccctcagcatcctggactttttcctggtgtaatccatgtagatattattttaatcatcattttagttctggaggtttttccatctccggttttgctcccctttcttcaaaaaaaaaaaaaaaatgccgtaggcgccgcaacgcccacctgttgttcaaactcatgggcacgagtggctcgaagattttatacaacaattgctgtagtttcaccgttgctggtgaagaagcatttttttaaaaaaatatagtggtattcattttaattagtttagttgtgcagcgagcaaaatttggacatgctctgctcggaatctgatcgacctagacacagattagcagcagtagctttgtcatctgttccaagagttgcgatctgatagaagaaaaaaaaaccttcccttcaatgtaaaaccgaaactaacaagaaagaagcacagtgccgtttaggcaagtatggagtacgtattaagcatgtagaaggccatgcatgaaccactaacaagaaagaagcgcagtgccattcaggcaagcataagcatgtagattggcatgcatgaacaactaacagtagatcgtctctggtctgattagaagttttttgggaagccaagaaatcatgtacaactggttccatctcaaattccgtggcaaaaagaggcctaagcaacatacctcgagtagatcacattcaagcttggtcacccggtccgtcaatattctgattccgatgacttcgtaggttcctagctcaagccgctcgtgtccaagcgtcacttacgattagctaatgattacggcatctaggaccgactagtggcgcgccgactagctagctaaggtaccgagctcgaattcattccgattaatcgtggcctcttgctcttcaggatgaagagctatgtttaaacgtgcaagcgctactagacaattcagtacattaaaaacgtccgcaatgtgttattaagttgtctaagcgtcaatttgtttacaccacaatatatcctgcca

SEQ ID NO: 64 - DNA, 24912 bp, Artificial sequence
  PHP96032
gtttacccgccaatatatcctgtcaaacactgatagtttaaactgaaggcgggaaacgacaatctgatcatgagcggagaattaagggagtcacgttatgacccccgccgatgacgcgggacaagccgttttacgtttggaactgacagaaccgcaacgttgaaggagccactcagcaagctggtacgattgtaatacgactcactatagggcgaattgagcgctgtttaaacgctcttcaactggaagagcggttacgctgtttaaacgctcttcaactggaagagcggttactaccggttcactagctagctgctaatcgagctagttaccctatgaggtgacatgaagcgctcacggttactatgacggttagcttcacgactgttggtggcagtagcgtacgacttagctatagttccggacttacccttaagcgatttaaatctgcggttaccgaattcgagctcggtacctagtacccttgtacttttggtttcacctgcatagagaaaacccacaagaatatgacagtctgatttgtcagtctcattctcaagcaacatttctctatccgttactttcatggtgaataacacaatccatcatcaatactttgtgttactcagaaactgaaagttattccgagtcttgcatatctttggacctactcgtttttctaccattattgctgattgttaagctctcgctacttgaatcggcattgttggagtgggaaggttcaaaaaattggagttatgactagttgtctctttctatgtacgatggagaaaatgaataaacaactgagaaaatggctcttgtttagttgatgatgctcttaagctttccactggttgccatatatgatttgggcatttcactttgatcttaatgggccttgtaaagcccaagactcatgattatctttagttgatgctcttaattaggtgtgggcaaataattcaaactgtatgtacccgaccaaaaccaaagcaaaaataatcgaaccaaaccgaaaatttaaaaataaccgaatgaaaactaaatcctataactgaaagaactgaaaccgaatcaaaatatttaatgtaaccaaaaatatccgaaatataattatattgtcaaaaatattaataatttctagattaaataattaaaaatacttaaaaatttatataaaatagtaaaaatactcgaaaataaccacaaatattcaaaaacaaccgaaatatcccaaaatattcaaagcaaaataaccgaatggataccaaattttaaaaccgaaaaaactggaacaaaaccaaaatcgaaccaaaatttcaaaaatcgaataaatactaaactttagaacaaaaaaaaacgataaccgaatgtatacgaaccaaagccgaattagataaccgaacgtccaggactactcttaatctttccgccacttatgatttgggctattactttgtttataatgagccttttcaagctcaagttcatgattgtccgtgagatgagaaactgacttgttggattcgaaaccctagctagtattggttaatacttaatacataaatgacctgcattgacatcatcatccaagaaaataaaaattgtatgcttgagatatttagttttcctagctaggttttctttattttagtaccgaatctttaggtgtgccacgttaatttagacccattttttcatacttaccaactgagtctagtttaatcatgactataatcgtataaaatgattcagtcgacgtcattgcgaacgtatataaaatcatccaaattgacgtcattccaaagaggtaagcatgcttatctaagagtccgagcatactaaacaagacgacattttatttgcactccaaatcaaattttgtattgcctaaagaaaaacaatcaaactcaagtttcttaaaattaatttcattcaaactaatcactttcaatatctcacatattattcatgccatttctatttgtctaaacatgatttaaaaaaaaaagtaaaatacaaagattactatgcaaaaactctataaaaaaaaattcaaatttcttatttatttgtgacatcaaattttcaaaataatttttttaattatcggttgatccggtcagtcgataaaaacataaactttcagcgaccgttaaaactttcctactaccgatttagagaaaatcttagcttgaaacgtaattgtaacctgccttcatgcaagtcgcaagatatgtcatcctaagttgtatatgttttctcaaaagatgtatttacttgagaaaatacgtttcaacgttgatggacaaccaattaagaatcaagcacctttcgtaatcaatttaggcttatcgtctaaggtatactgatttacgacagttgactagacttataaggaacaaaataatagaatagtttctaaacacttcacctaatcatagagactaagatggtaattcgtaaacgacaaagcctagtgacactgtccattgtaaaattccacatcatattagtattaaacatatacatgtagtttcctgaacacatgtagtatcaaacacacttcgtggcttcttcctcgaaacctgcggccgcgctatagttccggacttacccttaagataacttcgtatagcatacattatacgaagttatgggcccacgcgtgaagagcggttaccagagctggtcacctttgtccaccaagatggaactgtcttcggccagaatggccatctggattcagcaggcctagaaggccatttatcgctatcaactttgtatagaaaagttgggccgaattcgagctcggtacggccagaatggcccggaccgaagcttcctaactaactagaacaaaaattttgtgtatttgtcgtataaggattgcttccctttaaggtcatgttcctgcactgtaaagcaggcaaaggaaaaaaaagttatgaaggttaaaatgcatcatgggagcatcacctcattttgcacaaataacaaagaagctaaattttgctcccgaacaaacaacagcaatgctacggaatgcaactacctagcatttccaaaaatacagggccttccggtactgtattacaacttacaagcgatgaggccaagacgattagacgaatagctacagaacaagacaatgagagttcagcactcactttttgccagttccttctccttggcagcagccaggcgcttgagtttagcagcttgtgcaaatgtggacggcctacagcagacatacaggcaaagaagcgaggagtaatttgcagttggaaatcattcttcgatcaatagggaaactctgagtcacagcgaaaggaaggttaattgcctacgttgacaactgatcagcctccttgagaagttgcttgatttcaagccgcactttgatctgctcatcactaagtcctccgctctggatgacaaaagcacagaacgcatgagtggcaagtggaaacactagagcgaaataaatacaaaaccgcagactacaggctaacagatagggagaccgggaagacaaagactcgagcctgcattcaacagttacagtcgcctcggccaaaggttgagaaatttgcatcaaaatccaaactgtctagggccttgggaaatagttcctcggaatcagagttcaattcatggacgaaatagatggaactgatggtaggctactcttccgcccaatcacaattcacggaagatccaggtctcgagactaggagacggatgggaggcgcaacgcgcgatggggaggggggcggcgctgacctttctggcgaggtcgaggtagcggtagagcagctgcagcgcggacacgatgaggaagacgaagatagccgccagggacatggtcgccggcggcggcggagcgaggctgagccggtctctccggcctccgatcggcgttaagttggggatcgtaacgtgacgtgtctcctctccacagatcgacacaaccggcctactcgggtgcacgacgccgcgacaagggtgagatgtccgtgcacgcagcccgtttggagtcctcgttgcccacgaaccgaccccttacagaacaaggcctagcccaaaactattctgagttgagcttttgagcctagcccacctaagccgagcgtcatgaactgatgaacccactaccactagtcaaggcaaaccacaaccacaaatggatgaattgatctagaacaatccgaaggaggggaggccacgtcacactcacaccaaccgaaatatctgccagtatcagatcaaccggccaataggacgccagcgagcccaacacctagcgacgccgcaaaattcaccgcgaggggcaccgggcacggcaaaaacaaaagcccggcgcggtgagaatatctggcgactggcggagacctggtggccagcgcgcggccacatcagccaccccatccgcccacctcacctccggcgagccaatggcaactcgtcttaagattccacgagataaggacccgatcgccggcgacgctatttagccaggtgcgccccccacggtacactccaccagcggcatctatagcaaccggtccaacactttcacgctcagcttcagccccgggggatctcgactctagaggatcgctcaggaaggccgctgagatagaggcatggcggccaatgcgggcggcggtggagcgggaggaggcagcggcagcggcagcgtggctgcgccggcggtgtgccgccccagcggctcgcggtggacgccgacgccggagcagatcaggatgctgaaggagctctactacggctgcggcatccggtcgcccagctcggagcagatccagcgcatcaccgccatgctgcggcagcacggcaagatcgagggcaagaacgtcttctactggttccagaaccacaaggcccgcgagcgccagaagcgccgcctcaccagcctcgacgtcaacgtgcccgccgccggcgcggccgacgccaccaccagccaactcggcgtcctctcgctgtcgtcgccgccgccttcaggcgcggcgcctccctcgcccaccctcggcttctacgccgccggcaatggcggcggatcggctgtgctgctggacacgagttccgactggggcagcagcggcgctgccatggccaccgagacatgcttcctgcaggactacatgggcgtgacggacacgggcagctcgtcgcagtggccacgcttctcgtcgtcggacacgataatggcggcggccgcggcgcgggcggcgacgacgcgggcgcccgagacgctccctctcttcccgacctgcggcgacgacggcggcagcggtagcagcagctacttgccgttctggggtgccgcgtccacaactgccggcgccacttcttccgttgcgatccagcagcaacaccagctgcaggagcagtacagcttttacagcaacagcaacagcacccagctggccggcaccggcaaccaagacgtatcggcaacagcagcagcagccgccgccctggagctgagcctcagctcatggtgctccccttaccctgctgcagggagtatgtgagagcaacgcgagctgccactgctcttcactgatgtctctggaatggaaggaggaggaagtgagcatagcgttggtgcgttgctgtcaagggcgaattcacatggttaacctagacttgtccatcttctggattggccaacttaattaatgtatgaaataaaaggatgcacacatagtgacatgctaatcactataatgtgggcatcaaagttgtgtgttatgtgtaattactagttatctgaataaaagagaaagagatcatccatatttcttatcctaaatgaatgtcacgtgtctttataattctttgatgaaccagatgcatttcattaaccaaatccatatacatataaatattaatcatatataattaatatcaattgggttagcaaaacaaatctagtctaggtgtgttttgcgaatgcggccgccaccgcggtggagctcgaattccggtccgggcctagaaggccagcttcaagtttgtacaaaaaagcaggctccggccagaatggcccggaccgggttaccgaattcgagctcggtaccatttaaattgcgcccgccacggccgtggaggtcgtattccggtcagcttgcatccctgcagtgcagcgtgacccggtcgtgcccctctctagagataatgagcattgcatgtctaagttataaaaaattaccacatattttttttgtcacacttgtttgaagtgcagtttatctatctttatacatatatttaaactttactctacgaataatataatctatagtactacaataatatcagtgttttagagaatcatataaatgaacagttagacatggtctaaaggacaattgagtattttgacaacaggactctacagttttatctttttagtgtgcatgtgttctcctttttttttgcaaatagcttcacctatataatacttcatccattttattagtacatccatttagggtttagggttaatggtttttatagactaatttttttagtacatctattttattctattttagcctctaaattaagaaaactaaaactctattttagtttttttatttaataatttagatataaaatagaataaaataaagtgactaaaaattaaacaaataccctttaagaaattaaaaaaactaaggaaacatttttcttgtttcgagtagataatgccagcctgttaaacgccgtcgacgagtctaacggacaccaaccagcgaaccagcagcgtcgcgtcgggccaagcgaagcagacggcacggcatctctgtcgctgcctctggacccctctcgagagttccgctccaccgttggacttgctccgctgtcggcatccagaaattgcgtggcggagcggcagacgtgagccggcacggcaggcggcctcctcctcctctcacggcaccggcagctacgggggattcctttcccaccgctccttcgctttcccttcctcgcccgccgtaataaatagacaccccctccacaccctctttccccaacctcgtgttgttcggagcgcacacacacacaaccagatctcccccaaatccacccgtcggcacctccgcttcaaggtacgccgctcgtcctcccccccccccctctctaccttctctagatcggcgttccggtccatgcatggttagggcccggtagttctacttctgttcatgtttgtgttagatccgtgtttgtgttagatccgtgctgctagcgttcgtacacggatgcgacctgtacgtcagacacgttctgattgctaacttgccagtgtttctctttggggaatcctgggatggctctagccgttccgcagacgggatcgatttcatgattttttttgtttcgttgcatagggtttggtttgcccttttcctttatttcaatatatgccgtgcacttgtttgtcgggtcatcttttcatgcttttttttgtcttggttgtgatgatgtggtctggttgggcggtcgttctagatcggagtagaattctgtttcaaactacctggtggatttattaattttggatctgtatgtgtgtgccatacatattcatagttacgaattgaagatgatggatggaaatatcgatctaggataggtatacatgttgatgcgggttttactgatgcatatacagagatgctttttgttcgcttggttgtgatgatgtggtgtggttgggcggtcgttcattcgttctagatcggagtagaatactgtttcaaactacctggtgtatttattaattttggaactgtatgtgtgtgtcatacatcttcatagttacgagtttaagatggatggaaatatcgatctaggataggtatacatgttgatgtgggttttactgatgcatatacatgatggcatatgcagcatctattcatatgctctaaccttgagtacctatctattataataaacaagtatgttttataattattttgatcttgatatacttggatgatggcatatgcagcagctatatgtggatttttttagccctgccttcatacgctatttatttgcttggtactgtttcttttgtcgatgctcaccctgttgtttggtgttacttctgcaggtcgactctagaggatccatggccactgtgaacaactggctcgctttctccctctccccgcaggagctgccgccctcccagacgacggactccacactcatctcggccgccaccgccgaccatgtctccggcgatgtctgcttcaacatcccccaagattggagcatgaggggatcagagctttcggcgctcgtcgcggagccgaagctggaggacttcctcggcggcatctccttctccgagcagcatcacaaggccaactgcaacatgatacccagcactagcagcacagtttgctacgcgagctcaggtgctagcaccggctaccatcaccagctgtaccaccagcccaccagctcagcgctccacttcgcggactccgtaatggtggcttcctcggccggtgtccacgacggcggtgccatgctcagcgcggccgccgctaacggtgtcgctggcgctgccagtgccaacggcggcggcatcgggctgtccatgattaagaactggctgcggagccaaccggcgcccatgcagccgagggtggcggcggctgagggcgcgcaggggctctctttgtccatgaacatggcggggacgacccaaggcgctgctggcatgccacttctcgctggagagcgcgcacgggcgcccgagagtgtatcgacgtcagcacagggtggagccgtcgtcgtcacggcgccgaaggaggatagcggtggcagcggtgttgccggcgctctagtagccgtgagcacggacacgggtggcagcggcggcgcgtcggctgacaacacggcaaggaagacggtggacacgttcgggcagcgcacgtcgatttaccgtggcgtgacaaggcatagatggactgggagatatgaggcacatctttgggataacagttgcagaagggaagggcaaactcgtaagggtcgtcaagtctatttaggtggctatgataaagaggagaaagctgctagggcttatgatcttgctgctctgaagtactggggtgccacaacaacaacaaattttccagtgagtaactacgaaaaggagctcgaggacatgaagcacatgacaaggcaggagtttgtagcgtctctgagaaggaagagcagtggtttctccagaggtgcatccatttacaggggagtgactaggcatcaccaacatggaagatggcaagcacggattggacgagttgcagggaacaaggatctttacttgggcaccttcagcacccaggaggaggcagcggaggcgtacgacatcgcggcgatcaagttccgcggcctcaacgccgtcaccaacttcgacatgagccgctacgacgtgaagagcatcctggacagcagcgccctccccatcggcagcgccgccaagcgcctcaaggaggccgaggccgcagcgtccgcgcagcaccaccacgccggcgtggtgagctacgacgtcggccgcatcgcctcgcagctcggcgacggcggagccctggcggcggcgtacggcgcgcactaccacggcgccgcctggccgaccatcgcgttccagccgggcgccgccagcacaggcctgtaccacccgtacgcgcagcagccaatgcgcggcggcgggtggtgcaagcaggagcaggaccacgcggtgatcgcggccgcgcacagcctgcaggacctccaccacctgaacctgggcgcggccggcgcgcacgactttttctcggcagggcagcaggccgccgccgctgcgatgcacggcctgggtagcatcgacagtgcgtcgctcgagcacagcaccggctccaactccgtcgtctacaacggcggggtcggcgacagcaacggcgccagcgccgtcggcggcagtggcggtggctacatgatgccgatgagcgctgccggagcaaccactacatcggcaatggtgagccacgagcaggtgcatgcacgggcctacgacgaagccaagcaggctgctcagatggggtacgagagctacctggtgaacgcggagaacaatggtggcggaaggatgtctgcatgggggactgtcgtgtctgcagccgcggcggcagcagcaagcagcaacgacaacatggccgccgacgtcgggcatggcggcgcgcagctcttcagtgtctggaacgacacttaagcgtacgtgccggcctggctctccgaaagggcgtattccagcacactggcggccgttactagacccaacctagacttgtccatcttctggattggccaacttaattaatgtatgaaataaaaggatgcacacatagtgacatgctaatcactataatgtgggcatcaaagttgtgtgttatgtgtaattactagttatctgaataaaagagaaagagatcatccatatttcttatcctaaatgaatgtcacgtgtctttataattctttgatgaaccagatgcatttcattaaccaaatccatatacatataaatattaatcatatataattaatatcaattgggttagcaaaacaaatctagtctaggtgtgttttgcgaatgcggcctccgggcacccagctttcttgtacaaagtggccgttaacggatcggccagaatggcccggaccgggttaccgaattcgagctcggtaccctggttcacaaactcaatacaacacacagtggagtagggtattacgctccggcggcccgaaccactctaaatccttgtgtcctcgtgtgctcttccaccattaatgactgtaattgcagggacacgaagagttgtagcgcttttgccaacaagatccgctatatgctagtagagtggaacctgcacagcaacaagcatccaataatctgagaataagaattatgtgtggtgatggttctcatctctgcaactcgccattttcgcgagagaaccaaatccaagttggtgaagatcatgatttgggctcatgggctggcatagtagctattacctttgcaattgtggttcgaatctatccgatattctccttttcagggagagctaatgcttatgcttattgggtattttggtttgacactgcttcacgcccaaaaaaaggcaactatgtctgagttggatatggcccaaaaaaaggcagctatgtctgagttggatatggaagtcttctttcgtttagggtgaagtaagaccaagctcatgagcttattatcttaggtcggaacaaattagttgataggcatggcacatttatcaaattataatgattttaacagaaaagcaacacctctttttcagcagcaccagctttgcaagctgcaattgacactccaagcatagtatttgctccaaactcagcctgcatttcgcacaatatcatatctatttccatttggataaaatatattttccagaaatatgggaacagaatcaagatacagaaaaaagttgtggtagtagtggtaagtggaaacacaagtacagtgaaaagatagcattatttctgaacagtcaaattaaccgaaataagtagtatcacatactgcccctaaattgactacacccaatgtaaagaattgcttgagcatattgagccatcagttgtttgtttgtgtaacggatttgacaatgcagagttcaggagcaaaaaaccgcaaaggagagaaagagggaaaggatctcctagtatcccaccttgtggcgcgccctgtcaagtgcatgatggcctggtcgatctgcgtctgctgctgcggttccatcccaacgagtgcctccgacaccttgtcgttgatcacccgcaccgcgtaggcgacccccctggcgaggaacttccgcctctcggaggccccggccgcgtcggcggcggcgccctcgagcgcgcccacgctagccgtagatgctcggtgcacggccttgttggtgtgcaactcgacctcaacggccggtgcgctacgcccgtcaaggatctggcgcgcccgcaccctcgtgatcacggtgggcgcctcccgcctcatgtggccgacgatgaaaagcgccgggttaggggccttggcgcgcaccgccgtattcagggcctcctcgctcttgcgcgagagcaggtgcttccccaggtactcctgcactgacaaggctgccacagcggtggaatttgtcctcacgacttcgccacgtcgtcctcacctccctggcttcccacgactccgccgtatcgaggtgctcggtgggtcgtcttaatccgaagtccgaactaggaagacgagacagagaggtctgaggaatgggcctcgtttgatgttgagctgaattatttttccagcataagcccaggtcttggtccatgaacaaaattactagaaacccagcccagtactacgatctaaaagagggactgccactggatagctctctctagcattctccacgctccaatacagcggcgtcgtgtctatccgggtctatccgcgaacacgtgagaactctccagaaactgctttctcctccacttcatctctctcgctttccctctataaaaagaccccttctaggaattgagggagacagcaagcaccaagcagcgatccgaagctcaatcaattcactcaaacctcttccccaaatcttcgattagatcttcgttgacaagaagactagaaccgaacctgacatgtccaacctgctcacggttcaccagaaccttccggctcttccagtggacgcgacgtccgatgaagtcaggaagaacctcatggacatgttccgcgacaggcaagcgttcagcgagcacacctggaagatgctgctctccgtctgccgctcctgggctgcatggtgcaagctgaacaacaggaagtggttccccgctgagcccgaggacgtgagggattaccttctgtacctgcaagcgcgaggtttgtttctgcttctacctttgatatatatataataattatcattaattagtagtaatataatatttcaaatatttttttcaaaataaaagaatgtagtatatagcaattgcttttctgtagtttataagtgtgtatattttaatttataacttttctaatatatgaccaaaacatggtgatgcctaggtctggcagtgaagaccatccagcaacaccttggacaactgaacatgcttcacaggcgctccggcctcccgcgccccagcgactcgaacgccgtgagcctcgtcatgcgccgcatcaggaaggaaaacgtcgatgccggcgaaagggcaaagcaggccctcgcgttcgagaggaccgatttcgaccaggtccgcagcctgatggagaacagcgacaggtgccaggacattaggaacctggcgttcctcggaattgcatacaacacgctcctcaggatcgcggaaattgcccgcattcgcgtgaaggacattagccgcaccgacggcggcaggatgcttatccacattggcaggaccaagacgctcgtttccaccgcaggcgtcgaaaaggccctcagcctcggagtgaccaagctcgtcgaacgctggatctccgtgtccggcgtcgcggacgacccaaacaactacctcttctgccgcgtccgcaagaacggggtggctgcccctagcgccaccagccaactcagcacgagggccttggaaggtattttcgaggccacccaccgcctgatctacggcgcgaaggatgacagcggtcaacgctacctcgcatggtccgggcactccgcccgcgttggagctgctagggacatggcccgcgccggtgtttccatccccgaaatcatgcaggcgggtggatggacgaacgtgaacattgtcatgaactacattcgcaaccttgacagcgagacgggcgcaatggttcgcctcctggaagatggtgactgaggtacccaacctagacttgtccatcttctggattggccaacttaattaatgtatgaaataaaaggatgcacacatagtgacatgctaatcactataatgtgggcatcaaagttgtgtgttatgtgtaattactagttatctgaataaaagagaaagagatcatccatatttcttatcctaaatgaatgtcacgtgtctttataattctttgatgaaccagatgcatttcattaaccaaatccatatacatataaatattaatcatatataattaatatcaattgggttagcaaaacaaatctagtctaggtgtgttttgcgatccgatatcgaattggccacggtaccagctgctgctgttctagggttcacaagtctgcctatttgtcttccccaatggagctatggttgtctggtctggtccttggtcgtgtcccgtttcattgtgtactatttacctgtaatgtgtatccttaagtctggtttgatggtgtctgaaacgttttgctgtggtagagcagcatggaagaactataatgaataagtgatccctaatcattgtgtccaaattttgcttctgctatacccttttgtgctgtttcttatgttttgcttaaaaatttgatctgacaaacaaatttgtctaaattatgctcttgttctgactgtgtactgtacacatttgtattgctaccggtttggcacatagttttctctttgattgcagatcaaacccttctgattgcagattgcttggctatggctgatgtgctcactgttcttctttagcttgtatattgctgatggtggcttggctacggctgaaaaagttgctgctgcgccgacttggcaactgttgctccagtaatgctttgtcctctcttcctagccgccgacttggcacttggcagctgttgctcctgtaatgcgttgttatctcttatctcttgagatgtactatgattttgaggctgtttgacttgtgccagattgccagtgctgatgctatattatctcaggtttttatgctagtatatgttttactgtgtgctgcctgtgtcgagttacgtaatctattgaaccgctatgcgtgttgatgccctgttgttgcttgccagattgatgcccctgttgcttgcagcttgcaagctgtagtgaaatcctaaaattccaaaccaaatctattctgaacttttgaagatctgtgatgtccggaagaaaagattcaaacagataaacgggactctccagaatctataaaataaatgatcgacaaacgctttgctttggtaggcttcaagcttggtcacccggtccgggcctagaaggccagcttcggccgccccgggcaactttattatacaaagttgatagataaatcagatatctggttcctaaggacccggcggaccgattaaactgattcggtccgacgcgttacctaataacttcgtatagcatacattatacgaagttattagctaactaactagtaagcttaagccatgggtcgacggatccgttaactagcgtggcatttggcaccgccgcacactatgcgagctaggagtgctagtttacagatgaaactatgaaaccaagaaaacacaattgtccgtagctagcgcgtggcgtcgtgtcaagcttcacacagtatcttcgttcttcactataaatcgcgcctgttgttcgtgagacccaccaccgtggataacagtcccctaataataagcgatcaacagcactgctgatggctgaacaccgaggcgccgccgcgcgtaaccatccgccggagcagcccgtcgtgccggcgaacgacgccttccccgaccgcgcccagcagctctgcctcgacgccgggcgcgcgctcgcgatgtgcggcgtgctcgtcgccgtccctcccgcattttacgcgtcgacgtcgcggacgacaccgcacttgccttcgtcggcttcgtcctctggatcatcggtgcgtggctgtgcctcctggcgctcacgcccttggctccacgggcggtgagggcgggcggggccgccgccagcaccttgctgatcaggtgcctgtccctttcatgaactactagcgcccgcgcccgcggccgccgggcacaagagaacacatcgatgttcgctgcgtacgtcagcaataaggcactctttgtcagtagtcgagtgcatatgttgggtgtttgccctgggagatttcaagtgttgtggccattatcccgcaggataaaaaatcggcggcttttggattgatacggaaaataacgatgtttcatgctcgtgttgtgtgtgtgacatcttgtcagccaagtttttaaccgttgctactccccctctgtgggctcagtgtgtggaccggaatacgtcgtacataggccgtagcctaagcccaatatgccgtttttcaggttggcctgtgtgacgacaagcgggtctcaaaagcccatcacgcaactggcctgcaattattggaggagagcgcgtcgagttggttccagaggctgcgtggtggggccggactctgcgacgacctctcgttcgcgtccgatttggttgccgtgagccgtgacgtaacgcctccttccgttcctccctatataagttccacccccgggtccggtttccccaagccccagtgacccccgatcccgatcgcgaaatctccgcacccgccggcaagggaccgaagcaagcctctctcccgaccgtcgcatcaaggtacgcgtccgctcgatctgtcctcttccttctcgatttgacttgctgtggtgcccgatcacgggatcagaatcgcaccagtgtagatttcgcatgttctaagatgtgttagtttccaggctaatccagttctcttgacgcccgatccgatcgagctccgtgtttatttcagcctaatcgtagtattcccctaaaatttcctcattagggggttcgcaagattgttggtcgacaggttcacttatgctcgatcgcttacttttagtcgattcatgctgcgtactattgttgccccccgtggttttatcttttctcgtgtgaaatccagtagatatagtagatatcgtagcattaggttttaattcaatcgattgattattgtatcatcaaaattgagaagttcgaatcatgcctatcatgctgcctcaaccgaaatcctgtatattgaagtttcaattcaattgattgatcattcattagattcaaccaaaatctagaaggttagatgacgcatgtcatgctgcctgcgtagtttacctttgatctgtttatgattaccttatcagtaggatatttgtgattttgggaagtagcactaactgattcatgctgacatgatgttccctttcagattatactgttgagtcctatctaattgatgctttgtatgctatatgaatacgtcatggtaaattagcagttaattagcatattagcaattgggcgtacctcatcaggattgctcttgtagatgtgtgtggtgatgtttcttgttcaattcatgttctgctttaaaagtatgtgttctctgtttgttaattaagattcatggttataatgatttggacctaattaatcagggttgcccttttagatgcgtggttacttgttgagttcatttttttcctgctatagttgtatgcgtttgttcattcatggttagatttgatttgtttcttctctattccatgccttccatatacttcaattgtagcttaacatgagatttctgtatatgcaggtcgaccgccggggatccacacgacaccatggcccagtccaagcacggcctgaccaaggagatgaccatgaagtaccgcatggagggctgcgtggacggccacaagttcgtgatcaccggcgagggcatcggctaccccttcaagggcaagcaggccatcaacctgtgcgtggtggagggcggccccttgcccttcgccgaggacatcttgtccgccgccttcatgtacggcaaccgcgtgttcaccgagtacccccaggacatcgtcgactacttcaagaactcctgccccgccggctacacctgggaccgctccttcctgttcgaggacggcgccgtgtgcatctgcaacgccgacatcaccgtgagcgtggaggagaactgcatgtaccacgagtccaagttctacggcgtgaacttccccgccgacggccccgtgatgaagaagatgaccgacaactgggagccctcctgcgagaagatcatccccgtgcccaagcagggcatcttgaagggcgacgtgagcatgtacctgctgctgaaggacggtggccgcttgcgctgccagttcgacaccgtgtacaaggccaagtccgtgccccgcaagatgcccgactggcacttcatccagcacaagctgacccgcgaggaccgcagcgacgccaagaaccagaagtggcacctgaccgagcacgccatcgcctccggctccgccttgccctccggactcagatctcgatagagtcaacctagacttgtccatcttctggattggccaacttaattaatgtatgaaataaaaggatgcacacatagtgacatgctaatcactataatgtgggcatcaaagttgtgtgttatgtgtaattactagttatctgaataaaagagaaagagatcatccatatttcttatcctaaatgaatgtcacgtgtctttataattctttgatgaaccagatgcatttcattaaccaaatccatatacatataaatattaatcatatataattaatatcaattgggttagcaaaacaaatctagtctaggtgtgttttgcgaattgcggcgcccttactttaacgcctctaaccaacacccctttatctttataaggaacaataaacagaatttgccccactgttctaaatcacctaataatatccccagctaaaaacaataaaggtttcctagaattaagacaagcatgactgttcctccaggagggtttggaacattgttgcagtcttgcagatacgggcgaagggtgagaaacagagcggagggctggaggtgacctcggtagtcgacgccggagttgagcttgacaacgacggggcggcccctgatggacttgaggaagtccgatggcgtcttcaccgtcccgccggcgcccgaggcgggcctgtcgctgccgccgccgccgctgctcatcttgcgcgctgtgcccccggcggtgtccctgtgttgcggatcgcgggtgggccaggtggatgcgagggcgacccgtttggactccggccggagccgccggatccctggtcggtgtcagtgccgtttactctgggccccacgtgtcagtaccgtctgtagatgacaacaacccgtcgtccacagtcatgtccaaaatatcctttcttcttttttttcgattcggatatctatcttccttttttttttccaaaaatcttcttgacgcaccagcgcgcacgtttgtggtaaacgccgacacgtcggtcccacgtcgatagaccccacccaccagtgagtagcgtgtacgtattcgggggtgacggacgtgtcgccgtcgtcttgctagtcccattcccatctgagccacacatctctgaacaaaaaaaaggagggaggcctccacgcacatccccctccgtgccacccgccccaaaccctcgcgccgcctccgagacagccgccgcaaccatggccaccgccgccgccgcgtctaccgcgctcactggcgccactaccgctgcgcccaaggcgaggcgccgggcgcacctcctggccacccgccgcgccctcgccgcgcccatcaggtgctcagcggcgtcacccgccatgccgatggctcccccggccaccccgctccggccgtggggccccaccgagccccgcaagggtgctgacatcctcgtcgagtccctcgagcgctgcggcgtccgcgacgtcttcgcctaccccggcggcgcgtccatggagatccaccaggcactcacccgctcccccgtcatcgccaaccacctcttccgccacgagcaaggggaggcctttgccgcctccggctacgcgcgctcctcgggccgcgtcggcgtctgcatcgccacctccggccccggcgccaccaacctagtctccgcgctcgccgacgcgctgctcgattccgtccccatggtcgccatcacgggacaggtggcgcgacgcatgattggcaccgacgccttccaggagacgcccatcgtcgaggtcacccgctccatcaccaagcacaactacctggtcctcgacgtcgacgacatcccccgcgtcgtgcaggaggctttcttcctcgcctcctctggtcgaccagggccggtgcttgtcgacatccccaaggacatccagcagcagatggcggtgcctgtctgggacaagcccatgagtctgcctgggtacattgcgcgccttcccaagccccctgcgactgagttgcttgagcaggtgctgcgtcttgttggtgaatcgcggcgccctgttctttatgtgggcggtggctgcgcagcatctggtgaggagttgcgacgctttgtggagctgactggaatcccggtcacaactactcttatgggcctcggcaacttccccagcgacgacccactgtctctgcgcatgctaggtatgcatgggacggtgtatgcaaattatgcagtggataaggccgatctgttgcttgcacttggtgtgcggtttgatgatcgcgtgacagggaagattgaggcttttgcaagcagggctaagattgtgcacgttgatattgatccggctgagattggcaagaacaagcagccacatgtgtccatctgtgcagatgttaagcttgctttgcagggcatgaatgctcttcttgaaggaagcacatcaaagaagagctttgactttggctcatggaacgatgagttggatcagcagaagagggaattcccccttgggtataaaacatctaatgaggagatccagccacaatatgctattcaggttcttgatgagctgacgaaaggcgaggccatcatcggcacaggtgttgggcagcaccagatgtgggcggcacagtactacacttacaagcggccaaggcagtggttgtcttcagctggtcttggggctatgggatttggtttgccggctgctgctggtgcttctgtggcaaacccaggtgtcactgttgttgacatcgatggagatggtagctttctcatgaacgttcaggagctagctatgatccgaattgagaacctcccagtgaaggtctttgtgctaaacaaccagcacctggggatggtggtgcagttggaggacaggttctataaggccaacagagcgcacacatacttgggaaacccagagaatgaaagtgagatatatccagatttcgtgacgatcgccaaagggttcaacattccagcggtccgtgtgacaaagaagaacgaagtccgcgcagcgataaagaagatgctcgagactccagggccgtacctcttggatataatcgtcccacaccaggagcatgtgttgcctatgatccctagtggtggggctttcaaggatatgatcctggatggtgatggcaggactgtgtactgactagctagtcagttaacagatctgccagatcctcggtgtacaaataacccgtcttatcctatgagacgggccggcgtcagtgtgttctggaggaatttttatgtcagagcctttttctttgtgtgcttgatgtagatgccaagggaagcttattggctgttgaagcttgatgcaaaataaattatggaactctgttttttgtttatctaataataactagcaaatatgcttccattgcattgaaactaacagccttttgtgtttccaagttttattttgtgacaatgtcatctatttcaattagttgtggaatcggaaacttgcaggactaacttggaaactccaatccctcagcatcctggactttttcctggtgtaatccatgtagatattattttaatcatcattttagttctggaggtttttccatctccggttttgctcccctttcttcaaaaaaaaaaaaaaaatgccgtaggcgccgcaacgcccacctgttgttcaaactcatgggcacgagtggctcgaagattttatacaacaattgctgtagtttcaccgttgctggtgaagaagcatttttttaaaaaaatatagtggtattcattttaattagtttagttgtgcagcgagcaaaatttggacatgctctgctcggaatctgatcgacctagacacagattagcagcagtagctttgtcatctgttccaagagttgcgatctgatagaagaaaaaaaaaccttcccttcaatgtaaaaccgaaactaacaagaaagaagcacagtgccgtttaggcaagtatggagtacgtattaagcatgtagaaggccatgcatgaaccactaacaagaaagaagcgcagtgccattcaggcaagcataagcatgtagattggcatgcatgaacaactaacagtagatcgtctctggtctgattagaagttttttgggaagccaagaaatcatgtacaactggttccatctcaaattccgtggcaaaaagaggcctaagcaacatacctcgagtagatcacattcaagcttggtcacccggtccgtcaatattctgattccgatgacttcgtaggttcctagctcaagccgctcgtgtccaagcgtcacttacgattagctaatgattacggcatctaggaccgactagtggcgcgccgactagctagctaaggtaccgagctcgaattcattccgattaatcgtggcctcttgctcttcaggatgaagagctatgtttaaacgtgcaagcgctactagacaattcagtacattaaaaacgtccgcaatgtgttattaagttgtctaagcgtcaatttgtttacaccacaatatatcctgccaccagccagccaacagctccccgaccggcagctcggcacaaaatcaccactcgatacaggcagcccatcagtccgggacggcgtcagcgggagagccgttgtaaggcggcagactttgctcatgttaccgatgctattcggaagaacggcaactaagctgccgggtttgaaacacggatgatctcgcggagggtagcatgttgattgtaacgatgacagagcgttgctgcctgtgatcaaatatcatctccctcgcagagatccgaattatcagccttcttattcatttctcgcttaaccgtgacaggctgtcgatcttgagaactatgccgacataataggaaatcgctggataaagccgctgaggaagctgagtggcgctatttctttagaagtgaacgttgacgatcgtcgggcccaggtagaatccgcctgagtcgcaagggtgacttcgcctatattggacgacggcgcgcagagggcgacctctttttgggttacgattgtaggattatcactaaaacaatacatgaacatattcaaatggcaatctctctaaggcattggaaataaatacaaataacagttgggtggagtttttcgacctgtgggcgttaaccttctgttaacctaaaagctcttgcccaaacagcagaatcggcgctaattgccagcggcggaacttttccagtttcgcgaaaaatatcgccactggcaaggaatgggtttgagatggcgaagtctgtcctaaaagcagcgcctgtagttgtagggttgacggccttgatggagcgtcatgccgatgccctctcgagccaacttcaagcacatcatcttaaggttttcccgccgcattccgagaagggcattcgaacattcgggccatcggaggcgtccaagctgctcggcgttggcgagtcatatttacggcagaccgcgtctgagatgccagagttgaatgttagcatgagcccgggtggcaggcgaatgttctcaattgaagatatccatgcgattcggaagtatatggatcaggtcggccgcgggaaccggcgctacctgccacatcgtcgaggcggcgagcagcttcaggttatctctgtgatgaatttcaaaggtgggtcgggtaagaccaccaccgccgcgcatctggcgcagtacctcgctatgcgcggatatcgagtcttggccattgatctcgatcctcaagcgagcctttctgcactctttgggagccaaccggagacggacgttggcccgaacgaaacgctctacggcgctataaggtatgatgatgagcaggtggcaatcgaacgagtcgtccgagggacttacattcccgacctccacctgattcctggtaatcttgagctgatggagtttgaacacgatacgccacgcgcgctgatgaaccgcaaagagggcgacacgctcttttatggtcgcatcagccaagtaattgaagatatcgcggataactatgacgtcgtggtcatcgactgccctccccagcttgggtatctcacgctatccgcattgactgcggcgacgtccattcttgtcacggtccatccgcagatgctggatgtgatgtcgatgaaccagtttctggcaatgacatcgaaccttttgcgtgaaatcgagaatgctggcgccaagttcaagtttaattggatgcgctatctgataacccgtttcgaaccgagcgacggaccacagaaccaaatggtaggttatctgcggtcgatttttggcgaaaatgtcctcaattttccgatgcttaaaaccaccgcggtttcggacgctggcctgacaaaccagactctattcgaagtggagcgtggcctgttcacgcgctcgacctatgatcgagccttggaggcgatgaacgccgtcaacgacgagatcgaaacactgatcaaaaaagcatggggtagg

SEQ ID NO: 65 - DNA, 20470 bp, Artificial sequence
  PHP96036
gtttacccgccaatatatcctgtcaaacactgatagtttaaactgaaggcgggaaacgacaatctgatcatgagcggagaattaagggagtcacgttatgacccccgccgatgacgcgggacaagccgttttacgtttggaactgacagaaccgcaacgttgaaggagccactcagcaagctggtacgattgtaatacgactcactatagggcgaattgagcgctgtttaaacgctcttcaactggaagagcggttacgctgtttaaacgctcttcaactggaagagcggttactaccggttcactagctagctgctaatcgagctagttaccctatgaggtgacatgaagcgctcacggttactatgacggttagcttcacgactgttggtggcagtagcgtacgacttagctatagttccggacttacccttaagcgatttaaatctgcggttaccgaattcgagctcggtacctagtacccttgtacttttggtttcacctgcatagagaaaacccacaagaatatgacagtctgatttgtcagtctcattctcaagcaacatttctctatccgttactttcatggtgaataacacaatccatcatcaatactttgtgttactcagaaactgaaagttattccgagtcttgcatatctttggacctactcgtttttctaccattattgctgattgttaagctctcgctacttgaatcggcattgttggagtgggaaggttcaaaaaattggagttatgactagttgtctctttctatgtacgatggagaaaatgaataaacaactgagaaaatggctcttgtttagttgatgatgctcttaagctttccactggttgccatatatgatttgggcatttcactttgatcttaatgggccttgtaaagcccaagactcatgattatctttagttgatgctcttaattaggtgtgggcaaataattcaaactgtatgtacccgaccaaaaccaaagcaaaaataatcgaaccaaaccgaaaatttaaaaataaccgaatgaaaactaaatcctataactgaaagaactgaaaccgaatcaaaatatttaatgtaaccaaaaatatccgaaatataattatattgtcaaaaatattaataatttctagattaaataattaaaaatacttaaaaatttatataaaatagtaaaaatactcgaaaataaccacaaatattcaaaaacaaccgaaatatcccaaaatattcaaagcaaaataaccgaatggataccaaattttaaaaccgaaaaaactggaacaaaaccaaaatcgaaccaaaatttcaaaaatcgaataaatactaaactttagaacaaaaaaaaacgataaccgaatgtatacgaaccaaagccgaattagataaccgaacgtccaggactactcttaatctttccgccacttatgatttgggctattactttgtttataatgagccttttcaagctcaagttcatgattgtccgtgagatgagaaactgacttgttggattcgaaaccctagctagtattggttaatacttaatacataaatgacctgcattgacatcatcatccaagaaaataaaaattgtatgcttgagatatttagttttcctagctaggttttctttattttagtaccgaatctttaggtgtgccacgttaatttagacccattttttcatacttaccaactgagtctagtttaatcatgactataatcgtataaaatgattcagtcgacgtcattgcgaacgtatataaaatcatccaaattgacgtcattccaaagaggtaagcatgcttatctaagagtccgagcatactaaacaagacgacattttatttgcactccaaatcaaattttgtattgcctaaagaaaaacaatcaaactcaagtttcttaaaattaatttcattcaaactaatcactttcaatatctcacatattattcatgccatttctatttgtctaaacatgatttaaaaaaaaaagtaaaatacaaagattactatgcaaaaactctataaaaaaaaattcaaatttcttatttatttgtgacatcaaattttcaaaataatttttttaattatcggttgatccggtcagtcgataaaaacataaactttcagcgaccgttaaaactttcctactaccgatttagagaaaatcttagcttgaaacgtaattgtaacctgccttcatgcaagtcgcaagatatgtcatcctaagttgtatatgttttctcaaaagatgtatttacttgagaaaatacgtttcaacgttgatggacaaccaattaagaatcaagcacctttcgtaatcaatttaggcttatcgtctaaggtatactgatttacgacagttgactagacttataaggaacaaaataatagaatagtttctaaacacttcacctaatcatagagactaagatggtaattcgtaaacgacaaagcctagtgacactgtccattgtaaaattccacatcatattagtattaaacatatacatgtagtttcctgaacacatgtagtatcaaacacacttcgtggcttcttcctcgaaacctgcggccgcgctatagttccggacttacccttaagataacttcgtatagcatacattatacgaagttatgggcccacgcgtgaagagcggttaccagagctggtcacctttgtccaccaagatggaactgtcttcggccagaatggccatctggattcagcaggcctagaaggccatttatcgctatcaactttgtatagaaaagttgggccgaattcgagctcggtacggccagaatggcccggaccgaagcttgcggccgcacactgatagtttaaactgaaggcgggaaacgacaatctgatcatgagcggagaattaagggagtcacgttatgacccccgccgatgacgcgggacaagccgttttacgtttggaactgacagaaccgcaacgttgaaggagccactcagccgcgggtttctggagtttaatgagctaagcacatacgtcagaaaccattattgcgcgttcaaaagtcgcctaaggtcactatcagctagcaaatatttcttgtcaaaaatgctccactgacgttccataaattcccctcggtatccaattagagtctcatattcactctcccgggggatctcgactctagaggatcgctcaggaaggccgctgagatagaggcatggcggccaatgcgggcggcggtggagcgggaggaggcagcggcagcggcagcgtggctgcgccggcggtgtgccgccccagcggctcgcggtggacgccgacgccggagcagatcaggatgctgaaggagctctactacggctgcggcatccggtcgcccagctcggagcagatccagcgcatcaccgccatgctgcggcagcacggcaagatcgagggcaagaacgtcttctactggttccagaaccacaaggcccgcgagcgccagaagcgccgcctcaccagcctcgacgtcaacgtgcccgccgccggcgcggccgacgccaccaccagccaactcggcgtcctctcgctgtcgtcgccgccgccttcaggcgcggcgcctccctcgcccaccctcggcttctacgccgccggcaatggcggcggatcggctgtgctgctggacacgagttccgactggggcagcagcggcgctgccatggccaccgagacatgcttcctgcaggactacatgggcgtgacggacacgggcagctcgtcgcagtggccacgcttctcgtcgtcggacacgataatggcggcggccgcggcgcgggcggcgacgacgcgggcgcccgagacgctccctctcttcccgacctgcggcgacgacggcggcagcggtagcagcagctacttgccgttctggggtgccgcgtccacaactgccggcgccacttcttccgttgcgatccagcagcaacaccagctgcaggagcagtacagcttttacagcaacagcaacagcacccagctggccggcaccggcaaccaagacgtatcggcaacagcagcagcagccgccgccctggagctgagcctcagctcatggtgctccccttaccctgctgcagggagtatgtgagagcaacgcgagctgccactgctcttcactgatgtctctggaatggaaggaggaggaagtgagcatagcgttggtgcgttgctgtcaagggcgaattcacatggttaacctagacttgtccatcttctggattggccaacttaattaatgtatgaaataaaaggatgcacacatagtgacatgctaatcactataatgtgggcatcaaagttgtgtgttatgtgtaattactagttatctgaataaaagagaaagagatcatccatatttcttatcctaaatgaatgtcacgtgtctttataattctttgatgaaccagatgcatttcattaaccaaatccatatacatataaatattaatcatatataattaatatcaattgggttagcaaaacaaatctagtctaggtgtgttttgcgaatgcggccgccaccgcggtggagctcgaattccggtccgggcctagaaggccagcttcaagtttgtacaaaaaagcaggctccggccagaatggcccggaccgggttaccgaattcgagctcggtaccctgggatccgatatcgatgggccctggccgaagcttgcatgcctgcagtgcagcgtgacccggtcgtgcccctctctagagataatgagcattgcatgtctaagttataaaaaattaccacatattttttttgtcacacttgtttgaagtgcagtttatctatctttatacatatatttaaactttactctacgaataatataatctatagtactacaataatatcagtgttttagagaatcatataaatgaacagttagacatggtctaaaggacaattgagtattttgacaacaggactctacagttttatctttttagtgtgcatgtgttctcctttttttttgcaaatagcttcacctatataatacttcatccattttattagtacatccatttagggtttagggttaatggtttttatagactaatttttttagtacatctattttattctattttagcctctaaattaagaaaactaaaactctattttagtttttttatttaataatttagatataaaatagaataaaataaagtgactaaaaattaaacaaataccctttaagaaattaaaaaaactaaggaaacatttttcttgtttcgagtagataatgccagcctgttaaacgccgtcgacgagtctaacggacaccaaccagcgaaccagcagcgtcgcgtcgggccaagcgaagcagacggcacggcatctctgtcgctgcctctggacccctctcgagagttccgctccaccgttggacttgctccgctgtcggcatccagaaattgcgtggcggagcggcagacgtgagccggcacggcaggcggcctcctcctcctctcacggcaccggcagctacgggggattcctttcccaccgctccttcgctttcccttcctcgcccgccgtaataaatagacaccccctccacaccctctttccccaacctcgtgttgttcggagcgcacacacacacaaccagatctcccccaaatccacccgtcggcacctccgcttcaaggtacgccgctcgtcctccccccccccccctctctaccttctctagatcggcgttccggtccatggttagggcccggtagttctacttctgttcatgtttgtgttagatccgtgtttgtgttagatccgtgctgctagcgttcgtacacggatgcgacctgtacgtcagacacgttctgattgctaacttgccagtgtttctctttggggaatcctgggatggctctagccgttccgcagacgggatcgatttcatgattttttttgtttcgttgcatagggtttggtttgcccttttcctttatttcaatatatgccgtgcacttgtttgtcgggtcatcttttcatgcttttttttgtcttggttgtgatgatgtggtctggttgggcggtcgttctagatcggagtagaattctgtttcaaactacctggtggatttattaattttggatctgtatgtgtgtgccatacatattcatagttacgaattgaagatgatggatggaaatatcgatctaggataggtatacatgttgatgcgggttttactgatgcatatacagagatgctttttgttcgcttggttgtgatgatgtggtgtggttgggcggtcgttcattcgttctagatcggagtagaatactgtttcaaactacctggtgtatttattaattttggaactgtatgtgtgtgtcatacatcttcatagttacgagtttaagatggatggaaatatcgatctaggataggtatacatgttgatgtgggttttactgatgcatatacatgatggcatatgcagcatctattcatatgctctaaccttgagtacctatctattataataaacaagtatgttttataattattttgatcttgatatacttggatgatggcatatgcagcagctatatgtggatttttttagccctgccttcatacgctatttatttgcttggtactgtttcttttgtcgatgctcaccctgttgtttggtgttacttctgcaggtcgactctagaggatccatggaggagatcacccaacactttggagttggcgcaagcagccacggccatggccacggccagcaccaccatcatcaccaccaccaccacccgtgggcatcctccctcagcgccgtcgtagcgccgctgccgccgcaaccgccaagcgcaggcctgccgctgaccctgaacacggtggcggccactgggaacagcggcggtagcggcaacccggtgctgcagcttgccaacggtggcggcctcctcgacgcatgcgtcaaggcgaaggagccctcgtcgtcgtctccctacgcaggcgacgtcgaggccatcaaggccaagatcatctcgcacccacactactactcgctcctcactgcctacctcgagtgcaacaaggtgggggcaccaccggaggtgtcggcgaggctgacggagatagcgcaggaggtggaggcgcggcagcgcacggcgctcggcggcctggccgctgcgacggagccggagctggaccagttcatggaggcgtaccacgagatgctggtgaagttcagggaggagctgacgaggccgctgcaggaggcgatggagttcatgcgaagggtggagtcgcagctgaactcgctttccatctccggaaggtcgctgcgcaacatcctttcatctggctcttctgaggaggatcaagaaggtagcggaggagagaccgagctccctgaagttgatgcacatggtgtggaccaagagctgaagcaccatctcctgaagaaatacagtggctatctaagctcgctcaagcaagaactgtcaaagaagaagaagaaagggaagctccccaaggaggctcgccagcagctccttagctggtgggatcagcactacaaatggccttacccctcagagactcagaaggtggcactggctgagtctaccgggcttgacctgaagcagatcaacaactggttcatcaaccagcggaagcggcactggaagccatccgaggagatgcaccacctgatgatggacgggtaccacaccaccaatgccttctacatggacggccacttcatcaacgacggcgggctgtaccggctcggctagccaccggtatctcgcttccattgttaacctagacttgtccatcttctggattggccaacttaattaatgtatgaaataaaaggatgcacacatagtgacatgctaatcactataatgtgggcatcaaagttgtgtgttatgtgtaattactagttatctgaataaaagagaaagagatcatccatatttcttatcctaaatgaatgtcacgtgtctttataattctttgatgaaccagatgcatttcattaaccaaatccatatacatataaatattaatcatatataattaatatcaattgggttagcaaaacaaatctagtctaggtgtgttttgcgaattgcaatgatcatcatgacagatctgcgcgcgatcgatgggcacccagctttcttgtacaaagtggccgttaacggatcggccagaatggcccggaccgggttaccgaattcgagctcggtaccctggttcacaaactcaatacaacacacagtggagtagggtattacgctccggcggcccgaaccactctaaatccttgtgtcctcgtgtgctcttccaccattaatgactgtaattgcagggacacgaagagttgtagcgcttttgccaacaagatccgctatatgctagtagagtggaacctgcacagcaacaagcatccaataatctgagaataagaattatgtgtggtgatggttctcatctctgcaactcgccattttcgcgagagaaccaaatccaagttggtgaagatcatgatttgggctcatgggctggcatagtagctattacctttgcaattgtggttcgaatctatccgatattctccttttcagggagagctaatgcttatgcttattgggtattttggtttgacactgcttcacgcccaaaaaaaggcaactatgtctgagttggatatggcccaaaaaaaggcagctatgtctgagttggatatggaagtcttctttcgtttagggtgaagtaagaccaagctcatgagcttattatcttaggtcggaacaaattagttgataggcatggcacatttatcaaattataatgattttaacagaaaagcaacacctctttttcagcagcaccagctttgcaagctgcaattgacactccaagcatagtatttgctccaaactcagcctgcatttcgcacaatatcatatctatttccatttggataaaatatattttccagaaatatgggaacagaatcaagatacagaaaaaagttgtggtagtagtggtaagtggaaacacaagtacagtgaaaagatagcattatttctgaacagtcaaattaaccgaaataagtagtatcacatactgcccctaaattgactacacccaatgtaaagaattgcttgagcatattgagccatcagttgtttgtttgtgtaacggatttgacaatgcagagttcaggagcaaaaaaccgcaaaggagagaaagagggaaaggatctcctagtatcccaccttgtggcgcgccctgtcaagtgcatgatggcctggtcgatctgcgtctgctgctgcggttccatcccaacgagtgcctccgacaccttgtcgttgatcacccgcaccgcgtaggcgacccccctggcgaggaacttccgcctctcggaggccccggccgcgtcggcggcggcgccctcgagcgcgcccacgctagccgtagatgctcggtgcacggccttgttggtgtgcaactcgacctcaacggccggtgcgctacgcccgtcaaggatctggcgcgcccgcaccctcgtgatcacggtgggcgcctcccgcctcatgtggccgacgatgaaaagcgccgggttaggggccttggcgcgcaccgccgtattcagggcctcctcgctcttgcgcgagagcaggtgcttccccaggtactcctgcactgacaaggctgccacagcggtggaatttgtcctcacgacttcgccacgtcgtcctcacctccctggcttcccacgactccgccgtatcgaggtgctcggtgggtcgtcttaatccgaagtccgaactaggaagacgagacagagaggtctgaggaatgggcctcgtttgatgttgagctgaattatttttccagcataagcccaggtcttggtccatgaacaaaattactagaaacccagcccagtactacgatctaaaagagggactgccactggatagctctctctagcattctccacgctccaatacagcggcgtcgtgtctatccgggtctatccgcgaacacgtgagaactctccagaaactgctttctcctccacttcatctctctcgctttccctctataaaaagaccccttctaggaattgagggagacagcaagcaccaagcagcgatccgaagctcaatcaattcactcaaacctcttccccaaatcttcgattagatcttcgttgacaagaagactagaaccgaacctgacatgtccaacctgctcacggttcaccagaaccttccggctcttccagtggacgcgacgtccgatgaagtcaggaagaacctcatggacatgttccgcgacaggcaagcgttcagcgagcacacctggaagatgctgctctccgtctgccgctcctgggctgcatggtgcaagctgaacaacaggaagtggttccccgctgagcccgaggacgtgagggattaccttctgtacctgcaagcgcgaggtttgtttctgcttctacctttgatatatatataataattatcattaattagtagtaatataatatttcaaatatttttttcaaaataaaagaatgtagtatatagcaattgcttttctgtagtttataagtgtgtatattttaatttataacttttctaatatatgaccaaaacatggtgatgcctaggtctggcagtgaagaccatccagcaacaccttggacaactgaacatgcttcacaggcgctccggcctcccgcgccccagcgactcgaacgccgtgagcctcgtcatgcgccgcatcaggaaggaaaacgtcgatgccggcgaaagggcaaagcaggccctcgcgttcgagaggaccgatttcgaccaggtccgcagcctgatggagaacagcgacaggtgccaggacattaggaacctggcgttcctcggaattgcatacaacacgctcctcaggatcgcggaaattgcccgcattcgcgtgaaggacattagccgcaccgacggcggcaggatgcttatccacattggcaggaccaagacgctcgtttccaccgcaggcgtcgaaaaggccctcagcctcggagtgaccaagctcgtcgaacgctggatctccgtgtccggcgtcgcggacgacccaaacaactacctcttctgccgcgtccgcaagaacggggtggctgcccctagcgccaccagccaactcagcacgagggccttggaaggtattttcgaggccacccaccgcctgatctacggcgcgaaggatgacagcggtcaacgctacctcgcatggtccgggcactccgcccgcgttggagctgctagggacatggcccgcgccggtgtttccatccccgaaatcatgcaggcgggtggatggacgaacgtgaacattgtcatgaactacattcgcaaccttgacagcgagacgggcgcaatggttcgcctcctggaagatggtgactgaggtacccaacctagacttgtccatcttctggattggccaacttaattaatgtatgaaataaaaggatgcacacatagtgacatgctaatcactataatgtgggcatcaaagttgtgtgttatgtgtaattactagttatctgaataaaagagaaagagatcatccatatttcttatcctaaatgaatgtcacgtgtctttataattctttgatgaaccagatgcatttcattaaccaaatccatatacatataaatattaatcatatataattaatatcaattgggttagcaaaacaaatctagtctaggtgtgttttgcgatccgatatcgaattggccacggtaccagctgctgctgttctagggttcacaagtctgcctatttgtcttccccaatggagctatggttgtctggtctggtccttggtcgtgtcccgtttcattgtgtactatttacctgtaatgtgtatccttaagtctggtttgatggtgtctgaaacgttttgctgtggtagagcagcatggaagaactataatgaataagtgatccctaatcattgtgtccaaattttgcttctgctatacccttttgtgctgtttcttatgttttgcttaaaaatttgatctgacaaacaaatttgtctaaattatgctcttgttctgactgtgtactgtacacatttgtattgctaccggtttggcacatagttttctctttgattgcagatcaaacccttctgattgcagattgcttggctatggctgatgtgctcactgttcttctttagcttgtatattgctgatggtggcttggctacggctgaaaaagttgctgctgcgccgacttggcaactgttgctccagtaatgctttgtcctctcttcctagccgccgacttggcacttggcagctgttgctcctgtaatgcgttgttatctcttatctcttgagatgtactatgattttgaggctgtttgacttgtgccagattgccagtgctgatgctatattatctcaggtttttatgctagtatatgttttactgtgtgctgcctgtgtcgagttacgtaatctattgaaccgctatgcgtgttgatgccctgttgttgcttgccagattgatgcccctgttgcttgcagcttgcaagctgtagtgaaatcctaaaattccaaaccaaatctattctgaacttttgaagatctgtgatgtccggaagaaaagattcaaacagataaacgggactctccagaatctataaaataaatgatcgacaaacgctttgctttggtaggcttcaagcttggtcacccggtccgggcctagaaggccagcttcggccgccccgggcaactttattatacaaagttgatagataaatcagatatctggttcctaaggacccggcggaccgattaaactgattcggtccgacgcgttacctaataacttcgtatagcatacattatacgaagttattagctaactaactagtaagcttaagccatgggtcgacggatccgttaactagcgtggcatttggcaccgccgcacactatgcgagctaggagtgctagtttacagatgaaactatgaaaccaagaaaacacaattgtccgtagctagcgcgtggcgtcgtgtcaagcttcacacagtatcttcgttcttcactataaatcgcgcctgttgttcgtgagacccaccaccgtggataacagtcccctaataataagcgatcaacagcactgctgatggctgaacaccgaggcgccgccgcgcgtaaccatccgccggagcagcccgtcgtgccggcgaacgacgccttccccgaccgcgcccagcagctctgcctcgacgccgggcgcgcgctcgcgatgtgcggcgtgctcgtcgccgtccctcccgcattttacgcgtcgacgtcgcggacgacaccgcacttgccttcgtcggcttcgtcctctggatcatcggtgcgtggctgtgcctcctggcgctcacgcccttggctccacgggcggtgagggcgggcggggccgccgccagcaccttgctgatcaggtgcctgtccctttcatgaactactagcgcccgcgcccgcggccgccgggcacaagagaacacatcgatgttcgctgcgtacgtcagcaataaggcactctttgtcagtagtcgagtgcatatgttgggtgtttgccctgggagatttcaagtgttgtggccattatcccgcaggataaaaaatcggcggcttttggattgatacggaaaataacgatgtttcatgctcgtgttgtgtgtgtgacatcttgtcagccaagtttttaaccgttgctactccccctctgtgggctcagtgtgtggaccggaatacgtcgtacataggccgtagcctaagcccaatatgccgtttttcaggttggcctgtgtgacgacaagcgggtctcaaaagcccatcacgcaactggcctgcaattattggaggagagcgcgtcgagttggttccagaggctgcgtggtggggccggactctgcgacgacctctcgttcgcgtccgatttggttgccgtgagccgtgacgtaacgcctccttccgttcctccctatataagttccacccccgggtccggtttccccaagccccagtgacccccgatcccgatcgcgaaatctccgcacccgccggcaagggaccgaagcaagcctctctcccgaccgtcgcatcaaggtacgcgtccgctcgatctgtcctcttccttctcgatttgacttgctgtggtgcccgatcacgggatcagaatcgcaccagtgtagatttcgcatgttctaagatgtgttagtttccaggctaatccagttctcttgacgcccgatccgatcgagctccgtgtttatttcagcctaatcgtagtattcccctaaaatttcctcattagggggttcgcaagattgttggtcgacaggttcacttatgctcgatcgcttacttttagtcgattcatgctgcgtactattgttgccccccgtggttttatcttttctcgtgtgaaatccagtagatatagtagatatcgtagcattaggttttaattcaatcgattgattattgtatcatcaaaattgagaagttcgaatcatgcctatcatgctgcctcaaccgaaatcctgtatattgaagtttcaattcaattgattgatcattcattagattcaaccaaaatctagaaggttagatgacgcatgtcatgctgcctgcgtagtttacctttgatctgtttatgattaccttatcagtaggatatttgtgattttgggaagtagcactaactgattcatgctgacatgatgttccctttcagattatactgttgagtcctatctaattgatgctttgtatgctatatgaatacgtcatggtaaattagcagttaattagcatattagcaattgggcgtacctcatcaggattgctcttgtagatgtgtgtggtgatgtttcttgttcaattcatgttctgctttaaaagtatgtgttctctgtttgttaattaagattcatggttataatgatttggacctaattaatcagggttgcccttttagatgcgtggttacttgttgagttcatttttttcctgctatagttgtatgcgtttgttcattcatggttagatttgatttgtttcttctctattccatgccttccatatacttcaattgtagcttaacatgagatttctgtatatgcaggtcgaccgccggggatccacacgacaccatggcccagtccaagcacggcctgaccaaggagatgaccatgaagtaccgcatggagggctgcgtggacggccacaagttcgtgatcaccggcgagggcatcggctaccccttcaagggcaagcaggccatcaacctgtgcgtggtggagggcggccccttgcccttcgccgaggacatcttgtccgccgccttcatgtacggcaaccgcgtgttcaccgagtacccccaggacatcgtcgactacttcaagaactcctgccccgccggctacacctgggaccgctccttcctgttcgaggacggcgccgtgtgcatctgcaacgccgacatcaccgtgagcgtggaggagaactgcatgtaccacgagtccaagttctacggcgtgaacttccccgccgacggccccgtgatgaagaagatgaccgacaactgggagccctcctgcgagaagatcatccccgtgcccaagcagggcatcttgaagggcgacgtgagcatgtacctgctgctgaaggacggtggccgcttgcgctgccagttcgacaccgtgtacaaggccaagtccgtgccccgcaagatgcccgactggcacttcatccagcacaagctgacccgcgaggaccgcagcgacgccaagaaccagaagtggcacctgaccgagcacgccatcgcctccggctccgccttgccctccggactcagatctcgatagagtcaacctagacttgtccatcttctggattggccaacttaattaatgtatgaaataaaaggatgcacacatagtgacatgctaatcactataatgtgggcatcaaagttgtgtgttatgtgtaattactagttatctgaataaaagagaaagagatcatccatatttcttatcctaaatgaatgtcacgtgtctttataattctttgatgaaccagatgcatttcattaaccaaatccatatacatataaatattaatcatatataattaatatcaattgggttagcaaaacaaatctagtctaggtgtgttttgcgaattgcggcgcccttactttaacgcctctaaccaacacccctttatctttataaggaacaataaacagaatttgccccactgttctaaatcacctaataatatccccagctaaaaacaataaaggtttcctagaattaagacaagcatgactgttcctccaggagggtttggaacattgttgcagtcttgcagatacgggcgaagggtgagaaacagagcggagggctggaggtgacctcggtagtcgacgccggagttgagcttgacaacgacggggcggcccctgatggacttgaggaagtccgatggcgtcttcaccgtcccgccggcgcccgaggcgggcctgtcgctgccgccgccgccgctgctcatcttgcgcgctgtgcccccggcggtgtccctgtgttgcggatcgcgggtgggccaggtggatgcgagggcgacccgtttggactccggccggagccgccggatccctggtcggtgtcagtgccgtttactctgggccccacgtgtcagtaccgtctgtagatgacaacaacccgtcgtccacagtcatgtccaaaatatcctttcttcttttttttcgattcggatatctatcttccttttttttttccaaaaatcttcttgacgcaccagcgcgcacgtttgtggtaaacgccgacacgtcggtcccacgtcgatagaccccacccaccagtgagtagcgtgtacgtattcgggggtgacggacgtgtcgccgtcgtcttgctagtcccattcccatctgagccacacatctctgaacaaaaaaaaggagggaggcctccacgcacatccccctccgtgccacccgccccaaaccctcgcgccgcctccgagacagccgccgcaaccatggccaccgccgccgccgcgtctaccgcgctcactggcgccactaccgctgcgcccaaggcgaggcgccgggcgcacctcctggccacccgccgcgccctcgccgcgcccatcaggtgctcagcggcgtcacccgccatgccgatggctcccccggccaccccgctccggccgtggggccccaccgagccccgcaagggtgctgacatcctcgtcgagtccctcgagcgctgcggcgtccgcgacgtcttcgcctaccccggcggcgcgtccatggagatccaccaggcactcacccgctcccccgtcatcgccaaccacctcttccgccacgagcaaggggaggcctttgccgcctccggctacgcgcgctcctcgggccgcgtcggcgtctgcatcgccacctccggccccggcgccaccaacctagtctccgcgctcgccgacgcgctgctcgattccgtccccatggtcgccatcacgggacaggtggcgcgacgcatgattggcaccgacgccttccaggagacgcccatcgtcgaggtcacccgctccatcaccaagcacaactacctggtcctcgacgtcgacgacatcccccgcgtcgtgcaggaggctttcttcctcgcctcctctggtcgaccagggccggtgcttgtcgacatccccaaggacatccagcagcagatggcggtgcctgtctgggacaagcccatgagtctgcctgggtacattgcgcgccttcccaagccccctgcgactgagttgcttgagcaggtgctgcgtcttgttggtgaatcgcggcgccctgttctttatgtgggcggtggctgcgcagcatctggtgaggagttgcgacgctttgtggagctgactggaatcccggtcacaactactcttatgggcctcggcaacttccccagcgacgacccactgtctctgcgcatgctaggtatgcatgggacggtgtatgcaaattatgcagtggataaggccgatctgttgcttgcacttggtgtgcggtttgatgatcgcgtgacagggaagattgaggcttttgcaagcagggctaagattgtgcacgttgatattgatccggctgagattggcaagaacaagcagccacatgtgtccatctgtgcagatgttaagcttgctttgcagggcatgaatgctcttcttgaaggaagcacatcaaagaagagctttgactttggctcatggaacgatgagttggatcagcagaagagggaattcccccttgggtataaaacatctaatgaggagatccagccacaatatgctattcaggttcttgatgagctgacgaaaggcgaggccatcatcggcacaggtgttgggcagcaccagatgtgggcggcacagtactacacttacaagcggccaaggcagtggttgtcttcagctggtcttggggctatgggatttggtttgccggctgctgctggtgcttctgtggcaaacccaggtgtcactgttgttgacatcgatggagatggtagctttctcatgaacgttcaggagctagctatgatccgaattgagaacctcccagtgaaggtctttgtgctaaacaaccagcacctggggatggtggtgcagttggaggacaggttctataaggccaacagagcgcacacatacttgggaaacccagagaatgaaagtgagatatatccagatttcgtgacgatcgccaaagggttcaacattccagcggtccgtgtgacaaagaagaacgaagtccgcgcagcgataaagaagatgctcgagactccagggccgtacctcttggatataatcgtcccacaccaggagcatgtgttgcctatgatccctagtggtggggctttcaaggatatgatcctggatggtgatggcaggactgtgtactgactagctagtcagttaacagatctgccagatcctcggtgtacaaataacccgtcttatcctatgagacgggccggcgtcagtgtgttctggaggaatttttatgtcagagcctttttctttgtgtgcttgatgtagatgccaagggaagcttattggctgttgaagcttgatgcaaaataaattatggaactctgttttttgtttatctaataataactagcaaatatgcttccattgcattgaaactaacagccttttgtgtttccaagttttattttgtgacaatgtcatctatttcaattagttgtggaatcggaaacttgcaggactaacttggaaactccaatccctcagcatcctggactttttcctggtgtaatccatgtagatattattttaatcatcattttagttctggaggtttttccatctccggttttgctcccctttcttcaaaaaaaaaaaaaaaatgccgtaggcgccgcaacgcccacctgttgttcaaactcatgggcacgagtggctcgaagattttatacaacaattgctgtagtttcaccgttgctggtgaagaagcatttttttaaaaaaatatagtggtattcattttaattagtttagttgtgcagcgagcaaaatttggacatgctctgctcggaatctgatcgacctagacacagattagcagcagtagctttgtcatctgttccaagagttgcgatctgatagaagaaaaaaaaaccttcccttcaatgtaaaaccgaaactaacaagaaagaagcacagtgccgtttaggcaagtatggagtacgtattaagcatgtagaaggccatgcatgaaccactaacaagaaagaagcgcagtgccattcaggcaagcataagcatgtagattggcatgcatgaacaactaacagtagatcgtctctggtctgattagaagttttttgggaagccaagaaatcatgtacaactggttccatctcaaattccgtggcaaaaagaggcctaagcaacatacctcgagtagatcacattcaagcttggtcacccggtccgtcaatattctgattccgatgacttcgtaggttcctagctcaagccgctcgtgtccaagcgtcacttacgattagctaatgattacggcatctaggaccgactagtggcgcgccgactagctagctaaggtaccgagctcgaattcattccgattaatcgtggcctcttgctcttcaggatgaagagctatgtttaaacgtgcaagcgctactagacaattcagtacattaaaaacgtccgcaatgtgttattaagttgtctaagcgtcaatttgtttacaccacaatatatcctgcca

SEQ ID NO: 66 - DNA, 20881 bp, Artificial sequence
  PHP96037
gtttacccgccaatatatcctgtcaaacactgcggccgcacttgaccgcggatggagccggagctgtggtgaggccatcgacgggaggtgggggagaacacagtctcagtgttctttgtgagtccgcaaggtttttagcttttctgtattaattaaggttgctgttggctgtagaatacggtcgtggaagagctgtatcggtagctactacgtaagctattatatactggaagtctggagctcgtcgatctccggtcgtcttcctccatttctcctcgtcttgctttgactgctgctaccatttgcttctgttttctgatgaagcatgccatgtcggccaccagtgtttgtgtggtttttgcagggaatggctttcaagtgctgtgattgaatggccctcgtcgtcctcggctgagctcacatggacgcgtcatgtgagtgagatatatgatcatatgatgagtggggttcgggtgagtgcgtacttgaagtaggatcccgctttcactcattcattcattggcctttaaaccgggaaattttcgcgaggagatggagggaagcaagcagggtgacgagtgcagagtgccgcgagcgctttgtcaaaaggcaccgccgtaggcaaaaaaatcaatggccctgactgactcgatggtagtactactgtagagactagagagggttgctccccatatcttcgtgtgacttttactccagcattgcatttccgtcattgagacgttaattaatagcagctttcgggacagatgactgtggccatgtttcgtcacggccgcttcgtgccagctgggggtactatagtactgtgattttgttagtaaaaactttcattaggccaccattgacgaccgggccttcgcttttgctgcgctaattaaccatttcccggcgaccgaagggaacatgaacatgccccgacacatgagggcatgaggactagtgttctccctgtcgttcgttgacttgactagtgatagtttaaacgctcttcaactggaagagcggttactaccggttcactagctagctgctaatcgagctagttaccctatgaggtgacatgaagcgctcacggttactatgacggttagcttcacgactgttggtggcagtagcgtacgacttagctatagttccggacttacctagctaataacttcgtatagcatacattatacgaagttatggttaccgagctcccctggccgaagcttacactgatagtttaaactgaaggcgggaaacgacaatctgatcatgagcggagaattaagggagtcacgttatgacccccgccgatgacgcgggacaagccgttttacgtttggaactgacagaaccgcaacgattgaaggagccactcagccgcgggtttctggagtttaatgagctaagcacatacgtcagaaaccattattgcgcgttcaaaagtcgcctaaggtcactatcagctagcaaatatttcttgtcaaaaatgctccactgacgttccataaattcccctcggtatccaattagagtctcatattcactcccatggcggccaatgcgggcggcggtggagcgggaggaggcagcggcagcggcagcgtggctgcgccggcggtgtgccgccccagcggctcgcggtggacgccgacgccggagcagatcaggatgctgaaggagctctactacggctgcggcatccggtcgcccagctcggagcagatccagcgcatcaccgccatgctgcggcagcacggcaagatcgagggcaagaacgtcttctactggttccagaaccacaaggcccgcgagcgccagaagcgccgcctcaccagcctcgacgtcaacgtgcccgccgccggcgcggccgacgccaccaccagccaactcggcgtcctctcgctgtcgtcgccgccgccttcaggcgcggcgcctccctcgcccaccctcggcttctacgccgccggcaatggcggcggatcggctgtgctgctggacacgagttccgactggggcagcagcggcgctgctatggccaccgagacatgcttcctgcaggactacatgggcgtgacggacacgggcagctcgtcgcagtggccacgcttctcgtcgtcggacacgataatggcggcggccgcggcgcgggcggcgacgacgcgggcgcccgagacgctccctctcttcccgacctgcggcgacgacggcggcagcggtagcagcagctacttgccgttctggggtgccgcgtccacaactgccggcgccacttcttccgttgcgatccaacagcaacaccagctgcaggagcagtacagcttttacagcaacagcaacagcacccagctggccggcaccggcaaccaagacgtatcggcaacagcagcagcagccgccgccctggagctgagcctcagctcatggtgctccccttaccctgctgcagggagtatgtgagagcaacgcgagctgccactgctcttcactgatgtctctggaatggaaggaggaggaagtgagaacagatcattcgacaaagcagcattagtccgttgatcggtggaagaccactcgtcagtgttgagttgaatgtttgatcaataaaatacggcaatgctgtaagggttgttttttatgccattgataatacactgtactgttcagttgttgaactctatttcttagccatgccaagtgcttttcttattttgaataacattacagcaaaaagttgaaagacaaaaaaaaaacccccgaacagagtgctttgggtcccaagcttctttagactgtgttcggcgttccccctaaatttctccccctatatctcactcacttgtcacatcagcgttctctttccccctatatctccacgctctacagcagttccacctatatcaaacctctataccccaccacaacaatattatatactttcatcttcaactaactcatgtaccttccaatttttttctactaataattatttacgtgcacagaaacttagcaaggagagagagagcgggaatttaaatgctcggcgttaggcttttagtccgctaggtggctagaccgaggttaggacgctagttcactaggggcctagtggtgttttaagacgtcacggtcaccgcggccgcatcgagcagctggcttgtggggaccagacaaaaaaggaatggtgcagaattgttaggcgcacctaccaaaagcatctttgcctttattgcaaagataaagcagattcctctagtacaagtggggaacaaaataacgtggaaaagagctgtcctgacagcccactcactaatgcgtatgacgaacgcagtgacgaccacaaaactcgagcaacgagatcatgagccaatcaaagaggagtgatgtagacctaaagcaataatggagccatgacgtaagggcttacgcccatacgaaataattaaaggctgatgtgacctgtcggtctctcagaacctttactttttatgtttggcgtgtatttttaaatttccacggcaatgacgatgtgaccgtcgacccactaaaacattgctttgtcaaaagctaaaaaagatgatgcccgacagccacttgtgtgaagcatgagaagccggtccctccactaagaaaattagtgaagcatcttccagtggtccctccactcacagctcaatcagtgagcaacaggacgaaggaaatgacgtaagccatgacgtctaatcccattcgaaacgcgtggaccgaagcttgcatgcctgcagtgcagcgtgacccggtcgtgcccctctctagagataatgagcattgcatgtctaagttataaaaaattaccacatattttttttgtcacacttgtttgaagtgcagtttatctatctttatacatatatttaaactttactctacgaataatataatctatagtactacaataatatcagtgttttagagaatcatataaatgaacagttagacatggtctaaaggacaattgagtattttgacaacaggactctacagttttatctttttagtgtgcatgtgttctcctttttttttgcaaatagcttcacctatataatacttcatccattttattagtacatccatttagggtttagggttaatggtttttatagactaatttttttagtacatctattttattctattttagcctctaaattaagaaaactaaaactctattttagtttttttatttaataatttagatataaaatagaataaaataaagtgactaaaaattaaacaaataccctttaagaaattaaaaaaactaaggaaacatttttcttgtttcgagtagataatgccagcctgttaaacgccgtcgacgagtctaacggacaccaaccagcgaaccagcagcgtcgcgtcgggccaagcgaagcagacggcacggcatctctgtcgctgcctctggacccctctcgagagttccgctccaccgttggacttgctccgctgtcggcatccagaaattgcgtggcggagcggcagacgtgagccggcacggcaggcggcctcctcctcctctcacggcaccggcagctacgggggattcctttcccaccgctccttcgctttcccttcctcgcccgccgtaataaatagacaccccctccacaccctctttccccaacctcgtgttgttcggagcgcacacacacacaaccagatctcccccaaatccacccgtcggcacctccgcttcaaggtacgccgctcgtcctcccccccccccctctctaccttctctagatcggcgttccggtccatgcatggttagggcccggtagttctacttctgttcatgtttgtgttagatccgtgtttgtgttagatccgtgctgctagcgttcgtacacggatgcgacctgtacgtcagacacgttctgattgctaacttgccagtgtttctctttggggaatcctgggatggctctagccgttccgcagacgggatcgatttcatgattttttttgtttcgttgcatagggtttggtttgcccttttcctttatttcaatatatgccgtgcacttgtttgtcgggtcatcttttcatgcttttttttgtcttggttgtgatgatgtggtctggttgggcggtcgttctagatcggagtagaattctgtttcaaactacctggtggatttattaattttggatctgtatgtgtgtgccatacatattcatagttacgaattgaagatgatggatggaaatatcgatctaggataggtatacatgttgatgcgggttttactgatgcatatacagagatgctttttgttcgcttggttgtgatgatgtggtgtggttgggcggtcgttcattcgttctagatcggagtagaatactgtttcaaactacctggtgtatttattaattttggaactgtatgtgtgtgtcatacatcttcatagttacgagtttaagatggatggaaatatcgatctaggataggtatacatgttgatgtgggttttactgatgcatatacatgatggcatatgcagcatctattcatatgctctaaccttgagtacctatctattataataaacaagtatgttttataattattttgatcttgatatacttggatgatggcatatgcagcagctatatgtggatttttttagccctgccttcatacgctatttatttgcttggtactgtttcttttgtcgatgctcaccctgttgtttggtgttacttctgcaggtcgactttaacttagcctaggatccatggccactgtgaacaactggctcgctttctccctctccccgcaggagctgccgccctcccagacgacggactccacactcatctcggccgccaccgccgaccatgtctccggcgatgtctgcttcaacatcccccaagattggagcatgaggggatcagagctttcggcgctcgtcgcggagccgaagctggaggacttcctcggcggcatctccttctccgagcagcatcacaaggccaactgcaacatgatacccagcactagcagcacagtttgctacgcgagctcaggtgctagcaccggctaccatcaccagctgtaccaccagcccaccagctcagcgctccacttcgcggactccgtaatggtggcttcctcggccggtgtccacgacggcggtgccatgctcagcgcggccgccgctaacggtgtcgctggcgctgccagtgccaacggcggcggcatcgggctgtccatgattaagaactggctgcggagccaaccggcgcccatgcagccgagggtggcggcggctgagggcgcgcaggggctctctttgtccatgaacatggcggggacgacccaaggcgctgctggcatgccacttctcgctggagagcgcgcacgggcgcccgagagtgtatcgacgtcagcacagggtggagccgtcgtcgtcacggcgccgaaggaggatagcggtggcagcggtgttgccggcgctctagtagccgtgagcacggacacgggtggcagcggcggcgcgtcggctgacaacacggcaaggaagacggtggacacgttcgggcagcgcacgtcgatttaccgtggcgtgacaaggcatagatggactgggagatatgaggcacatctttgggataacagttgcagaagggaagggcaaactcgtaagggtcgtcaagtctatttaggtggctatgataaagaggagaaagctgctagggcttatgatcttgctgctctgaagtactggggtgccacaacaacaacaaattttccagtgagtaactacgaaaaggagctcgaggacatgaagcacatgacaaggcaggagtttgtagcgtctctgagaaggaagagcagtggtttctccagaggtgcatccatttacaggggagtgactaggcatcaccaacatggaagatggcaagcacggattggacgagttgcagggaacaaggatctttacttgggcaccttcagcacccaggaggaggcagcggaggcgtacgacatcgcggcgatcaagttccgcggcctcaacgccgtcaccaacttcgacatgagccgctacgacgtgaagagcatcctggacagcagcgccctccccatcggcagcgccgccaagcgcctcaaggaggccgaggccgcagcgtccgcgcagcaccaccacgccggcgtggtgagctacgacgtcggccgcatcgcctcgcagctcggcgacggcggagccctggcggcggcgtacggcgcgcactaccacggcgccgcctggccgaccatcgcgttccagccgggcgccgccagcacaggcctgtaccacccgtacgcgcagcagccaatgcgcggcggcgggtggtgcaagcaggagcaggaccacgcggtgatcgcggccgcgcacagcctgcaggacctccaccacctgaacctgggcgcggccggcgcgcacgactttttctcggcagggcagcaggccgccgccgctgcgatgcacggcctgggtagcatcgacagtgcgtcgctcgagcacagcaccggctccaactccgtcgtctacaacggcggggtcggcgacagcaacggcgccagcgccgtcggcggcagtggcggtggctacatgatgccgatgagcgctgccggagcaaccactacatcggcaatggtgagccacgagcaggtgcatgcacgggcctacgacgaagccaagcaggctgctcagatggggtacgagagctacctggtgaacgcggagaacaatggtggcggaaggatgtctgcatgggggactgtcgtgtctgcagccgcggcggcagcagcaagcagcaacgacaacatggccgccgacgtcgggcatggcggcgcgcagctcttcagtgtctggaacgacacttaagcgtacctagtggtacctgacatcttatagtctgcaacctctcgtgtctgaattcctatctttatcaagtgttattgcttccacgactataggacagctttcgtcgaaagcttttgctcatgtgatctcgaaggattcatctagtctgatttttcgtgacttgtatcggttttattggattcatccaacatatatcaataaaaaatgagttgtgtttcctttcttcctagttcagttaaaattatttccctcctgcgcttgtgctgtaattgtctgtgtacctgttgtttgtgactgtgttagttcccttggatatgatttcgtatttgatatgtacatggagatagcttagcttcattattggagtatgaagttagtatgacatagtcactctcctggaaaattgacactgcaaaccatatttttattctgaaccacaaatcctagtcagtccgctggcatatgccgtccgtttgctgaatccagaacgtgggtttggagatgtacggctgagatgcctctatgcgaaggggatttcgtggtgaaacgagatgggagtagagcaacgcccgtggaagatgcttcaaacttccacacttttgagcaacgatcggcagtagtaaggtagacgatttcaagatcaaagcatatgaagataaacaacatcaacaacaaaatttgttggggttctatagagagaaacagagctacatacatacactgttttgtatctaccatctgagatgatgaaaagatgaaaaactaaagaatgccccggcgccaacgccaggacacgccgcgcgcgcgtcacccgagccatctcttgacccagccggcgctgtatatttacacacgttgcagcatcgatcaccacctgttcgatcgcgtcgccgtcaccggcgcgccgcgacttattgaactagtctagggcgcggctaacaacctagcttagattgccttgtctaaacccttaggctaacgcgccactctagaaggccgatctccccgggttaccgagctccaccttgctagttggatattacctcttctcttcaaagtatccttgaacgctcaccggttatcaaatctctacactatagctctgtagtcttgctagatagttagttctttagctctctctagaggttcacaaactcaatacaacacacagtggagtagggtattacgctccggcggcccgaaccactctaaatccttgtgtcctcgtgtgctcttccaccattaatgactgtaattgcagggacacgaagagttgtagcgcttttgccaacaagatccgctatatgctagtagagtggaacctgcacagcaacaagcatccaataatctgagaataagaattatgtgtggtgatggttctcatctctgcaactcgccattttcgcgagagaaccaaatccaagttggtgaagatcatgatttgggctcatgggctggcatagtagctattacctttgcaattgtggttcgaatctatccgatattctccttttcagggagagctaatgcttatgcttattgggtattttggtttgacactgcttcacgcccaaaaaaaggcaactatgtctgagttggatatggcccaaaaaaaggcagctatgtctgagttggatatggaagtcttctttcgtttagggtgaagtaagaccaagctcatgagcttattatcttaggtcggaacaaattagttgataggcatggcacatttatcaaattataatgattttaacagaaaagcaacacctctttttcagcagcaccagctttgcaagctgcaattgacactccaagcatagtatttgctccaaactcagcctgcatttcgcacaatatcatatctatttccatttggataaaatatattttccagaaatatgggaacagaatcaagatacagaaaaaagttgtggtagtagtggtaagtggaaacacaagtacagtgaaaagatagcattatttctgaacagtcaaattaaccgaaataagtagtatcacatactgcccctaaattgactacacccaatgtaaagaattgcttgagcatattgagccatcagttgtttgtttgtgtaacggatttgacaatgcagagttcaggagcaaaaaaccgcaaaggagagaaagagggaaaggatctcctagtatcccaccttgtggcgcgccctgtcaagtgcatgatggcctggtcgatctgcgtctgctgctgcggttccatcccaacgagtgcctccgacaccttgtcgttgatcacccgcaccgcgtaggcgacccccctggcgaggaacttccgcctctcggaggccccggccgcgtcggcggcggcgccctcgagcgcgcccacgctagccgtagatgctcggtgcacggccttgttggtgtgcaactcgacctcaacggccggtgcgctacgcccgtcaaggatctggcgcgcccgcaccctcgtgatcacggtgggcgcctcccgcctcatgtggccgacgatgaaaagcgccgggttaggggccttggcgcgcaccgccgtattcagggcctcctcgctcttgcgcgagagcaggtgcttccccaggtactcctgcactgacaaggctgccacagcggtggaatttgtcctcacgacttcgccacgtcgtcctcacctccctggcttcccacgactccgccgtatcgaggtgctcggtgggtcgtcttaatccgaagtccgaactaggaagacgagacagagaggtctgaggaatgggcctcgtttgatgttgagctgaattatttttccagcataagcccaggtcttggtccatgaacaaaattactagaaacccagcccagtactacgatctaaaagagggactgccactggatagctctctctagcattctccacgctccaatacagcggcgtcgtgtctatccgggtctatccgcgaacacgtgagaactctccagaaactgctttctcctccacttcatctctctcgctttccctctataaaaagaccccttctaggaattgagggagacagcaagcaccaagcagcgatccgaagctcaatcaattcactcaaacctcttccccaaatcttcgattagatcttcgttgacaagaagactagaaccgaacctgacatgtccaacctgctcacggttcaccagaaccttccggctcttccagtggacgcgacgtccgatgaagtcaggaagaacctcatggacatgttccgcgacaggcaagcgttcagcgagcacacctggaagatgctgctctccgtctgccgctcctgggctgcatggtgcaagctgaacaacaggaagtggttccccgctgagcccgaggacgtgagggattaccttctgtacctgcaagcgcgaggtttgtttctgcttctacctttgatatatatataataattatcattaattagtagtaatataatatttcaaatatttttttcaaaataaaagaatgtagtatatagcaattgcttttctgtagtttataagtgtgtatattttaatttataacttttctaatatatgaccaaaacatggtgatgcctaggtctggcagtgaagaccatccagcaacaccttggacaactgaacatgcttcacaggcgctccggcctcccgcgccccagcgactcgaacgccgtgagcctcgtcatgcgccgcatcaggaaggaaaacgtcgatgccggcgaaagggcaaagcaggccctcgcgttcgagaggaccgatttcgaccaggtccgcagcctgatggagaacagcgacaggtgccaggacattaggaacctggcgttcctcggaattgcatacaacacgctcctcaggatcgcggaaattgcccgcattcgcgtgaaggacattagccgcaccgacggcggcaggatgcttatccacattggcaggaccaagacgctcgtttccaccgcaggcgtcgaaaaggccctcagcctcggagtgaccaagctcgtcgaacgctggatctccgtgtccggcgtcgcggacgacccaaacaactacctcttctgccgcgtccgcaagaacggggtggctgcccctagcgccaccagccaactcagcacgagggccttggaaggtattttcgaggccacccaccgcctgatctacggcgcgaaggatgacagcggtcaacgctacctcgcatggtccgggcactccgcccgcgttggagctgctagggacatggcccgcgccggtgtttccatccccgaaatcatgcaggcgggtggatggacgaacgtgaacattgtcatgaactacattcgcaaccttgacagcgagacgggcgcaatggttcgcctcctggaagatggtgactgaggtacccaacctagacttgtccatcttctggattggccaacttaattaatgtatgaaataaaaggatgcacacatagtgacatgctaatcactataatgtgggcatcaaagttgtgtgttatgtgtaattactagttatctgaataaaagagaaagagatcatccatatttcttatcctaaatgaatgtcacgtgtctttataattctttgatgaaccagatgcatttcattaaccaaatccatatacatataaatattaatcatatataattaatatcaattgggttagcaaaacaaatctagtctaggtgtgttttgcgatccgatatcgatcaccttgctagttggatattacctcttctcttcaaagtatccttgaacgctcaccggttatcaaatctctacactatagctctgtagtcttgctagatagttagttctttagctctcgggccctggccgaagcttcgtgcgcacgataacttcgtatagcatacattatacgaagttataacagcggaccgggttaccgaattcctgcccttaaggccaattgttcaagattcattcaacaattgaaacatctcccatgattaaatcagtataaggttgctatggtcttgcttgacaaagtttttttttgagggaatttcaactaaatttttgagtgaaactatcaaatactgattttaaaaaatttttataaaaggaagcgcagagataaaaggccatctatgctacaaaagtacccaaaaatgtaatcctaaagtatgaattgcattttttttttgtttggacgaaaggaaaggagtattaccacaagaatgatatcatcttcatatttagatcttttttgggtaaagcttgagattctctaaatatagagaaatcagaagaaaaaaaaaccgtgttttggtggttttgatttctagcctccacaataactttgacggcgtcgacaagtctaacggacaccaagcagcgaaccaccagcgccgagccaagcgaagcagacggccgagacgttgacaccttcggcgcggcatctctcgagagttccgctccggcgctccacctccaccgctggcggtttcttattccgttccgttccgcctcctgctctgctcctctccacaccacacggcacgaaaccgttacggcaccggcagcacccagcacgggagaggggattcctttcccaccgttccttccctttccgccccgccgctataaatagccagccccatccccagcttttttccccaatctcatctcctctctcctgttgttcggagcacacgcacaatccgatcgatccccaaatccccttcgtctctcctcgcgagcctcgtggatcccagcttcaaggtacggcgatcgatcatcccccctccttctctctaccttcttttctctagactacatcggatggcgatccatggttagggcctgctagtttcccttcctgttttgtcgatggctgcgaggcacaatagatctgatggcgttatgacggctaacttgtcatgttgttgcgatttatagtccctttaggagatcagtttaatttctcggatggttcgagatcggtggtccatggttagtaccctaagatccgcgctgttagggttcgtagatggaggcgacctgttctgattgttaacttgtcagtacctgggaaatcctgggatggttctagctcgtccgcagatgagatcgatttcatgatcctctgtatcttgtttcgttgcctaggttccgtctaatctatccgtggtatgatgtagatgttttgatcgtgctaactacgtcttgtaaagttaattgtcaggtcataatttttagcatgcctttttttttgtttggttttgtctaattgggctgtcgttctagatcagagtagaagactgttccaaactacctgctggatttattgaacttggatctgtatgtgtgtcacatatcttcataaattcatgattaagatggattgaaatatcttttatctttttggtatggatagttctatatgttggtgtggctttgttagatgtatacatgcttagatacatgaagcaacgtgctgctactgtttagtaattgctgttcatttgtctaataaacagataaggatatgtatttatgttgctgttggttttgctggtactttgttggatacaaatgcttcaatacagaaaacagcatgctgctacgatttaccatttatctaatcttatcatatgtctaatctaataaacaaacatgcttttaaattatcttcatatgcttggatgatggcatacacagcggctatgtgtggttttttaaatacccagcatcatgggcatgcatgacactgctttaatatgctttttatttgcttgagactgtttcttttgtttatactgaccctttagttcggtgactcttctgcaggtcgactttaacttagcctaggatccatggcccagtccaagcacggcctgaccaaggagatgaccatgaagtaccgcatggagggctgcgtggacggccacaagttcgtgatcaccggcgagggcatcggctaccccttcaagggcaagcaggccatcaacctgtgcgtggtggagggcggccccttgcccttcgccgaggacatcttgtccgccgccttcatgtacggcaaccgcgtgttcaccgagtacccccaggacatcgtcgactacttcaagaactcctgccccgccggctacacctgggaccgctccttcctgttcgaggacggcgccgtgtgcatctgcaacgccgacatcaccgtgagcgtggaggagaactgcatgtaccacgagtccaagttctacggcgtgaacttccccgccgacggccccgtgatgaagaagatgaccgacaactgggagccctcctgcgagaagatcatccccgtgcccaagcagggcatcttgaagggcgacgtgagcatgtacctgctgctgaaggacggtggccgcttgcgctgccagttcgacaccgtgtacaaggccaagtccgtgccccgcaagatgcccgactggcacttcatccagcacaagctgacccgcgaggaccgcagcgacgccaagaaccagaagtggcacctgaccgagcacgccatcgcctccggctccgccttgccctccggactcagatctcgatagggtaccaatggccagttaacagatccagctgctgctgttctagggttcacaagtctgcctatttgtcttccccaatggagctatggttgtctggtctggtccttggtcgtgtcccgtttcattgtgtactatttacctgtaatgtgtatccttaagtctggtttgatggtgtctgaaacgttttgctgtggtagagcagcatggaagaactataatgaataagtgatccctaatcattgtgtccaaattttgcttctgctatacccttttgtgctgtttcttatgttttgcttaaaaatttgatctgacaaacaaatttgtctaaattatgctcttgttctgactgtgtactgtacacatttgtattgctaccggtttggcacatagttttctctttgattgcagatcaaacccttctgattgcagattgcttggctatggctgatgtgctcactgttcttctttagcttgtatattgctgatggtggcttggctacggctgaaaaagttgctgctgcgccgacttggcaactgttgctccagtaatgctttgtcctctcttcctagccgccgacttggcacttggcagctgttgctcctgtaatgcgttgttatctcttatctcttgagatgtactatgattttgaggctgtttgacttgtgccagattgccagtgctgatgctatattatctcaggtttttatgctagtatatgttttactgtgtgctgcctgtgtcgagttacgtaatctattgaaccgctatgcgtgttgatgccctgttgttgcttgccagattgatgcccctgttgcttgcagcttgcaagctgtagtgaaatcctaaaattcgaaaccaaatctattctgaacttttgaagatctgtgatgtccggaagaaaagattcaaacagataaacgggactctccagaatctataaaataaatgatcgacaaacgctttgctttggtaggcttcctagttagttagcggaccgaagcttcggtccgggcctagaaggccagcttcggccgcccctcggtaccctgggatctgcccttactttaacgcctctaaccaacacccctttatctttataaggaacaataaacagaatttgccccactgttctaaatcacctaataatatccccagctaaaaacaataaaggtttcctagaattaagacaagcatgactgttcctccaggagggtttggaacattgttgcagtcttgcagatacgggcgaagggtgagaaacagagcggagggctggaggtgacctcggtagtcgacgccggagttgagcttgacaacgacggggcggcccctgatggacttgaggaagtccgatggcgtcttcaccgtcccgccggcgcccgaggcgggcctgtcgctgccgccgccgccgctgctcatcttgcgcgctgtgcccccggcggtgtccctgtgttgcggatcgcgggtgggccaggtggatgcgagggcgacccgtttggactccggccggagccgccggatccctggtcggtgtcagtgccgtttactctgggccccacgtgtcagtaccgtctgtagatgacaacaacccgtcgtccacagtcatgtccaaaatatcctttcttcttttttttcgattcggatatctatcttccttttttttttccaaaaatcttcttgacgcaccagcgcgcacgtttgtggtaaacgccgacacgtcggtcccacgtcgatagaccccacccaccagtgagtagcgtgtacgtattcgggggtgacggacgtgtcgccgtcgtcttgctagtcccattcccatctgagccacacatctctgaacaaaaaaaaggagggaggcctccacgcacatccccctccgtgccacccgccccaaaccctcgcgccgcctccgagacagccgccgcaaccatggccaccgccgccgccgcgtctaccgcgctcactggcgccactaccgctgcgcccaaggcgaggcgccgggcgcacctcctggccacccgccgcgccctcgccgcgcccatcaggtgctcagcggcgtcacccgccatgccgatggctcccccggccaccccgctccggccgtggggccccaccgagccccgcaagggtgctgacatcctcgtcgagtccctcgagcgctgcggcgtccgcgacgtcttcgcctaccccggcggcgcgtccatggagatccaccaggcactcacccgctcccccgtcatcgccaaccacctcttccgccacgagcaaggggaggcctttgccgcctccggctacgcgcgctcctcgggccgcgtcggcgtctgcatcgccacctccggccccggcgccaccaacctagtctccgcgctcgccgacgcgctgctcgattccgtccccatggtcgccatcacgggacaggtggcgcgacgcatgattggcaccgacgccttccaggagacgcccatcgtcgaggtcacccgctccatcaccaagcacaactacctggtcctcgacgtcgacgacatcccccgcgtcgtgcaggaggctttcttcctcgcctcctctggtcgaccagggccggtgcttgtcgacatccccaaggacatccagcagcagatggcggtgcctgtctgggacaagcccatgagtctgcctgggtacattgcgcgccttcccaagccccctgcgactgagttgcttgagcaggtgctgcgtcttgttggtgaatcgcggcgccctgttctttatgtgggcggtggctgcgcagcatctggtgaggagttgcgacgctttgtggagctgactggaatcccggtcacaactactcttatgggcctcggcaacttccccagcgacgacccactgtctctgcgcatgctaggtatgcatgggacggtgtatgcaaattatgcagtggataaggccgatctgttgcttgcacttggtgtgcggtttgatgatcgcgtgacagggaagattgaggcttttgcaagcagggctaagattgtgcacgttgatattgatccggctgagattggcaagaacaagcagccacatgtgtccatctgtgcagatgttaagcttgctttgcagggcatgaatgctcttcttgaaggaagcacatcaaagaagagctttgactttggctcatggaacgatgagttggatcagcagaagagggaattcccccttgggtataaaacatctaatgaggagatccagccacaatatgctattcaggttcttgatgagctgacgaaaggcgaggccatcatcggcacaggtgttgggcagcaccagatgtgggcggcacagtactacacttacaagcggccaaggcagtggttgtcttcagctggtcttggggctatgggatttggtttgccggctgctgctggtgcttctgtggcaaacccaggtgtcactgttgttgacatcgatggagatggtagctttctcatgaacgttcaggagctagctatgatccgaattgagaacctcccagtgaaggtctttgtgctaaacaaccagcacctggggatggtggtgcagttggaggacaggttctataaggccaacagagcgcacacatacttgggaaacccagagaatgaaagtgagatatatccagatttcgtgacgatcgccaaagggttcaacattccagccgtccgtgtgacaaagaagaacgaagtccgcgcagcgataaagaagatgctcgagactccagggccgtacctcttggatataatcgtcccacaccaggagcatgtgttgcctatgatccctagtggtggggctttcaaggatatgatcctggatggtgatggcaggactgtgtactgacttcgaataggtacccggggatcctctagtgccgtgggtcgtttaagctgccgctgtacctgtgtcgtctggtgccttctggtgtacctgggaggttgtcgtctatcaagtatctgtggttggtgtcatgagtcagtgagtcccaatactgttcgtgtcctgtgtgcattatacccaaaactgttatgggcaaatcatgaataagcttgatgttcgaacttaaaagtctctgctcaatatggtattatggttgtttttgttcgtctcctaatatttgcctgggatcaaattttattggctggtgttcatttgacctccatgttcttgctaggctccattttttactctacagccataatatgtttgattgtttggtttgttctttgttgtacacctggttctgtcgagcttagttttcgacactggcttacagcttaacatgttgctattttattgggttctgattgctattttattgggttctgattgctagtttttgctgaatccaaaaaccatgttatttatttaagcgatccaggttattattatgatggtggctaagtttttttttttccaagggtaaattttctggattctccagtgtttctgtggccgaattcaatcactagagtcgacctgcaaagcttcggtccgggcctagaaggcccgcgccacttacgcttgattccgatgacttcgtaggttcctagctcaagccgctcgtgtccaagcgtcacttacgattagctaatgattacggcatctaggaccgactagttcttatgtgcttctagtctccaaatgtggttgatagttattttgctctaagatcaacagtaatgaagtataaatcatcgttgtggtgtgctactcggttaattgagcattaacacacacaaacatgacgaggatggtataatctccaaaaatgtgtactttgttaggtgggaccctatagccttgattaatgtgctatgttaggcatgcctggaaacgtgtgacgcatatgttttgtgaacctgttgatattatatgtgcttttatattaccatattttattaaaatactaatatttattactagtaagatataacattctatctagcttaaaaactaaccataaatattccataataactagatttaccaaactaatatactaaatatacataataaatacaaaattaacaagacaataatcaatatttatgagcttaatatatttagacattatggttggtcgacgataatcatgctaacttttcgtaattgcttgattgaaatatgcttagaataatgcctctttgttctacatggcaaatagggaccattatggtgtaacaccctgggaaccacaaacaccccgaaatgctactaaactacacaactaaccttcatatataaaatttcgacagcatctcctttgaaaatttgcatagacgtggaagcaacagagtataaacagatctgcgtttaaacgtgcaagcgctactagacaattcagtacattaaaaacgtccgcaatgtgttattaagttgtctaagcgtcaatttgtttacaccacaatatatcctgcca

SEQ ID NO: 67 - DNA, 21827 bp, Artificial sequence
  PHP96277
gtttacccgccaatatatcctgtcaaacactgcggccgcacttgaccgcggatggagccggagctgtggtgaggccatcgacgggaggtgggggagaacacagtctcagtgttctttgtgagtccgcaaggtttttagcttttctgtattaattaaggttgctgttggctgtagaatacggtcgtggaagagctgtatcggtagctactacgtaagctattatatactggaagtctggagctcgtcgatctccggtcgtcttcctccatttctcctcgtcttgctttgactgctgctaccatttgcttctgttttctgatgaagcatgccatgtcggccaccagtgtttgtgtggtttttgcagggaatggctttcaagtgctgtgattgaatggccctcgtcgtcctcggctgagctcacatggacgcgtcatgtgagtgagatatatgatcatatgatgagtggggttcgggtgagtgcgtacttgaagtaggatcccgctttcactcattcattcattggcctttaaaccgggaaattttcgcgaggagatggagggaagcaagcagggtgacgagtgcagagtgccgcgagcgctttgtcaaaaggcaccgccgtaggcaaaaaaatcaatggccctgactgactcgatggtagtactactgtagagactagagagggttgctccccatatcttcgtgtgacttttactccagcattgcatttccgtcattgagacgttaattaatagcagctttcgggacagatgactgtggccatgtttcgtcacggccgcttcgtgccagctgggggtactatagtactgtgattttgttagtaaaaactttcattaggccaccattgacgaccgggccttcgcttttgctgcgctaattaaccatttcccggcgaccgaagggaacatgaacatgccccgacacatgagggcatgaggactagtgttctccctgtcgttcgttgacttgactagtgatagtttaaacgctcttcaactggaagagcggttactaccggttcactagctagctgctaatcgagctagttaccctatgaggtgacatgaagcgctcacggttactatgacggttagcttcacgactgttggtggcagtagcgtacgacttagctatagttccggacttacctagctaataacttcgtatagcatacattatacgaagttatggttaccgaattcgagctccggaccgaagcttgcatgcctgcagcccatccctcagccgcctttcactatcttttttgcccgagtcattgtcatgtgaaccttggcatgtataatcggtgaattgcgtcgattttcctcttataggtgggccaatgaatccgtgtgatcgcgtctgattggctagagatatgtttcttccttgttggatgtattttcatacataatcatatgcatacaaatatttcattacactttatagaaatggtcagtaataaaccctatcactatgtctggtgtttcattttatttgcttttaaacgaaaattgacttcctgattcaatatttaaggatcgtcaacggtgtgcagttactaaattctggtttgtaggaactatagtaaactattcaagtcttcacttattgtgcactcacctctcgccacatcaccacagatgttattcacgtcttaaatttgaactacacatcatattgacacaatattttttttaaataagcgattaaaacctagcctctatgtcaacaatggtgtacataaccagcgaagtttagggagtaaaaaacatcgccttacacaaagttcgctttaaaaaataaagagtaaattttactttggaccacccttcaaccaatgtttcactttagaacgagtaattttattattgtcactttggaccaccctcaaatcttttttccatctacatccaatttatcatgtcaaagaaatggtctacatacagctaaggagatttatcgacgaatagtagctagcatactcgaggtcattcatatgcttgagaagagagtcgggatagtccaaaataaaacaaaggtaagattacctggtcaaaagtgaaaacatcagttaaaaggtggtataaagtaaaatatcggtaataaaaggtggcccaaagtgaaatttactcttttctactattataaaaattgaggatgtttttgtcggtactttgatacgtcatttttgtatgaattggtttttaagtttattcgcttttggaaatgcatatctgtatttgagtcgggttttaagttcgtttgcttttgtaaatacagagggatttgtataagaaatatctttaaaaaaacccatatgctaatttgacataatttttgagaaaaatatatattcaggcgaattctcacaatgaacaataataagattaaaatagctttcccccgttgcagcgcatgggtattttttctagtaaaaataaaagataaacttagactcaaaacatttacaaaaacaacccctaaagttcctaaagcccaaagtgctatccacgatccatagcaagcccagcccaacccaacccaacccaacccaccccagtccagccaactggacaatagtctccacacccccccactatcaccgtgagttgtccgcacgcaccgcacgtctcgcagccaaaaaaaaaaaaagaaagaaaaaaaagaaaaagaaaaaacagcaggtgggtccgggtcgtgggggccggaaacgcgaggaggatcgcgagccagcgacgaggccggccctccctccgcttccaaagaaacgccccccatcgccactatatacatacccccccctctcctcccatccccccaaccctaccaccaccaccaccaccacctccacctcctcccccctcgctgccggacgacgagctcctcccccctccccctccgccgccgccgcgccggtaaccaccccgcccctctcctctttctttctccgttttttttttccgtcacggtctcgatctttggccttggtagtttgggtgggcgagaggcggcttcgtgcgcgcccagatcggtgcgcgggaggggcgggatctcgcggctggggctctcgccggcgtggatcaggcccggatctcgcggggaatggggctctcggatgtagatctgcgatccgccgttgttgggggagatgatggggggtttaaaatttccgccatgctaaacaagatcaggaagaggggaaaagggcactatggtttatatttttatatatttctgctgcttcgtcaggcttagatgtgctagatctttctttcttctttttgtgggtagaatttgaatccctcagcattgttcatcggtagtttttcttttcatgatttgtgacaaatgcagcctcgtgcggagcttttttgtaggtagaaggatccgcccatggcggccaatgcgggcggcggtggagcgggaggaggcagcggcagcggcagcgtggctgcgccggcggtgtgccgccccagcggctcgcggtggacgccgacgccggagcagatcaggatgctgaaggagctctactacggctgcggcatccggtcgcccagctcggagcagatccagcgcatcaccgccatgctgcggcagcacggcaagatcgagggcaagaacgtcttctactggttccagaaccacaaggcccgcgagcgccagaagcgccgcctcaccagcctcgacgtcaacgtgcccgccgccggcgcggccgacgccaccaccagccaactcggcgtcctctcgctgtcgtcgccgccgccttcaggcgcggcgcctccctcgcccaccctcggcttctacgccgccggcaatggcggcggatcggctgtgctgctggacacgagttccgactggggcagcagcggcgctgctatggccaccgagacatgcttcctgcaggactacatgggcgtgacggacacgggcagctcgtcgcagtggccacgcttctcgtcgtcggacacgataatggcggcggccgcggcgcgggcggcgacgacgcgggcgcccgagacgctccctctcttcccgacctgcggcgacgacggcggcagcggtagcagcagctacttgccgttctggggtgccgcgtccacaactgccggcgccacttcttccgttgcgatccaacagcaacaccagctgcaggagcagtacagcttttacagcaacagcaacagcacccagctggccggcaccggcaaccaagacgtatcggcaacagcagcagcagccgccgccctggagctgagcctcagctcatggtgctccccttaccctgctgcagggagtatgtgagagcaacgcgagctgccactgctcttcactgatgtctctggaatggaaggaggaggaagtgagaacagatcattcgacaaagcagcattagtccgttgatcggtggaagaccactcgtcagtgttgagttgaatgtttgatcaataaaatacggcaatgctgtaagggttgttttttatgccattgataatacactgtactgttcagttgttgaactctatttcttagccatgccaagtgcttttcttattttgaataacattacagcaaaaagttgaaagacaaaaaaaaaaacccccgaacagagtgctttgggtcccaagcttctttagactgtgttcggcgttccccctaaatttctccccctatatctcactcacttgtcacatcagcgttctctttccccctatatctccacgctctacagcagttccacctatatcaaacctctataccccaccacaacaatattatatactttcatcttcaactaactcatgtaccttccaatttttttctactaataattatttacgtgcacagaaacttagcaaggagagagagagcgggaatttaaatgctcggcgttaggcttttagtccgctaggtggctagaccgaggttaggacgctagttcactaggggcctagtggtgttttaagacgtcacggtcaccgcggccgcatcgagcagctggcttgtggggaccagacaaaaaaggaatggtgcagaattgttaggcgcacctaccaaaagcatctttgcctttattgcaaagataaagcagattcctctagtacaagtggggaacaaaataacgtggaaaagagctgtcctgacagcccactcactaatgcgtatgacgaacgcagtgacgaccacaaaactcgagcaacgagatcatgagccaatcaaagaggagtgatgtagacctaaagcaataatggagccatgacgtaagggcttacgcccatacgaaataattaaaggctgatgtgacctgtcggtctctcagaacctttactttttatgtttggcgtgtatttttaaatttccacggcaatgacgatgtgaccgtcgacccactaaaacattgctttgtcaaaagctaaaaaagatgatgcccgacagccacttgtgtgaagcatgagaagccggtccctccactaagaaaattagtgaagcatcttccagtggtccctccactcacagctcaatcagtgagcaacaggacgaaggaaatgacgtaagccatgacgtctaatcccattcgaaacgcgtggaccgaagcttgcatgcctgcagtgcagcgtgacccggtcgtgcccctctctagagataatgagcattgcatgtctaagttataaaaaattaccacatattttttttgtcacacttgtttgaagtgcagtttatctatctttatacatatatttaaactttactctacgaataatataatctatagtactacaataatatcagtgttttagagaatcatataaatgaacagttagacatggtctaaaggacaattgagtattttgacaacaggactctacagttttatctttttagtgtgcatgtgttctcctttttttttgcaaatagcttcacctatataatacttcatccattttattagtacatccatttagggtttagggttaatggtttttatagactaatttttttagtacatctattttattctattttagcctctaaattaagaaaactaaaactctattttagtttttttatttaataatttagatataaaatagaataaaataaagtgactaaaaattaaacaaataccctttaagaaattaaaaaaactaaggaaacatttttcttgtttcgagtagataatgccagcctgttaaacgccgtcgacgagtctaacggacaccaaccagcgaaccagcagcgtcgcgtcgggccaagcgaagcagacggcacggcatctctgtcgctgcctctggacccctctcgagagttccgctccaccgttggacttgctccgctgtcggcatccagaaattgcgtggcggagcggcagacgtgagccggcacggcaggcggcctcctcctcctctcacggcaccggcagctacgggggattcctttcccaccgctccttcgctttcccttcctcgcccgccgtaataaatagacaccccctccacaccctctttccccaacctcgtgttgttcggagcgcacacacacacaaccagatctcccccaaatccacccgtcggcacctccgcttcaaggtacgccgctcgtcctcccccccccccctctctaccttctctagatcggcgttccggtccatgcatggttagggcccggtagttctacttctgttcatgtttgtgttagatccgtgtttgtgttagatccgtgctgctagcgttcgtacacggatgcgacctgtacgtcagacacgttctgattgctaacttgccagtgtttctctttggggaatcctgggatggctctagccgttccgcagacgggatcgatttcatgattttttttgtttcgttgcatagggtttggtttgcccttttcctttatttcaatatatgccgtgcacttgtttgtcgggtcatcttttcatgcttttttttgtcttggttgtgatgatgtggtctggttgggcggtcgttctagatcggagtagaattctgtttcaaactacctggtggatttattaattttggatctgtatgtgtgtgccatacatattcatagttacgaattgaagatgatggatggaaatatcgatctaggataggtatacatgttgatgcgggttttactgatgcatatacagagatgctttttgttcgcttggttgtgatgatgtggtgtggttgggcggtcgttcattcgttctagatcggagtagaatactgtttcaaactacctggtgtatttattaattttggaactgtatgtgtgtgtcatacatcttcatagttacgagtttaagatggatggaaatatcgatctaggataggtatacatgttgatgtgggttttactgatgcatatacatgatggcatatgcagcatctattcatatgctctaaccttgagtacctatctattataataaacaagtatgttttataattattttgatcttgatatacttggatgatggcatatgcagcagctatatgtggatttttttagccctgccttcatacgctatttatttgcttggtactgtttcttttgtcgatgctcaccctgttgtttggtgttacttctgcaggtcgactttaacttagcctaggatccatggccactgtgaacaactggctcgctttctccctctccccgcaggagctgccgccctcccagacgacggactccacactcatctcggccgccaccgccgaccatgtctccggcgatgtctgcttcaacatcccccaagattggagcatgaggggatcagagctttcggcgctcgtcgcggagccgaagctggaggacttcctcggcggcatctccttctccgagcagcatcacaaggccaactgcaacatgatacccagcactagcagcacagtttgctacgcgagctcaggtgctagcaccggctaccatcaccagctgtaccaccagcccaccagctcagcgctccacttcgcggactccgtaatggtggcttcctcggccggtgtccacgacggcggtgccatgctcagcgcggccgccgctaacggtgtcgctggcgctgccagtgccaacggcggcggcatcgggctgtccatgattaagaactggctgcggagccaaccggcgcccatgcagccgagggtggcggcggctgagggcgcgcaggggctctctttgtccatgaacatggcggggacgacccaaggcgctgctggcatgccacttctcgctggagagcgcgcacgggcgcccgagagtgtatcgacgtcagcacagggtggagccgtcgtcgtcacggcgccgaaggaggatagcggtggcagcggtgttgccggcgctctagtagccgtgagcacggacacgggtggcagcggcggcgcgtcggctgacaacacggcaaggaagacggtggacacgttcgggcagcgcacgtcgatttaccgtggcgtgacaaggcatagatggactgggagatatgaggcacatctttgggataacagttgcagaagggaagggcaaactcgtaagggtcgtcaagtctatttaggtggctatgataaagaggagaaagctgctagggcttatgatcttgctgctctgaagtactggggtgccacaacaacaacaaattttccagtgagtaactacgaaaaggagctcgaggacatgaagcacatgacaaggcaggagtttgtagcgtctctgagaaggaagagcagtggtttctccagaggtgcatccatttacaggggagtgactaggcatcaccaacatggaagatggcaagcacggattggacgagttgcagggaacaaggatctttacttgggcaccttcagcacccaggaggaggcagcggaggcgtacgacatcgcggcgatcaagttccgcggcctcaacgccgtcaccaacttcgacatgagccgctacgacgtgaagagcatcctggacagcagcgccctccccatcggcagcgccgccaagcgcctcaaggaggccgaggccgcagcgtccgcgcagcaccaccacgccggcgtggtgagctacgacgtcggccgcatcgcctcgcagctcggcgacggcggagccctggcggcggcgtacggcgcgcactaccacggcgccgcctggccgaccatcgcgttccagccgggcgccgccagcacaggcctgtaccacccgtacgcgcagcagccaatgcgcggcggcgggtggtgcaagcaggagcaggaccacgcggtgatcgcggccgcgcacagcctgcaggacctccaccacctgaacctgggcgcggccggcgcgcacgactttttctcggcagggcagcaggccgccgccgctgcgatgcacggcctgggtagcatcgacagtgcgtcgctcgagcacagcaccggctccaactccgtcgtctacaacggcggggtcggcgacagcaacggcgccagcgccgtcggcggcagtggcggtggctacatgatgccgatgagcgctgccggagcaaccactacatcggcaatggtgagccacgagcaggtgcatgcacgggcctacgacgaagccaagcaggctgctcagatggggtacgagagctacctggtgaacgcggagaacaatggtggcggaaggatgtctgcatgggggactgtcgtgtctgcagccgcggcggcagcagcaagcagcaacgacaacatggccgccgacgtcgggcatggcggcgcgcagctcttcagtgtctggaacgacacttaagcgtacctagtggtacctgacatcttatagtctgcaacctctcgtgtctgaattcctatctttatcaagtgttattgcttccacgactataggacagctttcgtcgaaagcttttgctcatgtgatctcgaaggattcatctagtctgatttttcgtgacttgtatcggttttattggattcatccaacatatatcaataaaaaatgagttgtgtttcctttcttcctagttcagttaaaattatttccctcctgcgcttgtgctgtaattgtctgtgtacctgttgtttgtgactgtgttagttcccttggatatgatttcgtatttgatatgtacatggagatagcttagcttcattattggagtatgaagttagtatgacatagtcactctcctggaaaattgacactgcaaaccatatttttattctgaaccacaaatcctagtcagtccgctggcatatgccgtccgtttgctgaatccagaacgtgggtttggagatgtacggctgagatgcctctatgcgaaggggatttcgtggtgaaacgagatgggagtagagcaacgcccgtggaagatgcttcaaacttccacacttttgagcaacgatcggcagtagtaaggtagacgatttcaagatcaaagcatatgaagataaacaacatcaacaacaaaatttgttggggttctatagagagaaacagagctacatacatacactgttttgtatctaccatctgagatgatgaaaagatgaaaaactaaagaatgccccggcgccaacgccaggacacgccgcgcgcgcgtcacccgagccatctcttgacccagccggcgctgtatatttacacacgttgcagcatcgatcaccacctgttcgatcgcgtcgccgtcaccggcgcgccgcgacttattgaactagtctagggcgcggctaacaacctagcttagattgccttgtctaaacccttaggctaacgcgccactctagacaccttgctagttggatattacctcttctcttcaaagtatccttgaacgctcaccggttatcaaatctctacactatagctctgtagtcttgctagatagttagttctttagctctcgaattcgagctcggtaccctggttcacaaactcaatacaacacacagtggagtagggtattacgctccggcggcccgaaccactctaaatccttgtgtcctcgtgtgctcttccaccattaatgactgtaattgcagggacacgaagagttgtagcgcttttgccaacaagatccgctatatgctagtagagtggaacctgcacagcaacaagcatccaataatctgagaataagaattatgtgtggtgatggttctcatctctgcaactcgccattttcgcgagagaaccaaatccaagttggtgaagatcatgatttgggctcatgggctggcatagtagctattacctttgcaattgtggttcgaatctatccgatattctccttttcagggagagctaatgcttatgcttattgggtattttggtttgacactgcttcacgcccaaaaaaaggcaactatgtctgagttggatatggcccaaaaaaaggcagctatgtctgagttggatatggaagtcttctttcgtttagggtgaagtaagaccaagctcatgagcttattatcttaggtcggaacaaattagttgataggcatggcacatttatcaaattataatgattttaacagaaaagcaacacctctttttcagcagcaccagctttgcaagctgcaattgacactccaagcatagtatttgctccaaactcagcctgcatttcgcacaatatcatatctatttccatttggataaaatatattttccagaaatatgggaacagaatcaagatacagaaaaaagttgtggtagtagtggtaagtggaaacacaagtacagtgaaaagatagcattatttctgaacagtcaaattaaccgaaataagtagtatcacatactgcccctaaattgactacacccaatgtaaagaattgcttgagcatattgagccatcagttgtttgtttgtgtaacggatttgacaatgcagagttcaggagcaaaaaaccgcaaaggagagaaagagggaaaggatctcctagtatcccaccttgtggcgcgccctgtcaagtgcatgatggcctggtcgatctgcgtctgctgctgcggttccatcccaacgagtgcctccgacaccttgtcgttgatcacccgcaccgcgtaggcgacccccctggcgaggaacttccgcctctcggaggccccggccgcgtcggcggcggcgccctcgagcgcgcccacgctagccgtagatgctcggtgcacggccttgttggtgtgcaactcgacctcaacggccggtgcgctacgcccgtcaaggatctggcgcgcccgcaccctcgtgatcacggtgggcgcctcccgcctcatgtggccgacgatgaaaagcgccgggttaggggccttggcgcgcaccgccgtattcagggcctcctcgctcttgcgcgagagcaggtgcttccccaggtactcctgcactgacaaggctgccacagcggtggaatttgtcctcacgacttcgccacgtcgtcctcacctccctggcttcccacgactccgccgtatcgaggtgctcggtgggtcgtcttaatccgaagtccgaactaggaagacgagacagagaggtctgaggaatgggcctcgtttgatgttgagctgaattatttttccagcataagcccaggtcttggtccatgaacaaaattactagaaacccagcccagtactacgatctaaaagagggactgccactggatagctctctctagcattctccacgctccaatacagcggcgtcgtgtctatccgggtctatccgcgaacacgtgagaactctccagaaactgctttctcctccacttcatctctctcgctttccctctataaaaagaccccttctaggaattgagggagacagcaagcaccaagcagcgatccgaagctcaatcaattcactcaaacctcttccccaaatcttcgattagatcttcgttgacaagaagactagaaccgaacctgacatgtccaacctgctcacggttcaccagaaccttccggctcttccagtggacgcgacgtccgatgaagtcaggaagaacctcatggacatgttccgcgacaggcaagcgttcagcgagcacacctggaagatgctgctctccgtctgccgctcctgggctgcatggtgcaagctgaacaacaggaagtggttccccgctgagcccgaggacgtgagggattaccttctgtacctgcaagcgcgaggtttgtttctgcttctacctttgatatatatataataattatcattaattagtagtaatataatatttcaaatatttttttcaaaataaaagaatgtagtatatagcaattgcttttctgtagtttataagtgtgtatattttaatttataacttttctaatatatgaccaaaacatggtgatgcctaggtctggcagtgaagaccatccagcaacaccttggacaactgaacatgcttcacaggcgctccggcctcccgcgccccagcgactcgaacgccgtgagcctcgtcatgcgccgcatcaggaaggaaaacgtcgatgccggcgaaagggcaaagcaggccctcgcgttcgagaggaccgatttcgaccaggtccgcagcctgatggagaacagcgacaggtgccaggacattaggaacctggcgttcctcggaattgcatacaacacgctcctcaggatcgcggaaattgcccgcattcgcgtgaaggacattagccgcaccgacggcggcaggatgcttatccacattggcaggaccaagacgctcgtttccaccgcaggcgtcgaaaaggccctcagcctcggagtgaccaagctcgtcgaacgctggatctccgtgtccggcgtcgcggacgacccaaacaactacctcttctgccgcgtccgcaagaacggggtggctgcccctagcgccaccagccaactcagcacgagggccttggaaggtattttcgaggccacccaccgcctgatctacggcgcgaaggatgacagcggtcaacgctacctcgcatggtccgggcactccgcccgcgttggagctgctagggacatggcccgcgccggtgtttccatccccgaaatcatgcaggcgggtggatggacgaacgtgaacattgtcatgaactacattcgcaaccttgacagcgagacgggcgcaatggttcgcctcctggaagatggtgactgaggtacccaacctagacttgtccatcttctggattggccaacttaattaatgtatgaaataaaaggatgcacacatagtgacatgctaatcactataatgtgggcatcaaagttgtgtgttatgtgtaattactagttatctgaataaaagagaaagagatcatccatatttcttatcctaaatgaatgtcacgtgtctttataattctttgatgaaccagatgcatttcattaaccaaatccatatacatataaatattaatcatatataattaatatcaattgggttagcaaaacaaatctagtctaggtgtgttttgcgatccgatatcaggcctgacgtctaaaaacggcccctaactaacgcttagttgcccgctagattagtcccccgttagtgcctagttagacacacgacgaactaggggctagccaccttgctagttggatattacctcttctcttcaaagtatccttgaacgctcaccggttatcaaatctctacactatagctctgtagtcttgctagatagttagttctttagctctcgtgcgcacgataacttcgtatagcatacattatacgaagttataacagcggaccgggttaccgaattcctgcccttaaggccaattgttcaagattcattcaacaattgaaacatctcccatgattaaatcagtataaggttgctatggtcttgcttgacaaagtttttttttgagggaatttcaactaaatttttgagtgaaactatcaaatactgattttaaaaaatttttataaaaggaagcgcagagataaaaggccatctatgctacaaaagtacccaaaaatgtaatcctaaagtatgaattgcattttttttttgtttggacgaaaggaaaggagtattaccacaagaatgatatcatcttcatatttagatcttttttgggtaaagcttgagattctctaaatatagagaaatcagaagaaaaaaaaaccgtgttttggtggttttgatttctagcctccacaataactttgacggcgtcgacaagtctaacggacaccaagcagcgaaccaccagcgccgagccaagcgaagcagacggccgagacgttgacaccttcggcgcggcatctctcgagagttccgctccggcgctccacctccaccgctggcggtttcttattccgttccgttccgcctcctgctctgctcctctccacaccacacggcacgaaaccgttacggcaccggcagcacccagcacgggagaggggattcctttcccaccgttccttccctttccgccccgccgctataaatagccagccccatccccagcttttttccccaatctcatctcctctctcctgttgttcggagcacacgcacaatccgatcgatccccaaatccccttcgtctctcctcgcgagcctcgtggatcccagcttcaaggtacggcgatcgatcatcccccctccttctctctaccttcttttctctagactacatcggatggcgatccatggttagggcctgctagtttcccttcctgttttgtcgatggctgcgaggcacaatagatctgatggcgttatgacggctaacttgtcatgttgttgcgatttatagtccctttaggagatcagtttaatttctcggatggttcgagatcggtggtccatggttagtaccctaagatccgcgctgttagggttcgtagatggaggcgacctgttctgattgttaacttgtcagtacctgggaaatcctgggatggttctagctcgtccgcagatgagatcgatttcatgatcctctgtatcttgtttcgttgcctaggttccgtctaatctatccgtggtatgatgtagatgttttgatcgtgctaactacgtcttgtaaagttaattgtcaggtcataatttttagcatgcctttttttttgtttggttttgtctaattgggctgtcgttctagatcagagtagaagactgttccaaactacctgctggatttattgaacttggatctgtatgtgtgtcacatatcttcataaattcatgattaagatggattgaaatatcttttatctttttggtatggatagttctatatgttggtgtggctttgttagatgtatacatgcttagatacatgaagcaacgtgctgctactgtttagtaattgctgttcatttgtctaataaacagataaggatatgtatttatgttgctgttggttttgctggtactttgttggatacaaatgcttcaatacagaaaacagcatgctgctacgatttaccatttatctaatcttatcatatgtctaatctaataaacaaacatgcttttaaattatcttcatatgcttggatgatggcatacacagcggctatgtgtggttttttaaatacccagcatcatgggcatgcatgacactgctttaatatgctttttatttgcttgagactgtttcttttgtttatactgaccctttagttcggtgactcttctgcaggtcgactttaacttagcctaggatccatggcccagtccaagcacggcctgaccaaggagatgaccatgaagtaccgcatggagggctgcgtggacggccacaagttcgtgatcaccggcgagggcatcggctaccccttcaagggcaagcaggccatcaacctgtgcgtggtggagggcggccccttgcccttcgccgaggacatcttgtccgccgccttcatgtacggcaaccgcgtgttcaccgagtacccccaggacatcgtcgactacttcaagaactcctgccccgccggctacacctgggaccgctccttcctgttcgaggacggcgccgtgtgcatctgcaacgccgacatcaccgtgagcgtggaggagaactgcatgtaccacgagtccaagttctacggcgtgaacttccccgccgacggccccgtgatgaagaagatgaccgacaactgggagccctcctgcgagaagatcatccccgtgcccaagcagggcatcttgaagggcgacgtgagcatgtacctgctgctgaaggacggtggccgcttgcgctgccagttcgacaccgtgtacaaggccaagtccgtgccccgcaagatgcccgactggcacttcatccagcacaagctgacccgcgaggaccgcagcgacgccaagaaccagaagtggcacctgaccgagcacgccatcgcctccggctccgccttgccctccggactcagatctcgatagggtaccaatggccagttaacagatccagctgctgctgttctagggttcacaagtctgcctatttgtcttccccaatggagctatggttgtctggtctggtccttggtcgtgtcccgtttcattgtgtactatttacctgtaatgtgtatccttaagtctggtttgatggtgtctgaaacgttttgctgtggtagagcagcatggaagaactataatgaataagtgatccctaatcattgtgtccaaattttgcttctgctatacccttttgtgctgtttcttatgttttgcttaaaaatttgatctgacaaacaaatttgtctaaattatgctcttgttctgactgtgtactgtacacatttgtattgctaccggtttggcacatagttttctctttgattgcagatcaaacccttctgattgcagattgcttggctatggctgatgtgctcactgttcttctttagcttgtatattgctgatggtggcttggctacggctgaaaaagttgctgctgcgccgacttggcaactgttgctccagtaatgctttgtcctctcttcctagccgccgacttggcacttggcagctgttgctcctgtaatgcgttgttatctcttatctcttgagatgtactatgattttgaggctgtttgacttgtgccagattgccagtgctgatgctatattatctcaggtttttatgctagtatatgttttactgtgtgctgcctgtgtcgagttacgtaatctattgaaccgctatgcgtgttgatgccctgttgttgcttgccagattgatgcccctgttgcttgcagcttgcaagctgtagtgaaatcctaaaattcgaaaccaaatctattctgaacttttgaagatctgtgatgtccggaagaaaagattcaaacagataaacgggactctccagaatctataaaataaatgatcgacaaacgctttgctttggtaggcttcctagttagttagcggaccgggatccgacggcgtcttcaccgccccgccgccgcccgagccggacttgtcgctgccgccgccgctgctcatcttgcgcgcttgtgtccctccctcagtccctgcgttcgcggatcgcgggcgggtgcgacccgtttggactccggccggtagccttcgtgccgacctcgctcggtccaccggtttgtcggggacccacatgtcagtgaaggtacgcgtccacgtccacagaccctactaccccagacgagtccaaatcgctgttccctcacactctcgtgtaccagcgcgcggcggaaagcacctttccaacaaccgccgacacgtcggtcccacgtcggcatgctccaccggtcagtgtttggcgtgtacggctcccggcgacgaacgagtgtggcctaagctttcctactcccatcccatctgagccacacatctctctcacgccacgcgcacaaaacagccaggctcccacgcgcatcaaccggctctccctttccgtgccactcgcccccaagccccaaaccctcgccgccgcctccgagacagccgccgccacctaggccatggccaccgccgccgccgcgtctaccgcgctcactggcgccactaccgctgcgcccaaggcgaggcgccgggcgcacctcctggccacccgccgcgccctcgccgcgcccatcaggtgctcagcggcgtcacccgccatgccgatggctcccccggccaccccgctccggccgtggggccccaccgagccccgcaagggtgctgacatcctcgtcgagtccctcgagcgctgcggcgtccgcgacgtcttcgcctaccccggcggcgcgtcgatggagatccaccaggcactcacccgctcccccgtcatcgccaaccacctcttccgccacgagcaaggggaggcctttgccgcctccggctacgcgcgctcctcgggccgcgtcggcgtctgcatcgccacctccggccccggcgccaccaacctagtctccgcgctcgccgacgcgctgctcgattccgtcccgatggtcgccatcacgggacaggtggcgcgacgcatgattggcaccgacgccttccaggagacgcccatcgtcgaggtcacgcgctccatcaccaagcacaactacctggtcctcgacgtcgacgacatcccccgcgtcgtgcaggaggctttcttcctcgcctcctctggtcgaccagggccggtgcttgtcgacatccccaaggacatccagcagcagatggcggtgcctgtctgggacaagcccatgagtctgcctgggtacattgcgcgccttcccaagccccctgcgactgagttgcttgagcaggtgctgcgtcttgttggtgaatcgcggcgccctgttctttatgtgggcggtggctgcgcagcatctggtgaggagttgcgacgctttgtggagctgactggaatcccggtcacaactactcttatgggcctcggcaacttccccagcgacgacccactgtctctgcgcatgctaggtatgcatgggacggtgtatgcaaattatgcagtggataaggccgatctgttgcttgcacttggtgtgcggtttgatgatcgcgtgacagggaagattgaggcttttgcaagcagggctaagattgtgcacgttgatattgatccggctgagattggcaagaacaagcagccacatgtgtccatctgtgcagatgttaagcttgctttgcagggcatgaatgctcttcttgaaggaagcacatcaaagaagagctttgactttggctcatggaacgatgagttggatcagcagaagagggaattcccccttgggtataaaacatctaatgaggagatccagccacaatatgctattcaggttcttgatgagctgacgaaaggcgaggccatcatcggcacaggtgttgggcagcaccagatgtgggcggcacagtactacacttacaagcggccaaggcagtggttgtcttcagctggtcttggggctatgggatttggtttgccggctgctgctggtgcttctgtggcaaacccaggtgtcactgttgttgacatcgatggagatggtagctttctcatgaacgttcaggagctagctatgatccgaattgagaacctcccagtgaaggtctttgtgctaaacaaccagcacctggggatggtggtgcagttggaggacaggttctataaggccaacagagcgcacacatacttgggaaacccagagaatgaaagtgagatatatccagatttcgtgacgatcgccaaagggttcaacattccagccgtccgtgtgacaaagaagaacgaagtccgcgcagcgataaagaagatgctcgagactccagggccgtacctcttggatataatcgtcccacaccaggagcatgtgttgcctatgatccctagtggtggggctttcaaggatatgatcctggatggtgatggcaggactgtgtactgacttcgaataggtacccggggatcctctagtgccgtgggtcgtttaagctgccgctgtacctgtgtcgtctggtgccttctggtgtacctgggaggttgtcgtctatcaagtatctgtggttggtgtcatgagtcagtgagtcccaatactgttcgtgtcctgtgtgcattatacccaaaactgttatgggcaaatcatgaataagcttgatgttcgaacttaaaagtctctgctcaatatggtattatggttgtttttgttcgtctcctaatatttgcctgggatcaaattttattggctggtgttcatttgacctccatgttcttgctaggctccattttttactctacagccataatatgtttgattgtttggtttgttctttgttgtacacctggttctgtcgagcttagttttcgacactggcttacagcttaacatgttgctattttattgggttctgattgctattttattgggttctgattgctagtttttgctgaatccaaaaaccatgttatttatttaagcgatccaggttattattatgatggtggctaagtttttttttttccaagggtaaattttctggattctccagtgtttctgtggccgaattcaatcactagagtcgacctgcaaagcttcggtccgggcctagaaggcccgcgccacttacgcttgattccgatgacttcgtaggttcctagctcaagccgctcgtgtccaagcgtcacttacgattagctaatgattacggcatctaggaccgactagctagctagctaagagctcggtaccgagctcgaattcattccgattaatcgtggcctcttgctcttcaggatgaagagctatgtttaaacgtgcaagcgctactagacaattcagtacattaaaaacgtccgcaatgtgttattaagttgtctaagcgtcaatttgtttacaccacaatatatcctgcca

SEQ ID NO: 68 - DNA, 21263 bp, Artificial sequence
  PHP96425
gtttacccgccaatatatcctgtcaaacactgcggccgcacttgaccgcggatggagccggagctgtggtgaggccatcgacgggaggtgggggagaacacagtctcagtgttctttgtgagtccgcaaggtttttagcttttctgtattaattaaggttgctgttggctgtagaatacggtcgtggaagagctgtatcggtagctactacgtaagctattatatactggaagtctggagctcgtcgatctccggtcgtcttcctccatttctcctcgtcttgctttgactgctgctaccatttgcttctgttttctgatgaagcatgccatgtcggccaccagtgtttgtgtggtttttgcagggaatggctttcaagtgctgtgattgaatggccctcgtcgtcctcggctgagctcacatggacgcgtcatgtgagtgagatatatgatcatatgatgagtggggttcgggtgagtgcgtacttgaagtaggatcccgctttcactcattcattcattggcctttaaaccgggaaattttcgcgaggagatggagggaagcaagcagggtgacgagtgcagagtgccgcgagcgctttgtcaaaaggcaccgccgtaggcaaaaaaatcaatggccctgactgactcgatggtagtactactgtagagactagagagggttgctccccatatcttcgtgtgacttttactccagcattgcatttccgtcattgagacgttaattaatagcagctttcgggacagatgactgtggccatgtttcgtcacggccgcttcgtgccagctgggggtactatagtactgtgattttgttagtaaaaactttcattaggccaccattgacgaccgggccttcgcttttgctgcgctaattaaccatttcccggcgaccgaagggaacatgaacatgccccgacacatgagggcatgaggactagtgttctccctgtcgttcgttgacttgactagtgatagtttaaacgctcttcaactggaagagcggttactaccggttcactagctagctgctaatcgagctagttaccctatgaggtgacatgaagcgctcacggttactatgacggttagcttcacgactgttggtggcagtagcgtacgacttagctatagttccggacttacctagctaataacttcgtatagcatacattatacgaagttatggttaccgccctggccgaagctttccggacttacccttaagcgatttaaatcctgaggcctgcaacactgatagtttaaactgaaggcgggaaacgacaatctgatcatgagcggagaattaagggagtcacgttatgacccccgccgatgacgcgggacaagccgttttacgtttggaactgacagaaccgcaacgattgaaggagccactcagccgcgggtttctggagtttaatgagctaagcacatacgtcagaaaccattattgcgcgttcaaaagtcgcctaaggtcactatcagctagcaaatatttcttgtcaaaaatgctccactgacgttccataaattcccctcggtatccaattagagtctcatattcactcccatggcggccaatgcgggcggcggtggagcgggaggaggcagcggcagcggcagcgtggctgcgccggcggtgtgccgccccagcggctcgcggtggacgccgacgccggagcagatcaggatgctgaaggagctctactacggctgcggcatccggtcgcccagctcggagcagatccagcgcatcaccgccatgctgcggcagcacggcaagatcgagggcaagaacgtcttctactggttccagaaccacaaggcccgcgagcgccagaagcgccgcctcaccagcctcgacgtcaacgtgcccgccgccggcgcggccgacgccaccaccagccaactcggcgtcctctcgctgtcgtcgccgccgccttcaggcgcggcgcctccctcgcccaccctcggcttctacgccgccggcaatggcggcggatcggctgtgctgctggacacgagttccgactggggcagcagcggcgctgctatggccaccgagacatgcttcctgcaggactacatgggcgtgacggacacgggcagctcgtcgcagtggccacgcttctcgtcgtcggacacgataatggcggcggccgcggcgcgggcggcgacgacgcgggcgcccgagacgctccctctcttcccgacctgcggcgacgacggcggcagcggtagcagcagctacttgccgttctggggtgccgcgtccacaactgccggcgccacttcttccgttgcgatccaacagcaacaccagctgcaggagcagtacagcttttacagcaacagcaacagcacccagctggccggcaccggcaaccaagacgtatcggcaacagcagcagcagccgccgccctggagctgagcctcagctcatggtgctccccttaccctgctgcagggagtatgtgagagcaacgcgagctgccactgctcttcactgatgtctctggaatggaaggaggaggaagtgagaacagatcattcgacaaagcagcattagtccgttgatcggtggaagaccactcgtcagtgttgagttgaatgtttgatcaataaaatacggcaatgctgtaagggttgttttttatgccattgataatacactgtactgttcagttgttgaactctatttcttagccatgccaagtgcttttcttattttgaataacattacagcaaaaagttgaaagacaaaaaaaaaaacccccgaacagagtgctttgggtcccaagcttctttagactgtgttcggcgttccccctaaatttctccccctatatctcactcacttgtcacatcagcgttctctttccccctatatctccacgctctacagcagttccacctatatcaaacctctataccccaccacaacaatattatatactttcatcttcaactaactcatgtaccttccaatttttttctactaataattatttacgtgcacagaaacttagcaaggagagagagagcgggaatttaaatgctcggcgttaggcttttagtccgctaggtggctagaccgaggttaggacgctagttcactaggggcctagtggtgttttaagacgtcacggtcaccgcggccgcatcgagcagctggcttgtggggaccagacaaaaaaggaatggtgcagaattgttaggcgcacctaccaaaagcatctttgcctttattgcaaagataaagcagattcctctagtacaagtggggaacaaaataacgtggaaaagagctgtcctgacagcccactcactaatgcgtatgacgaacgcagtgacgaccacaaaactcgagcaacgagatcatgagccaatcaaagaggagtgatgtagacctaaagcaataatggagccatgacgtaagggcttacgcccatacgaaataattaaaggctgatgtgacctgtcggtctctcagaacctttactttttatgtttggcgtgtatttttaaatttccacggcaatgacgatgtgaccgtcgacccactaaaacattgctttgtcaaaagctaaaaaagatgatgcccgacagccacttgtgtgaagcatgagaagccggtccctccactaagaaaattagtgaagcatcttccagtggtccctccactcacagctcaatcagtgagcaacaggacgaaggaaatgacgtaagccatgacgtctaatcccattcgaaacgcgtggaccgaagcttgcatgcctgcagtgcagcgtgacccggtcgtgcccctctctagagataatgagcattgcatgtctaagttataaaaaattaccacatattttttttgtcacacttgtttgaagtgcagtttatctatctttatacatatatttaaactttactctacgaataatataatctatagtactacaataatatcagtgttttagagaatcatataaatgaacagttagacatggtctaaaggacaattgagtattttgacaacaggactctacagttttatctttttagtgtgcatgtgttctcctttttttttgcaaatagcttcacctatataatacttcatccattttattagtacatccatttagggtttagggttaatggtttttatagactaatttttttagtacatctattttattctattttagcctctaaattaagaaaactaaaactctattttagtttttttatttaataatttagatataaaatagaataaaataaagtgactaaaaattaaacaaataccctttaagaaattaaaaaaactaaggaaacatttttcttgtttcgagtagataatgccagcctgttaaacgccgtcgacgagtctaacggacaccaaccagcgaaccagcagcgtcgcgtcgggccaagcgaagcagacggcacggcatctctgtcgctgcctctggacccctctcgagagttccgctccaccgttggacttgctccgctgtcggcatccagaaattgcgtggcggagcggcagacgtgagccggcacggcaggcggcctcctcctcctctcacggcaccggcagctacgggggattcctttcccaccgctccttcgctttcccttcctcgcccgccgtaataaatagacaccccctccacaccctctttccccaacctcgtgttgttcggagcgcacacacacacaaccagatctcccccaaatccacccgtcggcacctccgcttcaaggtacgccgctcgtcctcccccccccccctctctaccttctctagatcggcgttccggtccatgcatggttagggcccggtagttctacttctgttcatgtttgtgttagatccgtgtttgtgttagatccgtgctgctagcgttcgtacacggatgcgacctgtacgtcagacacgttctgattgctaacttgccagtgtttctctttggggaatcctgggatggctctagccgttccgcagacgggatcgatttcatgattttttttgtttcgttgcatagggtttggtttgcccttttcctttatttcaatatatgccgtgcacttgtttgtcgggtcatcttttcatgcttttttttgtcttggttgtgatgatgtggtctggttgggcggtcgttctagatcggagtagaattctgtttcaaactacctggtggatttattaattttggatctgtatgtgtgtgccatacatattcatagttacgaattgaagatgatggatggaaatatcgatctaggataggtatacatgttgatgcgggttttactgatgcatatacagagatgctttttgttcgcttggttgtgatgatgtggtgtggttgggcggtcgttcattcgttctagatcggagtagaatactgtttcaaactacctggtgtatttattaattttggaactgtatgtgtgtgtcatacatcttcatagttacgagtttaagatggatggaaatatcgatctaggataggtatacatgttgatgtgggttttactgatgcatatacatgatggcatatgcagcatctattcatatgctctaaccttgagtacctatctattataataaacaagtatgttttataattattttgatcttgatatacttggatgatggcatatgcagcagctatatgtggatttttttagccctgccttcatacgctatttatttgcttggtactgtttcttttgtcgatgctcaccctgttgtttggtgttacttctgcaggtcgactttaacttagcctaggatccatggccactgtgaacaactggctcgctttctccctctccccgcaggagctgccgccctcccagacgacggactccacactcatctcggccgccaccgccgaccatgtctccggcgatgtctgcttcaacatcccccaagattggagcatgaggggatcagagctttcggcgctcgtcgcggagccgaagctggaggacttcctcggcggcatctccttctccgagcagcatcacaaggccaactgcaacatgatacccagcactagcagcacagtttgctacgcgagctcaggtgctagcaccggctaccatcaccagctgtaccaccagcccaccagctcagcgctccacttcgcggactccgtaatggtggcttcctcggccggtgtccacgacggcggtgccatgctcagcgcggccgccgctaacggtgtcgctggcgctgccagtgccaacggcggcggcatcgggctgtccatgattaagaactggctgcggagccaaccggcgcccatgcagccgagggtggcggcggctgagggcgcgcaggggctctctttgtccatgaacatggcggggacgacccaaggcgctgctggcatgccacttctcgctggagagcgcgcacgggcgcccgagagtgtatcgacgtcagcacagggtggagccgtcgtcgtcacggcgccgaaggaggatagcggtggcagcggtgttgccggcgctctagtagccgtgagcacggacacgggtggcagcggcggcgcgtcggctgacaacacggcaaggaagacggtggacacgttcgggcagcgcacgtcgatttaccgtggcgtgacaaggcatagatggactgggagatatgaggcacatctttgggataacagttgcagaagggaagggcaaactcgtaagggtcgtcaagtctatttaggtggctatgataaagaggagaaagctgctagggcttatgatcttgctgctctgaagtactggggtgccacaacaacaacaaattttccagtgagtaactacgaaaaggagctcgaggacatgaagcacatgacaaggcaggagtttgtagcgtctctgagaaggaagagcagtggtttctccagaggtgcatccatttacaggggagtgactaggcatcaccaacatggaagatggcaagcacggattggacgagttgcagggaacaaggatctttacttgggcaccttcagcacccaggaggaggcagcggaggcgtacgacatcgcggcgatcaagttccgcggcctcaacgccgtcaccaacttcgacatgagccgctacgacgtgaagagcatcctggacagcagcgccctccccatcggcagcgccgccaagcgcctcaaggaggccgaggccgcagcgtccgcgcagcaccaccacgccggcgtggtgagctacgacgtcggccgcatcgcctcgcagctcggcgacggcggagccctggcggcggcgtacggcgcgcactaccacggcgccgcctggccgaccatcgcgttccagccgggcgccgccagcacaggcctgtaccacccgtacgcgcagcagccaatgcgcggcggcgggtggtgcaagcaggagcaggaccacgcggtgatcgcggccgcgcacagcctgcaggacctccaccacctgaacctgggcgcggccggcgcgcacgactttttctcggcagggcagcaggccgccgccgctgcgatgcacggcctgggtagcatcgacagtgcgtcgctcgagcacagcaccggctccaactccgtcgtctacaacggcggggtcggcgacagcaacggcgccagcgccgtcggcggcagtggcggtggctacatgatgccgatgagcgctgccggagcaaccactacatcggcaatggtgagccacgagcaggtgcatgcacgggcctacgacgaagccaagcaggctgctcagatggggtacgagagctacctggtgaacgcggagaacaatggtggcggaaggatgtctgcatgggggactgtcgtgtctgcagccgcggcggcagcagcaagcagcaacgacaacatggccgccgacgtcgggcatggcggcgcgcagctcttcagtgtctggaacgacacttaagcgtacctagtggtacctgacatcttatagtctgcaacctctcgtgtctgaattcctatctttatcaagtgttattgcttccacgactataggacagctttcgtcgaaagcttttgctcatgtgatctcgaaggattcatctagtctgatttttcgtgacttgtatcggttttattggattcatccaacatatatcaataaaaaatgagttgtgtttcctttcttcctagttcagttaaaattatttccctcctgcgcttgtgctgtaattgtctgtgtacctgttgtttgtgactgtgttagttcccttggatatgatttcgtatttgatatgtacatggagatagcttagcttcattattggagtatgaagttagtatgacatagtcactctcctggaaaattgacactgcaaaccatatttttattctgaaccacaaatcctagtcagtccgctggcatatgccgtccgtttgctgaatccagaacgtgggtttggagatgtacggctgagatgcctctatgcgaaggggatttcgtggtgaaacgagatgggagtagagcaacgcccgtggaagatgcttcaaacttccacacttttgagcaacgatcggcagtagtaaggtagacgatttcaagatcaaagcatatgaagataaacaacatcaacaacaaaatttgttggggttctatagagagaaacagagctacatacatacactgttttgtatctaccatctgagatgatgaaaagatgaaaaactaaagaatgccccggcgccaacgccaggacacgccgcgcgcgcgtcacccgagccatctcttgacccagccggcgctgtatatttacacacgttgcagcatcgatcaccacctgttcgatcgcgtcgccgtcaccggcgcgccgcgacttattgaactagtctagggcgcggctaacaacctagcttagattgccttgtctaaacccttaggctaacgcgccactctagaaggccgatctccccgggtttaccgagctcttcaaagccaatgactgttgttaggtccagtttctaaggacgaatcatccaatcactggttctttctgaacaaaacaaagagctatagagttacgttactgtagccgagacagagcctgcaatctggttatgccacatactaggttctttcttaaagttgactcactctatcctaagttctacttacaaggagctacaacaaattggtcataaccggagagcgttcaaggaggtaatatcccatcttactctgtagcaaggctacaaaaggagagctaaagaactaggctacaaaaagagagctaaagaactaactatctagcaagactacagagctatagtgtagagatttcataaccggtgagcgttcaaggatactttgaagagaagaggtaatatctcaactagcaagactacaaaaaaatggagatataaaactaactgtctaacaagactacagagctatagtagagatagatacgttcgacacttaagcatgatctagaggttcacaaactcaatacaacacacagtggagtagggtattacgctccggcggcccgaaccactctaaatccttgtgtcctcgtgtgctcttccaccattaatgactgtaattgcagggacacgaagagttgtagcgcttttgccaacaagatccgctatatgctagtagagtggaacctgcacagcaacaagcatccaataatctgagaataagaattatgtgtggtgatggttctcatctctgcaactcgccattttcgcgagagaaccaaatccaagttggtgaagatcatgatttgggctcatgggctggcatagtagctattacctttgcaattgtggttcgaatctatccgatattctccttttcagggagagctaatgcttatgcttattgggtattttggtttgacactgcttcacgcccaaaaaaaggcaactatgtctgagttggatatggcccaaaaaaaggcagctatgtctgagttggatatggaagtcttctttcgtttagggtgaagtaagaccaagctcatgagcttattatcttaggtcggaacaaattagttgataggcatggcacatttatcaaattataatgattttaacagaaaagcaacacctctttttcagcagcaccagctttgcaagctgcaattgacactccaagcatagtatttgctccaaactcagcctgcatttcgcacaatatcatatctatttccatttggataaaatatattttccagaaatatgggaacagaatcaagatacagaaaaaagttgtggtagtagtggtaagtggaaacacaagtacagtgaaaagatagcattatttctgaacagtcaaattaaccgaaataagtagtatcacatactgcccctaaattgactacacccaatgtaaagaattgcttgagcatattgagccatcagttgtttgtttgtgtaacggatttgacaatgcagagttcaggagcaaaaaaccgcaaaggagagaaagagggaaaggatctcctagtatcccaccttgtggcgcgccctgtcaagtgcatgatggcctggtcgatctgcgtctgctgctgcggttccatcccaacgagtgcctccgacaccttgtcgttgatcacccgcaccgcgtaggcgacccccctggcgaggaacttccgcctctcggaggccccggccgcgtcggcggcggcgccctcgagcgcgcccacgctagccgtagatgctcggtgcacggccttgttggtgtgcaactcgacctcaacggccggtgcgctacgcccgtcaaggatctggcgcgcccgcaccctcgtgatcacggtgggcgcctcccgcctcatgtggccgacgatgaaaagcgccgggttaggggccttggcgcgcaccgccgtattcagggcctcctcgctcttgcgcgagagcaggtgcttccccaggtactcctgcactgacaaggctgccacagcggtggaatttgtcctcacgacttcgccacgtcgtcctcacctccctggcttcccacgactccgccgtatcgaggtgctcggtgggtcgtcttaatccgaagtccgaactaggaagacgagacagagaggtctgaggaatgggcctcgtttgatgttgagctgaattatttttccagcataagcccaggtcttggtccatgaacaaaattactagaaacccagcccagtactacgatctaaaagagggactgccactggatagctctctctagcattctccacgctccaatacagcggcgtcgtgtctatccgggtctatccgcgaacacgtgagaactctccagaaactgctttctcctccacttcatctctctcgctttccctctataaaaagaccccttctaggaattgagggagacagcaagcaccaagcagcgatccgaagctcaatcaattcactcaaacctcttccccaaatcttcgattagatcttcgttgacaagaagactagaaccgaacctgacatgtccaacctgctcacggttcaccagaaccttccggctcttccagtggacgcgacgtccgatgaagtcaggaagaacctcatggacatgttccgcgacaggcaagcgttcagcgagcacacctggaagatgctgctctccgtctgccgctcctgggctgcatggtgcaagctgaacaacaggaagtggttccccgctgagcccgaggacgtgagggattaccttctgtacctgcaagcgcgaggtttgtttctgcttctacctttgatatatatataataattatcattaattagtagtaatataatatttcaaatatttttttcaaaataaaagaatgtagtatatagcaattgcttttctgtagtttataagtgtgtatattttaatttataacttttctaatatatgaccaaaacatggtgatgcctaggtctggcagtgaagaccatccagcaacaccttggacaactgaacatgcttcacaggcgctccggcctcccgcgccccagcgactcgaacgccgtgagcctcgtcatgcgccgcatcaggaaggaaaacgtcgatgccggcgaaagggcaaagcaggccctcgcgttcgagaggaccgatttcgaccaggtccgcagcctgatggagaacagcgacaggtgccaggacattaggaacctggcgttcctcggaattgcatacaacacgctcctcaggatcgcggaaattgcccgcattcgcgtgaaggacattagccgcaccgacggcggcaggatgcttatccacattggcaggaccaagacgctcgtttccaccgcaggcgtcgaaaaggccctcagcctcggagtgaccaagctcgtcgaacgctggatctccgtgtccggcgtcgcggacgacccaaacaactacctcttctgccgcgtccgcaagaacggggtggctgcccctagcgccaccagccaactcagcacgagggccttggaaggtattttcgaggccacccaccgcctgatctacggcgcgaaggatgacagcggtcaacgctacctcgcatggtccgggcactccgcccgcgttggagctgctagggacatggcccgcgccggtgtttccatccccgaaatcatgcaggcgggtggatggacgaacgtgaacattgtcatgaactacattcgcaaccttgacagcgagacgggcgcaatggttcgcctcctggaagatggtgactgaggtacccaacctagacttgtccatcttctggattggccaacttaattaatgtatgaaataaaaggatgcacacatagtgacatgctaatcactataatgtgggcatcaaagttgtgtgttatgtgtaattactagttatctgaataaaagagaaagagatcatccatatttcttatcctaaatgaatgtcacgtgtctttataattctttgatgaaccagatgcatttcattaaccaaatccatatacatataaatattaatcatatataattaatatcaattgggttagcaaaacaaatctagtctaggtgtgttttgcgatccgataatcgatgggtctaaaaacggcccctaactaacgcttagttgcccgctagattagtcccccgttagtgcctagttagacacacgacgaactaggggctagcacgcgttagataacttcgtatagcatacattatacgaagttattccggaccgggttaccgaattcaattcctgcccttaaggccaattgttcaagattcattcaacaattgaaacatctcccatgattaaatcagtataaggttgctatggtcttgcttgacaaagtttttttttgagggaatttcaactaaatttttgagtgaaactatcaaatactgattttaaaaaatttttataaaaggaagcgcagagataaaaggccatctatgctacaaaagtacccaaaaatgtaatcctaaagtatgaattgcattttttttttgtttggacgaaaggaaaggagtattaccacaagaatgatatcatcttcatatttagatcttttttgggtaaagcttgagattctctaaatatagagaaatcagaagaaaaaaaaaccgtgttttggtggttttgatttctagcctccacaataactttgacggcgtcgacaagtctaacggacaccaagcagcgaaccaccagcgccgagccaagcgaagcagacggccgagacgttgacaccttcggcgcggcatctctcgagagttccgctccggcgctccacctccaccgctggcggtttcttattccgttccgttccgcctcctgctctgctcctctccacaccacacggcacgaaaccgttacggcaccggcagcacccagcacgggagaggggattcctttcccaccgttccttccctttccgccccgccgctataaatagccagccccatccccagcttttttccccaatctcatctcctctctcctgttgttcggagcacacgcacaatccgatcgatccccaaatccccttcgtctctcctcgcgagcctcgtggatcccagcttcaaggtacggcgatcgatcatcccccctccttctctctaccttcttttctctagactacatcggatggcgatccatggttagggcctgctagtttcccttcctgttttgtcgatggctgcgaggcacaatagatctgatggcgttatgacggctaacttgtcatgttgttgcgatttatagtccctttaggagatcagtttaatttctcggatggttcgagatcggtggtccatggttagtaccctaagatccgcgctgttagggttcgtagatggaggcgacctgttctgattgttaacttgtcagtacctgggaaatcctgggatggttctagctcgtccgcagatgagatcgatttcatgatcctctgtatcttgtttcgttgcctaggttccgtctaatctatccgtggtatgatgtagatgttttgatcgtgctaactacgtcttgtaaagttaattgtcaggtcataatttttagcatgcctttttttttgtttggttttgtctaattgggctgtcgttctagatcagagtagaagactgttccaaactacctgctggatttattgaacttggatctgtatgtgtgtcacatatcttcataaattcatgattaagatggattgaaatatcttttatctttttggtatggatagttctatatgttggtgtggctttgttagatgtatacatgcttagatacatgaagcaacgtgctgctactgtttagtaattgctgttcatttgtctaataaacagataaggatatgtatttatgttgctgttggttttgctggtactttgttggatacaaatgcttcaatacagaaaacagcatgctgctacgatttaccatttatctaatcttatcatatgtctaatctaataaacaaacatgcttttaaattatcttcatatgcttggatgatggcatacacagcggctatgtgtggttttttaaatacccagcatcatgggcatgcatgacactgctttaatatgctttttatttgcttgagactgtttcttttgtttatactgaccctttagttcggtgactcttctgcaggtcgactttaacttagcctaggatccatggcccagtccaagcacggcctgaccaaggagatgaccatgaagtaccgcatggagggctgcgtggacggccacaagttcgtgatcaccggcgagggcatcggctaccccttcaagggcaagcaggccatcaacctgtgcgtggtggagggcggccccttgcccttcgccgaggacatcttgtccgccgccttcatgtacggcaaccgcgtgttcaccgagtacccccaggacatcgtcgactacttcaagaactcctgccccgccggctacacctgggaccgctccttcctgttcgaggacggcgccgtgtgcatctgcaacgccgacatcaccgtgagcgtggaggagaactgcatgtaccacgagtccaagttctacggcgtgaacttccccgccgacggccccgtgatgaagaagatgaccgacaactgggagccctcctgcgagaagatcatccccgtgcccaagcagggcatcttgaagggcgacgtgagcatgtacctgctgctgaaggacggtggccgcttgcgctgccagttcgacaccgtgtacaaggccaagtccgtgccccgcaagatgcccgactggcacttcatccagcacaagctgacccgcgaggaccgcagcgacgccaagaaccagaagtggcacctgaccgagcacgccatcgcctccggctccgccttgccctccggactcagatctcgatagggtaccaatggccagttaacagatccagctgctgctgttctagggttcacaagtctgcctatttgtcttccccaatggagctatggttgtctggtctggtccttggtcgtgtcccgtttcattgtgtactatttacctgtaatgtgtatccttaagtctggtttgatggtgtctgaaacgttttgctgtggtagagcagcatggaagaactataatgaataagtgatccctaatcattgtgtccaaattttgcttctgctatacccttttgtgctgtttcttatgttttgcttaaaaatttgatctgacaaacaaatttgtctaaattatgctcttgttctgactgtgtactgtacacatttgtattgctaccggtttggcacatagttttctctttgattgcagatcaaacccttctgattgcagattgcttggctatggctgatgtgctcactgttcttctttagcttgtatattgctgatggtggcttggctacggctgaaaaagttgctgctgcgccgacttggcaactgttgctccagtaatgctttgtcctctcttcctagccgccgacttggcacttggcagctgttgctcctgtaatgcgttgttatctcttatctcttgagatgtactatgattttgaggctgtttgacttgtgccagattgccagtgctgatgctatattatctcaggtttttatgctagtatatgttttactgtgtgctgcctgtgtcgagttacgtaatctattgaaccgctatgcgtgttgatgccctgttgttgcttgccagattgatgcccctgttgcttgcagcttgcaagctgtagtgaaatcctaaaattcgaaaccaaatctattctgaacttttgaagatctgtgatgtccggaagaaaagattcaaacagataaacgggactctccagaatctataaaataaatgatcgacaaacgctttgctttggtaggcttcctagttagttagcggaccgaagcttcggtccgggcctagaaggccagcttcggccgcccctcggtaccctgggatctgcccttactttaacgcctctaaccaacacccctttatctttataaggaacaataaacagaatttgccccactgttctaaatcacctaataatatccccagctaaaaacaataaaggtttcctagaattaagacaagcatgactgttcctccaggagggtttggaacattgttgcagtcttgcagatacgggcgaagggtgagaaacagagcggagggctggaggtgacctcggtagtcgacgccggagttgagcttgacaacgacggggcggcccctgatggacttgaggaagtccgatggcgtcttcaccgtcccgccggcgcccgaggcgggcctgtcgctgccgccgccgccgctgctcatcttgcgcgctgtgcccccggcggtgtccctgtgttgcggatcgcgggtgggccaggtggatgcgagggcgacccgtttggactccggccggagccgccggatccctggtcggtgtcagtgccgtttactctgggccccacgtgtcagtaccgtctgtagatgacaacaacccgtcgtccacagtcatgtccaaaatatcctttcttcttttttttcgattcggatatctatcttccttttttttttccaaaaatcttcttgacgcaccagcgcgcacgtttgtggtaaacgccgacacgtcggtcccacgtcgatagaccccacccaccagtgagtagcgtgtacgtattcgggggtgacggacgtgtcgccgtcgtcttgctagtcccattcccatctgagccacacatctctgaacaaaaaaaaggagggaggcctccacgcacatccccctccgtgccacccgccccaaaccctcgcgccgcctccgagacagccgccgcaaccatggccaccgccgccgccgcgtctaccgcgctcactggcgccactaccgctgcgcccaaggcgaggcgccgggcgcacctcctggccacccgccgcgccctcgccgcgcccatcaggtgctcagcggcgtcacccgccatgccgatggctcccccggccaccccgctccggccgtggggccccaccgagccccgcaagggtgctgacatcctcgtcgagtccctcgagcgctgcggcgtccgcgacgtcttcgcctaccccggcggcgcgtccatggagatccaccaggcactcacccgctcccccgtcatcgccaaccacctcttccgccacgagcaaggggaggcctttgccgcctccggctacgcgcgctcctcgggccgcgtcggcgtctgcatcgccacctccggccccggcgccaccaacctagtctccgcgctcgccgacgcgctgctcgattccgtccccatggtcgccatcacgggacaggtggcgcgacgcatgattggcaccgacgccttccaggagacgcccatcgtcgaggtcacccgctccatcaccaagcacaactacctggtcctcgacgtcgacgacatcccccgcgtcgtgcaggaggctttcttcctcgcctcctctggtcgaccagggccggtgcttgtcgacatccccaaggacatccagcagcagatggcggtgcctgtctgggacaagcccatgagtctgcctgggtacattgcgcgccttcccaagccccctgcgactgagttgcttgagcaggtgctgcgtcttgttggtgaatcgcggcgccctgttctttatgtgggcggtggctgcgcagcatctggtgaggagttgcgacgctttgtggagctgactggaatcccggtcacaactactcttatgggcctcggcaacttccccagcgacgacccactgtctctgcgcatgctaggtatgcatgggacggtgtatgcaaattatgcagtggataaggccgatctgttgcttgcacttggtgtgcggtttgatgatcgcgtgacagggaagattgaggcttttgcaagcagggctaagattgtgcacgttgatattgatccggctgagattggcaagaacaagcagccacatgtgtccatctgtgcagatgttaagcttgctttgcagggcatgaatgctcttcttgaaggaagcacatcaaagaagagctttgactttggctcatggaacgatgagttggatcagcagaagagggaattcccccttgggtataaaacatctaatgaggagatccagccacaatatgctattcaggttcttgatgagctgacgaaaggcgaggccatcatcggcacaggtgttgggcagcaccagatgtgggcggcacagtactacacttacaagcggccaaggcagtggttgtcttcagctggtcttggggctatgggatttggtttgccggctgctgctggtgcttctgtggcaaacccaggtgtcactgttgttgacatcgatggagatggtagctttctcatgaacgttcaggagctagctatgatccgaattgagaacctcccagtgaaggtctttgtgctaaacaaccagcacctggggatggtggtgcagttggaggacaggttctataaggccaacagagcgcacacatacttgggaaacccagagaatgaaagtgagatatatccagatttcgtgacgatcgccaaagggttcaacattccagccgtccgtgtgacaaagaagaacgaagtccgcgcagcgataaagaagatgctcgagactccagggccgtacctcttggatataatcgtcccacaccaggagcatgtgttgcctatgatccctagtggtggggctttcaaggatatgatcctggatggtgatggcaggactgtgtactgacttcgaataggtacccggggatcctctagtgccgtgggtcgtttaagctgccgctgtacctgtgtcgtctggtgccttctggtgtacctgggaggttgtcgtctatcaagtatctgtggttggtgtcatgagtcagtgagtcccaatactgttcgtgtcctgtgtgcattatacccaaaactgttatgggcaaatcatgaataagcttgatgttcgaacttaaaagtctctgctcaatatggtattatggttgtttttgttcgtctcctaatatttgcctgggatcaaattttattggctggtgttcatttgacctccatgttcttgctaggctccattttttactctacagccataatatgtttgattgtttggtttgttctttgttgtacacctggttctgtcgagcttagttttcgacactggcttacagcttaacatgttgctattttattgggttctgattgctattttattgggttctgattgctagtttttgctgaatccaaaaaccatgttatttatttaagcgatccaggttattattatgatggtggctaagtttttttttttccaagggtaaattttctggattctccagtgtttctgtggccgaattcaatcactagagtcgacctgcaaagcttcggtccgggcctagaaggcccgcgccacttacgcttgattccgatgacttcgtaggttcctagctcaagccgctcgtgtccaagcgtcacttacgattagctaatgattacggcatctaggaccgactagttcttatgtgcttctagtctccaaatgtggttgatagttattttgctctaagatcaacagtaatgaagtataaatcatcgttgtggtgtgctactcggttaattgagcattaacacacacaaacatgacgaggatggtataatctccaaaaatgtgtactttgttaggtgggaccctatagccttgattaatgtgctatgttaggcatgcctggaaacgtgtgacgcatatgttttgtgaacctgttgatattatatgtgcttttatattaccatattttattaaaatactaatatttattactagtaagatataacattctatctagcttaaaaactaaccataaatattccataataactagatttaccaaactaatatactaaatatacataataaatacaaaattaacaagacaataatcaatatttatgagcttaatatatttagacattatggttggtcgacgataatcatgctaacttttcgtaattgcttgattgaaatatgcttagaataatgcctctttgttctacatggcaaatagggaccattatggtgtaacaccctgggaaccacaaacaccccgaaatgctactaaactacacaactaaccttcatatataaaatttcgacagcatctcctttgaaaatttgcatagacgtggaagcaacagagtataaacagatctgcgtttaaacgtgcaagcgctactagacaattcagtacattaaaaacgtccgcaatgtgttattaagttgtctaagcgtcaatttgtttacaccacaatatatcctgcca

SEQ ID NO: 69 - DNA, 20132 bp, Artificial sequence
  PHP96664
gtttacccgccaatatatcctgtcaaacactgcggccgcacttgaccgcggatggagccggagctgtggtgaggccatcgacgggaggtgggggagaacacagtctcagtgttctttgtgagtccgcaaggtttttagcttttctgtattaattaaggttgctgttggctgtagaatacggtcgtggaagagctgtatcggtagctactacgtaagctattatatactggaagtctggagctcgtcgatctccggtcgtcttcctccatttctcctcgtcttgctttgactgctgctaccatttgcttctgttttctgatgaagcatgccatgtcggccaccagtgtttgtgtggtttttgcagggaatggctttcaagtgctgtgattgaatggccctcgtcgtcctcggctgagctcacatggacgcgtcatgtgagtgagatatatgatcatatgatgagtggggttcgggtgagtgcgtacttgaagtaggatcccgctttcactcattcattcattggcctttaaaccgggaaattttcgcgaggagatggagggaagcaagcagggtgacgagtgcagagtgccgcgagcgctttgtcaaaaggcaccgccgtaggcaaaaaaatcaatggccctgactgactcgatggtagtactactgtagagactagagagggttgctccccatatcttcgtgtgacttttactccagcattgcatttccgtcattgagacgttaattaatagcagctttcgggacagatgactgtggccatgtttcgtcacggccgcttcgtgccagctgggggtactatagtactgtgattttgttagtaaaaactttcattaggccaccattgacgaccgggccttcgcttttgctgcgctaattaaccatttcccggcgaccgaagggaacatgaacatgccccgacacatgagggcatgaggactagtgttctccctgtcgttcgttgacttgactagtgatagtttaaacgctcttcaactggaagagcggttactaccggttcactagctagctgctaatcgagctagttaccctatgaggtgacatgaagcgctcacggttactatgacggttagcttcacgactgttggtggcagtagcgtacgacttagctatagttccggacttacctagctaataacttcgtatagcatacattatacgaagttatggttaccgaattcgagctcggtaccctggttcacaaactcaatacaacacacagtggagtagggtattacgctccggcggcccgaaccactctaaatccttgtgtcctcgtgtgctcttccaccattaatgactgtaattgcagggacacgaagagttgtagcgcttttgccaacaagatccgctatatgctagtagagtggaacctgcacagcaacaagcatccaataatctgagaataagaattatgtgtggtgatggttctcatctctgcaactcgccattttcgcgagagaaccaaatccaagttggtgaagatcatgatttgggctcatgggctggcatagtagctattacctttgcaattgtggttcgaatctatccgatattctccttttcagggagagctaatgcttatgcttattgggtattttggtttgacactgcttcacgcccaaaaaaaggcaactatgtctgagttggatatggcccaaaaaaaggcagctatgtctgagttggatatggaagtcttctttcgtttagggtgaagtaagaccaagctcatgagcttattatcttaggtcggaacaaattagttgataggcatggcacatttatcaaattataatgattttaacagaaaagcaacacctctttttcagcagcaccagctttgcaagctgcaattgacactccaagcatagtatttgctccaaactcagcctgcatttcgcacaatatcatatctatttccatttggataaaatatattttccagaaatatgggaacagaatcaagatacagaaaaaagttgtggtagtagtggtaagtggaaacacaagtacagtgaaaagatagcattatttctgaacagtcaaattaaccgaaataagtagtatcacatactgcccctaaattgactacacccaatgtaaagaattgcttgagcatattgagccatcagttgtttgtttgtgtaacggatttgacaatgcagagttcaggagcaaaaaaccgcaaaggagagaaagagggaaaggatctcctagtatcccaccttgtggcgcgccctgtcaagtgcatgatggcctggtcgatctgcgtctgctgctgcggttccatcccaacgagtgcctccgacaccttgtcgttgatcacccgcaccgcgtaggcgacccccctggcgaggaacttccgcctctcggaggccccggccgcgtcggcggcggcgccctcgagcgcgcccacgctagccgtagatgctcggtgcacggccttgttggtgtgcaactcgacctcaacggccggtgcgctacgcccgtcaaggatctggcgcgcccgcaccctcgtgatcacggtgggcgcctcccgcctcatgtggccgacgatgaaaagcgccgggttaggggccttggcgcgcaccgccgtattcagggcctcctcgctcttgcgcgagagcaggtgcttccccaggtactcctgcactgacaaggctgccacagcggtggaatttgtcctcacgacttcgccacgtcgtcctcacctccctggcttcccacgactccgccgtatcgaggtgctcggtgggtcgtcttaatccgaagtccgaactaggaagacgagacagagaggtctgaggaatgggcctcgtttgatgttgagctgaattatttttccagcataagcccaggtcttggtccatgaacaaaattactagaaacccagcccagtactacgatctaaaagagggactgccactggatagctctctctagcattctccacgctccaatacagcggcgtcgtgtctatccgggtctatccgcgaacacgtgagaactctccagaaactgctttctcctccacttcatctctctcgctttccctctataaaaagaccccttctaggaattgagggagacagcaagcaccaagcagcgatccgaagctcaatcaattcactcaaacctcttccccaaatcttcgattagatcttcgttgacaagaagactagaaccgaacctgacatgtccaacctgctcacggttcaccagaaccttccggctcttccagtggacgcgacgtccgatgaagtcaggaagaacctcatggacatgttccgcgacaggcaagcgttcagcgagcacacctggaagatgctgctctccgtctgccgctcctgggctgcatggtgcaagctgaacaacaggaagtggttccccgctgagcccgaggacgtgagggattaccttctgtacctgcaagcgcgaggtttgtttctgcttctacctttgatatatatataataattatcattaattagtagtaatataatatttcaaatatttttttcaaaataaaagaatgtagtatatagcaattgcttttctgtagtttataagtgtgtatattttaatttataacttttctaatatatgaccaaaacatggtgatgcctaggtctggcagtgaagaccatccagcaacaccttggacaactgaacatgcttcacaggcgctccggcctcccgcgccccagcgactcgaacgccgtgagcctcgtcatgcgccgcatcaggaaggaaaacgtcgatgccggcgaaagggcaaagcaggccctcgcgttcgagaggaccgatttcgaccaggtccgcagcctgatggagaacagcgacaggtgccaggacattaggaacctggcgttcctcggaattgcatacaacacgctcctcaggatcgcggaaattgcccgcattcgcgtgaaggacattagccgcaccgacggcggcaggatgcttatccacattggcaggaccaagacgctcgtttccaccgcaggcgtcgaaaaggccctcagcctcggagtgaccaagctcgtcgaacgctggatctccgtgtccggcgtcgcggacgacccaaacaactacctcttctgccgcgtccgcaagaacggggtggctgcccctagcgccaccagccaactcagcacgagggccttggaaggtattttcgaggccacccaccgcctgatctacggcgcgaaggatgacagcggtcaacgctacctcgcatggtccgggcactccgcccgcgttggagctgctagggacatggcccgcgccggtgtttccatccccgaaatcatgcaggcgggtggatggacgaacgtgaacattgtcatgaactacattcgcaaccttgacagcgagacgggcgcaatggttcgcctcctggaagatggtgactgaggtacccaacctagacttgtccatcttctggattggccaacttaattaatgtatgaaataaaaggatgcacacatagtgacatgctaatcactataatgtgggcatcaaagttgtgtgttatgtgtaattactagttatctgaataaaagagaaagagatcatccatatttcttatcctaaatgaatgtcacgtgtctttataattctttgatgaaccagatgcatttcattaaccaaatccatatacatataaatattaatcatatataattaatatcaattgggttagcaaaacaaatctagtctaggtgtgttttgcgatccgatcgaggccggccacactgatagtttaaactgaaggcgggaaacgacaatctgatcatgagcggagaattaagggagtcacgttatgacccccgccgatgacgcgggacaagccgttttacgtttggaactgacagaaccgcaacgattgaaggagccactcagccgcgggtttctggagtttaatgagctaagcacatacgtcagaaaccattattgcgcgttcaaaagtcgcctaaggtcactatcagctagcaaatatttcttgtcaaaacgtaagcgcttacgcaccgaacaacgtaagcgcttacgcaccgaacaacgtaagcgcttacgcaatgctccactgacgttccataaattcccctcggtatccaattagagtctcatattcactctcccggcggatctcgactctagaggatcgctcaggaaggccgctgagatagagccatggcggccaatgcgggcggcggtggagcgggaggaggcagcggcagcggcagcgtggctgcgccggcggtgtgccgccccagcggctcgcggtggacgccgacgccggagcagatcaggatgctgaaggagctctactacggctgcggcatccggtcgcccagctcggagcagatccagcgcatcaccgccatgctgcggcagcacggcaagatcgagggcaagaacgtcttctactggttccagaaccacaaggcccgcgagcgccagaagcgccgcctcaccagcctcgacgtcaacgtgcccgccgccggcgcggccgacgccaccaccagccaactcggcgtcctctcgctgtcgtcgccgccgccttcaggcgcggcgcctccctcgcccaccctcggcttctacgccgccggcaatggcggcggatcggctgtgctgctggacacgagttccgactggggcagcagcggcgctgctatggccaccgagacatgcttcctgcaggactacatgggcgtgacggacacgggcagctcgtcgcagtggccacgcttctcgtcgtcggacacgataatggcggcggccgcggcgcgggcggcgacgacgcgggcgcccgagacgctccctctcttcccgacctgcggcgacgacggcggcagcggtagcagcagctacttgccgttctggggtgccgcgtccacaactgccggcgccacttcttccgttgcgatccaacagcaacaccagctgcaggagcagtacagcttttacagcaacagcaacagcacccagctggccggcaccggcaaccaagacgtatcggcaacagcagcagcagccgccgccctggagctgagcctcagctcatggtgctccccttaccctgctgcagggagtatgtgagagcaacgcgagctgccactgctcttcactgatgtctctggaatggaaggaggaggaagtgagaacagatcattcgacaaagcagcattagtccgttgatcggtggaagaccactcgtcagtgttgagttgaatgtttgatcaataaaatacggcaatgctgtaagggttgttttttatgccattgataatacactgtactgttcagttgttgaactctatttcttagccatgccaagtgcttttcttattttgaataacattacagcaaaaagttgaaagacaaaaaaaaaaacccccgaacagagtgctttgggtcccaagcttctttagactgtgttcggcgttccccctaaatttctccccctatatctcactcacttgtcacatcagcgttctctttccccctatatctccacgctctacagcagttccacctatatcaaacctctataccccaccacaacaatattatatactttcatcttcaactaactcatgtaccttccaatttttttctactaataattatttacgtgcacagaaacttagcaaggagagagagagcgggaatttaaatgctcggcgttaggcttttagtccgctaggtggctagaccgaggttaggacgctagttcactaggggcctagtggtgttttaagacgtcacggtcacccggtccgggcctagaaggccagcttcaagtttgtacaaaaaagcaggctccggccagaatggcccggaccgaagcttgcatgcctgcagtgcagcgtgacccggtcgtgcccctctctagagataatgagcattgcatgtctaagttataaaaaattaccacatattttttttgtcacacttgtttgaagtgcagtttatctatctttatacatatatttaaactttactctacgaataatataatctatagtactacaataatatcagtgttttagagaatcatataaatgaacagttagacatggtctaaaggacaattgagtattttgacaacaggactctacagttttatctttttagtgtgcatgtgttctcctttttttttgcaaatagcttcacctatataatacttcatccattttattagtacatccatttagggtttagggttaatggtttttatagactaatttttttagtacatctattttattctattttagcctctaaattaagaaaactaaaactctattttagtttttttatttaataatttagatataaaatagaataaaataaagtgactaaaaattaaacaaataccctttaagaaattaaaaaaactaaggaaacatttttcttgtttcgagtagataatgccagcctgttaaacgccgtcgacgagtctaacggacaccaaccagcgaaccagcagcgtcgcgtcgggccaagcgaagcagacggcacggcatctctgtcgctgcctctggacccctctcgagagttccgctccaccgttggacttgctccgctgtcggcatccagaaattgcgtggcggagcggcagacgtgagccggcacggcaggcggcctcctcctcctctcacggcaccggcagctacgggggattcctttcccaccgctccttcgctttcccttcctcgcccgccgtaataaatagacaccccctccacaccctctttccccaacctcgtgttgttcggagcgcacacacacacaaccagatctcccccaaatccacccgtcggcacctccgcttcaaggtacgccgctcgtcctcccccccccccctctctaccttctctagatcggcgttccggtccatgcatggttagggcccggtagttctacttctgttcatgtttgtgttagatccgtgtttgtgttagatccgtgctgctagcgttcgtacacggatgcgacctgtacgtcagacacgttctgattgctaacttgccagtgtttctctttggggaatcctgggatggctctagccgttccgcagacgggatcgatttcatgattttttttgtttcgttgcatagggtttggtttgcccttttcctttatttcaatatatgccgtgcacttgtttgtcgggtcatcttttcatgcttttttttgtcttggttgtgatgatgtggtctggttgggcggtcgttctagatcggagtagaattctgtttcaaactacctggtggatttattaattttggatctgtatgtgtgtgccatacatattcatagttacgaattgaagatgatggatggaaatatcgatctaggataggtatacatgttgatgcgggttttactgatgcatatacagagatgctttttgttcgcttggttgtgatgatgtggtgtggttgggcggtcgttcattcgttctagatcggagtagaatactgtttcaaactacctggtgtatttattaattttggaactgtatgtgtgtgtcatacatcttcatagttacgagtttaagatggatggaaatatcgatctaggataggtatacatgttgatgtgggttttactgatgcatatacatgatggcatatgcagcatctattcatatgctctaaccttgagtacctatctattataataaacaagtatgttttataattattttgatcttgatatacttggatgatggcatatgcagcagctatatgtggatttttttagcactgccttcatacgctatttatttgcttggtactgtttcttttgtcgatgctcaccctgttgtttggtgttacttctgcaggtcgactttaacttagcctaggatccatggccactgtgaacaactggctcgctttctccctctccccgcaggagctgccgccctcccagacgacggactccacactcatctcggccgccaccgccgaccatgtctccggcgatgtctgcttcaacatcccccaagattggagcatgaggggatcagagctttcggcgctcgtcgcggagccgaagctggaggacttcctcggcggcatctccttctccgagcagcatcacaaggccaactgcaacatgatacccagcactagcagcacagtttgctacgcgagctcaggtgctagcaccggctaccatcaccagctgtaccaccagcccaccagctcagcgctccacttcgcggactccgtaatggtggcttcctcggccggtgtccacgacggcggtgccatgctcagcgcggccgccgctaacggtgtcgctggcgctgccagtgccaacggcggcggcatcgggctgtccatgattaagaactggctgcggagccaaccggcgcccatgcagccgagggtggcggcggctgagggcgcgcaggggctctctttgtccatgaacatggcggggacgacccaaggcgctgctggcatgccacttctcgctggagagcgcgcacgggcgcccgagagtgtatcgacgtcagcacagggtggagccgtcgtcgtcacggcgccgaaggaggatagcggtggcagcggtgttgccggcgctctagtagccgtgagcacggacacgggtggcagcggcggcgcgtcggctgacaacacggcaaggaagacggtggacacgttcgggcagcgcacgtcgatttaccgtggcgtgacaaggcatagatggactgggagatatgaggcacatctttgggataacagttgcagaagggaagggcaaactcgtaagggtcgtcaagtctatttaggtggctatgataaagaggagaaagctgctagggcttatgatcttgctgctctgaagtactggggtgccacaacaacaacaaattttccagtgagtaactacgaaaaggagctcgaggacatgaagcacatgacaaggcaggagtttgtagcgtctctgagaaggaagagcagtggtttctccagaggtgcatccatttacaggggagtgactaggcatcaccaacatggaagatggcaagcacggattggacgagttgcagggaacaaggatctttacttgggcaccttcagcacccaggaggaggcagcggaggcgtacgacatcgcggcgatcaagttccgcggcctcaacgccgtcaccaacttcgacatgagccgctacgacgtgaagagcatcctggacagcagcgccctccccatcggcagcgccgccaagcgcctcaaggaggccgaggccgcagcgtccgcgcagcaccaccacgccggcgtggtgagctacgacgtcggccgcatcgcctcgcagctcggcgacggcggagccctggcggcggcgtacggcgcgcactaccacggcgccgcctggccgaccatcgcgttccagccgggcgccgccagcacaggcctgtaccacccgtacgcgcagcagccaatgcgcggcggcgggtggtgcaagcaggagcaggaccacgcggtgatcgcggccgcgcacagcctgcaggacctccaccacctgaacctgggcgcggccggcgcgcacgactttttctcggcagggcagcaggccgccgccgctgcgatgcacggcctgggtagcatcgacagtgcgtcgctcgagcacagcaccggctccaactccgtcgtctacaacggcggggtcggcgacagcaacggcgccagcgccgtcggcggcagtggcggtggctacatgatgccgatgagcgctgccggagcaaccactacatcggcaatggtgagccacgagcaggtgcatgcacgggcctacgacgaagccaagcaggctgctcagatggggtacgagagctacctggtgaacgcggagaacaatggtggcggaaggatgtctgcatgggggactgtcgtgtctgcagccgcggcggcagcagcaagcagcaacgacaacatggccgccgacgtcgggcatggcggcgcgcagctcttcagtgtctggaacgacacttaagcgtacctagtggtacctgacatcttatagtctgcaacctctcgtgtctgaattcctatctttatcaagtgttattgcttccacgactataggacagctttcgtcgaaagcttttgctcatgtgatctcgaaggattcatctagtctgatttttcgtgacttgtatcggttttattggattcatccaacatatatcaataaaaaatgagttgtgtttcctttcttcctagttcagttaaaattatttccctcctgcgcttgtgctgtaattgtctgtgtacctgttgtttgtgactgtgttagttcccttggatatgatttcgtatttgatatgtacatggagatagcttagcttcattattggagtatgaagttagtatgacatagtcactctcctggaaaattgacactgcaaaccatatttttattctgaaccacaaatcctagtcagtccgctggcatatgccgtccgtttgctgaatccagaacgtgggtttggagatgtacggctgagatgcctctatgcgaaggggatttcgtggtgaaacgagatgggagtagagcaacgcccgtggaagatgcttcaaacttccacacttttgagcaacgatcggcagtagtaaggtagacgatttcaagatcaaagcatatgaagataaacaacatcaacaacaaaatttgttggggttctatagagagaaacagagctacatacatacactgttttgtatctaccatctgagatgatgaaaagatgaaaaactaaagaatgccccggcgccaacgccaggacacgccgcgcgcgcgtcacccgagccatctcttgacccagccggcgctgtatatttacacacgttgcagcatcgatcaccacctgttcgatcgcgtcgccgtcaccggcgcgccgcgacttattgaactagtctagggcgcggctaacaacctagcttagattgccttgtctaaacccttaggctaacgcgccactctagaaggccgatctccccgggtgatcagctgcccttaaggccaattgttcaagattcattcaacaattgaaacatctcccatgattaaatcagtataaggttgctatggtcttgcttgacaaagtttttttttgagggaatttcaactaaatttttgagtgaaactatcaaatactgattttaaaaaatttttataaaaggaagcgcagagataaaaggccatctatgctacaaaagtacccaaaaatgtaatcctaaagtatgaattgcattttttttttgtttggacgaaaggaaaggagtattaccacaagaatgatatcatcttcatatttagatcttttttgggtaaagcttgagattctctaaatatagagaaatcagaagaaaaaaaaaccgtgttttggtggttttgatttctagcctccacaataactttgacggcgtcgacaagtctaacggacaccaagcagcgaaccaccagcgccgagccaagcgaagcagacggccgagacgttgacaccttcggcgcggcatctctcgagagttccgctccggcgctccacctccaccgctggcggtttcttattccgttccgttccgcctcctgctctgctcctctccacaccacacggcacgaaaccgttacggcaccggcagcacccagcacgggagaggggattcctttcccaccgttccttccctttccgccccgccgctataaatagccagccccatccccagcttttttccccaatctcatctcctctctcctgttgttcggagcacacgcacaatccgatcgatccccaaatccccttcgtctctcctcgcgagcctcgtggatcccagcttcaaggtacggcgatcgatcatcccccctccttctctctaccttcttttctctagactacatcggatggcgatccatggttagggcctgctagtttcccttcctgttttgtcgatggctgcgaggcacaatagatctgatggcgttatgacggctaacttgtcatgttgttgcgatttatagtccctttaggagatcagtttaatttctcggatggttcgagatcggtggtccatggttagtaccctaagatccgcgctgttagggttcgtagatggaggcgacctgttctgattgttaacttgtcagtacctgggaaatcctgggatggttctagctcgtccgcagatgagatcgatttcatgatcctctgtatcttgtttcgttgcctaggttccgtctaatctatccgtggtatgatgtagatgttttgatcgtgctaactacgtcttgtaaagttaattgtcaggtcataatttttagcatgcctttttttttgtttggttttgtctaattgggctgtcgttctagatcagagtagaagactgttccaaactacctgctggatttattgaacttggatctgtatgtgtgtcacatatcttcataaattcatgattaagatggattgaaatatcttttatctttttggtatggatagttctatatgttggtgtggctttgttagatgtatacatgcttagatacatgaagcaacgtgctgctactgtttagtaattgctgttcatttgtctaataaacagataaggatatgtatttatgttgctgttggttttgctggtactttgttggatacaaatgcttcaatacagaaaacagcatgctgctacgatttaccatttatctaatcttatcatatgtctaatctaataaacaaacatgcttttaaattatcttcatatgcttggatgatggcatacacagcggctatgtgtggttttttaaatacccagcatcatgggcatgcatgacactgctttaatatgctttttatttgcttgagactgtttcttttgtttatactgaccctttagttcggtgactcttctgcaggtcgactttaacttagcctaggatccatggcccagtccaagcacggcctgaccaaggagatgaccatgaagtaccgcatggagggctgcgtggacggccacaagttcgtgatcaccggcgagggcatcggctaccccttcaagggcaagcaggccatcaacctgtgcgtggtggagggcggccccttgcccttcgccgaggacatcttgtccgccgccttcatgtacggcaaccgcgtgttcaccgagtacccccaggacatcgtcgactacttcaagaactcctgccccgccggctacacctgggaccgctccttcctgttcgaggacggcgccgtgtgcatctgcaacgccgacatcaccgtgagcgtggaggagaactgcatgtaccacgagtccaagttctacggcgtgaacttccccgccgacggccccgtgatgaagaagatgaccgacaactgggagccctcctgcgagaagatcatccccgtgcccaagcagggcatcttgaagggcgacgtgagcatgtacctgctgctgaaggacggtggccgcttgcgctgccagttcgacaccgtgtacaaggccaagtccgtgccccgcaagatgcccgactggcacttcatccagcacaagctgacccgcgaggaccgcagcgacgccaagaaccagaagtggcacctgaccgagcacgccatcgcctccggctccgccttgccctccggactcagatctcgatagggtaccaatggccagttaacagatccagctgctgctgttctagggttcacaagtctgcctatttgtcttccccaatggagctatggttgtctggtctggtccttggtcgtgtcccgtttcattgtgtactatttacctgtaatgtgtatccttaagtctggtttgatggtgtctgaaacgttttgctgtggtagagcagcatggaagaactataatgaataagtgatccctaatcattgtgtccaaattttgcttctgctatacccttttgtgctgtttcttatgttttgcttaaaaatttgatctgacaaacaaatttgtctaaattatgctcttgttctgactgtgtactgtacacatttgtattgctaccggtttggcacatagttttctctttgattgcagatcaaacccttctgattgcagattgcttggctatggctgatgtgctcactgttcttctttagcttgtatattgctgatggtggcttggctacggctgaaaaagttgctgctgcgccgacttggcaactgttgctccagtaatgctttgtcctctcttcctagccgccgacttggcacttggcagctgttgctcctgtaatgcgttgttatctcttatctcttgagatgtactatgattttgaggctgtttgacttgtgccagattgccagtgctgatgctatattatctcaggtttttatgctagtatatgttttactgtgtgctgcctgtgtcgagttacgtaatctattgaaccgctatgcgtgttgatgccctgttgttgcttgccagattgatgcccctgttgcttgcagcttgcaagctgtagtgaaatcctaaaattcgaaaccaaatctattctgaacttttgaagatctgtgatgtccggaagaaaagattcaaacagataaacgggactctccagaatctataaaataaatgatcgacaaacgctttgctttggtaggcttcctagttagttagcggaccgaagcttcggtccgggcctagaaggccagcttcggccgcccctcggtaccctgggatctgcccttactttaacgcctctaaccaacacccctttatctttataaggaacaataaacagaatttgccccactgttctaaatcacctaataatatccccagctaaaaacaataaaggtttcctagaattaagacaagcatgactgttcctccaggagggtttggaacattgttgcagtcttgcagatacgggcgaagggtgagaaacagagcggagggctggaggtgacctcggtagtcgacgccggagttgagcttgacaacgacggggcggcccctgatggacttgaggaagtccgatggcgtcttcaccgtcccgccggcgcccgaggcgggcctgtcgctgccgccgccgccgctgctcatcttgcgcgctgtgcccccggcggtgtccctgtgttgcggatcgcgggtgggccaggtggatgcgagggcgacccgtttggactccggccggagccgccggatccctggtcggtgtcagtgccgtttactctgggccccacgtgtcagtaccgtctgtagatgacaacaacccgtcgtccacagtcatgtccaaaatatcctttcttcttttttttcgattcggatatctatcttccttttttttttccaaaaatcttcttgacgcaccagcgcgcacgtttgtggtaaacgccgacacgtcggtcccacgtcgatagaccccacccaccagtgagtagcgtgtacgtattcgggggtgacggacgtgtcgccgtcgtcttgctagtcccattcccatctgagccacacatctctgaacaaaaaaaaggagggaggcctccacgcacatccccctccgtgccacccgccccaaaccctcgcgccgcctccgagacagccgccgcaaccatggccaccgccgccgccgcgtctaccgcgctcactggcgccactaccgctgcgcccaaggcgaggcgccgggcgcacctcctggccacccgccgcgccctcgccgcgcccatcaggtgctcagcggcgtcacccgccatgccgatggctcccccggccaccccgctccggccgtggggccccaccgagccccgcaagggtgctgacatcctcgtcgagtccctcgagcgctgcggcgtccgcgacgtcttcgcctaccccggcggcgcgtccatggagatccaccaggcactcacccgctcccccgtcatcgccaaccacctcttccgccacgagcaaggggaggcctttgccgcctccggctacgcgcgctcctcgggccgcgtcggcgtctgcatcgccacctccggccccggcgccaccaacctagtctccgcgctcgccgacgcgctgctcgattccgtccccatggtcgccatcacgggacaggtggcgcgacgcatgattggcaccgacgccttccaggagacgcccatcgtcgaggtcacccgctccatcaccaagcacaactacctggtcctcgacgtcgacgacatcccccgcgtcgtgcaggaggctttcttcctcgcctcctctggtcgaccagggccggtgcttgtcgacatccccaaggacatccagcagcagatggcggtgcctgtctgggacaagcccatgagtctgcctgggtacattgcgcgccttcccaagccccctgcgactgagttgcttgagcaggtgctgcgtcttgttggtgaatcgcggcgccctgttctttatgtgggcggtggctgcgcagcatctggtgaggagttgcgacgctttgtggagctgactggaatcccggtcacaactactcttatgggcctcggcaacttccccagcgacgacccactgtctctgcgcatgctaggtatgcatgggacggtgtatgcaaattatgcagtggataaggccgatctgttgcttgcacttggtgtgcggtttgatgatcgcgtgacagggaagattgaggcttttgcaagcagggctaagattgtgcacgttgatattgatccggctgagattggcaagaacaagcagccacatgtgtccatctgtgcagatgttaagcttgctttgcagggcatgaatgctcttcttgaaggaagcacatcaaagaagagctttgactttggctcatggaacgatgagttggatcagcagaagagggaattcccccttgggtataaaacatctaatgaggagatccagccacaatatgctattcaggttcttgatgagctgacgaaaggcgaggccatcatcggcacaggtgttgggcagcaccagatgtgggcggcacagtactacacttacaagcggccaaggcagtggttgtcttcagctggtcttggggctatgggatttggtttgccggctgctgctggtgcttctgtggcaaacccaggtgtcactgttgttgacatcgatggagatggtagctttctcatgaacgttcaggagctagctatgatccgaattgagaacctcccagtgaaggtctttgtgctaaacaaccagcacctggggatggtggtgcagttggaggacaggttctataaggccaacagagcgcacacatacttgggaaacccagagaatgaaagtgagatatatccagatttcgtgacgatcgccaaagggttcaacattccagccgtccgtgtgacaaagaagaacgaagtccgcgcagcgataaagaagatgctcgagactccagggccgtacctcttggatataatcgtcccacaccaggagcatgtgttgcctatgatccctagtggtggggctttcaaggatatgatcctggatggtgatggcaggactgtgtactgacttcgaataggtacccggggatcctctagtgccgtgggtcgtttaagctgccgctgtacctgtgtcgtctggtgccttctggtgtacctgggaggttgtcgtctatcaagtatctgtggttggtgtcatgagtcagtgagtcccaatactgttcgtgtcctgtgtgcattatacccaaaactgttatgggcaaatcatgaataagcttgatgttcgaacttaaaagtctctgctcaatatggtattatggttgtttttgttcgtctcctaatatttgcctgggatcaaattttattggctggtgttcatttgacctccatgttcttgctaggctccattttttactctacagccataatatgtttgattgtttggtttgttctttgttgtacacctggttctgtcgagcttagttttcgacactggcttacagcttaacatgttgctattttattgggttctgattgctattttattgggttctgattgctagtttttgctgaatccaaaaaccatgttatttatttaagcgatccaggttattattatgatggtggctaagtttttttttttccaagggtaaattttctggattctccagtgtttctgtggccgaattcaatcactagagtcgacctgcaaagcttcggtccgggcctagaaggcccgcgccacttacgcttgattccgatgacttcgtaggttcctagctcaagccgctcgtgtccaagcgtcacttacgattagctaatgattacggcatctaggaccgactagttcttatgtgcttctagtctccaaatgtggttgatagttattttgctctaagatcaacagtaatgaagtataaatcatcgttgtggtgtgctactcggttaattgagcattaacacacacaaacatgacgaggatggtataatctccaaaaatgtgtactttgttaggtgggaccctatagccttgattaatgtgctatgttaggcatgcctggaaacgtgtgacgcatatgttttgtgaacctgttgatattatatgtgcttttatattaccatattttattaaaatactaatatttattactagtaagatataacattctatctagcttaaaaactaaccataaatattccataataactagatttaccaaactaatatactaaatatacataataaatacaaaattaacaagacaataatcaatatttatgagcttaatatatttagacattatggttggtcgacgataatcatgctaacttttcgtaattgcttgattgaaatatgcttagaataatgcctctttgttctacatggcaaatagggaccattatggtgtaacaccctgggaaccacaaacaccccgaaatgctactaaactacacaactaaccttcatatataaaatttcgacagcatctcctttgaaaatttgcatagacgtggaagcaacagagtataaacagatctgcgtttaaacgtgcaagcgctactagacaattcagtacattaaaaacgtccgcaatgtgttattaagttgtctaagcgtcaatttgtttacaccacaatatatcctgcca

SEQ ID NO: 70 - DNA, 20329 bp, Artificial sequence
  PHP96695
gtttacccgccaatatatcctgtcaaacactgcggccgcacttgaccgcggatggagccggagctgtggtgaggccatcgacgggaggtgggggagaacacagtctcagtgttctttgtgagtccgcaaggtttttagcttttctgtattaattaaggttgctgttggctgtagaatacggtcgtggaagagctgtatcggtagctactacgtaagctattatatactggaagtctggagctcgtcgatctccggtcgtcttcctccatttctcctcgtcttgctttgactgctgctaccatttgcttctgttttctgatgaagcatgccatgtcggccaccagtgtttgtgtggtttttgcagggaatggctttcaagtgctgtgattgaatggccctcgtcgtcctcggctgagctcacatggacgcgtcatgtgagtgagatatatgatcatatgatgagtggggttcgggtgagtgcgtacttgaagtaggatcccgctttcactcattcattcattggcctttaaaccgggaaattttcgcgaggagatggagggaagcaagcagggtgacgagtgcagagtgccgcgagcgctttgtcaaaaggcaccgccgtaggcaaaaaaatcaatggccctgactgactcgatggtagtactactgtagagactagagagggttgctccccatatcttcgtgtgacttttactccagcattgcatttccgtcattgagacgttaattaatagcagctttcgggacagatgactgtggccatgtttcgtcacggccgcttcgtgccagctgggggtactatagtactgtgattttgttagtaaaaactttcattaggccaccattgacgaccgggccttcgcttttgctgcgctaattaaccatttcccggcgaccgaagggaacatgaacatgccccgacacatgagggcatgaggactagtgttctccctgtcgttcgttgacttgactagtgatagtttaaacgctcttcaactggaagagcggttactaccggttcactagctagctgctaatcgagctagttaccctatgaggtgacatgaagcgctcacggttactatgacggttagcttcacgactgttggtggcagtagcgtacgacttagctatagttccggacttacctagctaataacttcgtatagcatacattatacgaagttatggttaccgagctcccctggccgaagcttacactgatagtttaaactgaaggcgggaaacgacaatctgatcatgagcggagaattaagggagtcacgttatgacccccgccgatgacgcgggacaagccgttttacgtttggaactgacagaaccgcaacgattgaaggagccactcagccgcgggtttctggagtttaatgagctaagcacatacgtcagaaaccattattgcgcgttcaaaagtcgcctaaggtcactatcagctagcaaatatttcttgtcaaaaatgctccactgacgttccataaattcccctcggtatccaattagagtctcatattcactctcccggcggatctcgactctagaggatcgctcaggaaggccgctgagatagagccatggcggccaatgcgggcggcggtggagcgggaggaggcagcggcagcggcagcgtggctgcgccggcggtgtgccgccccagcggctcgcggtggacgccgacgccggagcagatcaggatgctgaaggagctctactacggctgcggcatccggtcgcccagctcggagcagatccagcgcatcaccgccatgctgcggcagcacggcaagatcgagggcaagaacgtcttctactggttccagaaccacaaggcccgcgagcgccagaagcgccgcctcaccagcctcgacgtcaacgtgcccgccgccggcgcggccgacgccaccaccagccaactcggcgtcctctcgctgtcgtcgccgccgccttcaggcgcggcgcctccctcgcccaccctcggcttctacgccgccggcaatggcggcggatcggctgtgctgctggacacgagttccgactggggcagcagcggcgctgctatggccaccgagacatgcttcctgcaggactacatgggcgtgacggacacgggcagctcgtcgcagtggccacgcttctcgtcgtcggacacgataatggcggcggccgcggcgcgggcggcgacgacgcgggcgcccgagacgctccctctcttcccgacctgcggcgacgacggcggcagcggtagcagcagctacttgccgttctggggtgccgcgtccacaactgccggcgccacttcttccgttgcgatccaacagcaacaccagctgcaggagcagtacagcttttacagcaacagcaacagcacccagctggccggcaccggcaaccaagacgtatcggcaacagcagcagcagccgccgccctggagctgagcctcagctcatggtgctccccttaccctgctgcagggagtatgtgagagcaacgcgagctgccactgctcttcactgatgtctctggaatggaaggaggaggaagtgagaacagatcattcgacaaagcagcattagtccgttgatcggtggaagaccactcgtcagtgttgagttgaatgtttgatcaataaaatacggcaatgctgtaagggttgttttttatgccattgataatacactgtactgttcagttgttgaactctatttcttagccatgccaagtgcttttcttattttgaataacattacagcaaaaagttgaaagacaaaaaaaaaaacccccgaacagagtgctttgggtcccaagcttctttagactgtgttcggcgttccccctaaatttctccccctatatctcactcacttgtcacatcagcgttctctttccccctatatctccacgctctacagcagttccacctatatcaaacctctataccccaccacaacaatattatatactttcatcttcaactaactcatgtaccttccaatttttttctactaataattatttacgtgcacagaaacttagcaaggagagagagagcgggaatttaaatgctcggcgttaggcttttagtccgctaggtggctagaccgaggttaggacgctagttcactaggggcctagtggtgttttaagacgtcacggtcacccggtccgggcctagaaggccagcttcaagtttgtacaaaaaagcaggctccggccagaatggcccggaccgaagcttgcatgcctgcagtgcagcgtgacccggtcgtgcccctctctagagataatgagcattgcatgtctaagttataaaaaattaccacatattttttttgtcacacttgtttgaagtgcagtttatctatctttatacatatatttaaactttactctacgaataatataatctatagtactacaataatatcagtgttttagagaatcatataaatgaacagttagacatggtctaaaggacaattgagtattttgacaacaggactctacagttttatctttttagtgtgcatgtgttctcctttttttttgcaaatagcttcacctatataatacttcatccattttattagtacatccatttagggtttagggttaatggtttttatagactaatttttttagtacatctattttattctattttagcctctaaattaagaaaactaaaactctattttagtttttttatttaataatttagatataaaatagaataaaataaagtgactaaaaattaaacaaataccctttaagaaattaaaaaaactaaggaaacatttttcttgtttcgagtagataatgccagcctgttaaacgccgtcgacgagtctaacggacaccaaccagcgaaccagcagcgtcgcgtcgggccaagcgaagcagacggcacggcatctctgtcgctgcctctggacccctctcgagagttccgctccaccgttggacttgctccgctgtcggcatccagaaattgcgtggcggagcggcagacgtgagccggcacggcaggcggcctcctcctcctctcacggcaccggcagctacgggggattcctttcccaccgctccttcgcacgtaagcgcttacgcaccgaacaacgtaagcgcttacgcaccgaacaacgtaagcgcttacgctttcccttcctcgcccgccgtaataaatagacaccccctccacaccctctttccccaacctcgtgttgttcggagcgcacacacacacaaccagatctcccccaaatccacccgtcggcacctccgcttcaaggtacgccgctcgtcctcccccccccccctctctaccttctctagatcggcgttccggtccatgcatggttagggcccggtagttctacttctgttcatgtttgtgttagatccgtgtttgtgttagatccgtgctgctagcgttcgtacacggatgcgacctgtacgtcagacacgttctgattgctaacttgccagtgtttctctttggggaatcctgggatggctctagccgttccgcagacgggatcgatttcatgattttttttgtttcgttgcatagggtttggtttgcccttttcctttatttcaatatatgccgtgcacttgtttgtcgggtcatcttttcatgcttttttttgtcttggttgtgatgatgtggtctggttgggcggtcgttctagatcggagtagaattctgtttcaaactacctggtggatttattaattttggatctgtatgtgtgtgccatacatattcatagttacgaattgaagatgatggatggaaatatcgatctaggataggtatacatgttgatgcgggttttactgatgcatatacagagatgctttttgttcgcttggttgtgatgatgtggtgtggttgggcggtcgttcattcgttctagatcggagtagaatactgtttcaaactacctggtgtatttattaattttggaactgtatgtgtgtgtcatacatcttcatagttacgagtttaagatggatggaaatatcgatctaggataggtatacatgttgatgtgggttttactgatgcatatacatgatggcatatgcagcatctattcatatgctctaaccttgagtacctatctattataataaacaagtatgttttataattattttgatcttgatatacttggatgatggcatatgcagcagctatatgtggatttttttagcactgccttcatacgctatttatttgcttggtactgtttcttttgtcgatgctcaccctgttgtttggtgttacttctgcaggtcgactttaacttagcctaggatccatggccactgtgaacaactggctcgctttctccctctccccgcaggagctgccgccctcccagacgacggactccacactcatctcggccgccaccgccgaccatgtctccggcgatgtctgcttcaacatcccccaagattggagcatgaggggatcagagctttcggcgctcgtcgcggagccgaagctggaggacttcctcggcggcatctccttctccgagcagcatcacaaggccaactgcaacatgatacccagcactagcagcacagtttgctacgcgagctcaggtgctagcaccggctaccatcaccagctgtaccaccagcccaccagctcagcgctccacttcgcggactccgtaatggtggcttcctcggccggtgtccacgacggcggtgccatgctcagcgcggccgccgctaacggtgtcgctggcgctgccagtgccaacggcggcggcatcgggctgtccatgattaagaactggctgcggagccaaccggcgcccatgcagccgagggtggcggcggctgagggcgcgcaggggctctctttgtccatgaacatggcggggacgacccaaggcgctgctggcatgccacttctcgctggagagcgcgcacgggcgcccgagagtgtatcgacgtcagcacagggtggagccgtcgtcgtcacggcgccgaaggaggatagcggtggcagcggtgttgccggcgctctagtagccgtgagcacggacacgggtggcagcggcggcgcgtcggctgacaacacggcaaggaagacggtggacacgttcgggcagcgcacgtcgatttaccgtggcgtgacaaggcatagatggactgggagatatgaggcacatctttgggataacagttgcagaagggaagggcaaactcgtaagggtcgtcaagtctatttaggtggctatgataaagaggagaaagctgctagggcttatgatcttgctgctctgaagtactggggtgccacaacaacaacaaattttccagtgagtaactacgaaaaggagctcgaggacatgaagcacatgacaaggcaggagtttgtagcgtctctgagaaggaagagcagtggtttctccagaggtgcatccatttacaggggagtgactaggcatcaccaacatggaagatggcaagcacggattggacgagttgcagggaacaaggatctttacttgggcaccttcagcacccaggaggaggcagcggaggcgtacgacatcgcggcgatcaagttccgcggcctcaacgccgtcaccaacttcgacatgagccgctacgacgtgaagagcatcctggacagcagcgccctccccatcggcagcgccgccaagcgcctcaaggaggccgaggccgcagcgtccgcgcagcaccaccacgccggcgtggtgagctacgacgtcggccgcatcgcctcgcagctcggcgacggcggagccctggcggcggcgtacggcgcgcactaccacggcgccgcctggccgaccatcgcgttccagccgggcgccgccagcacaggcctgtaccacccgtacgcgcagcagccaatgcgcggcggcgggtggtgcaagcaggagcaggaccacgcggtgatcgcggccgcgcacagcctgcaggacctccaccacctgaacctgggcgcggccggcgcgcacgactttttctcggcagggcagcaggccgccgccgctgcgatgcacggcctgggtagcatcgacagtgcgtcgctcgagcacagcaccggctccaactccgtcgtctacaacggcggggtcggcgacagcaacggcgccagcgccgtcggcggcagtggcggtggctacatgatgccgatgagcgctgccggagcaaccactacatcggcaatggtgagccacgagcaggtgcatgcacgggcctacgacgaagccaagcaggctgctcagatggggtacgagagctacctggtgaacgcggagaacaatggtggcggaaggatgtctgcatgggggactgtcgtgtctgcagccgcggcggcagcagcaagcagcaacgacaacatggccgccgacgtcgggcatggcggcgcgcagctcttcagtgtctggaacgacacttaagcgtacctagtggtacctgacatcttatagtctgcaacctctcgtgtctgaattcctatctttatcaagtgttattgcttccacgactataggacagctttcgtcgaaagcttttgctcatgtgatctcgaaggattcatctagtctgatttttcgtgacttgtatcggttttattggattcatccaacatatatcaataaaaaatgagttgtgtttcctttcttcctagttcagttaaaattatttccctcctgcgcttgtgctgtaattgtctgtgtacctgttgtttgtgactgtgttagttcccttggatatgatttcgtatttgatatgtacatggagatagcttagcttcattattggagtatgaagttagtatgacatagtcactctcctggaaaattgacactgcaaaccatatttttattctgaaccacaaatcctagtcagtccgctggcatatgccgtccgtttgctgaatccagaacgtgggtttggagatgtacggctgagatgcctctatgcgaaggggatttcgtggtgaaacgagatgggagtagagcaacgcccgtggaagatgcttcaaacttccacacttttgagcaacgatcggcagtagtaaggtagacgatttcaagatcaaagcatatgaagataaacaacatcaacaacaaaatttgttggggttctatagagagaaacagagctacatacatacactgttttgtatctaccatctgagatgatgaaaagatgaaaaactaaagaatgccccggcgccaacgccaggacacgccgcgcgcgcgtcacccgagccatctcttgacccagccggcgctgtatatttacacacgttgcagcatcgatcaccacctgttcgatcgcgtcgccgtcaccggcgcgccgcgacttattgaactagtctagggcgcggctaacaacctagcttagattgccttgtctaaacccttaggctaacgcgccactctagaaggccgatctcccccgaacgcgccagatctcccgggttaccgaattcgagctcggtaccctggttcacaaactcaatacaacacacagtggagtagggtattacgctccggcggcccgaaccactctaaatccttgtgtcctcgtgtgctcttccaccattaatgactgtaattgcagggacacgaagagttgtagcgcttttgccaacaagatccgctatatgctagtagagtggaacctgcacagcaacaagcatccaataatctgagaataagaattatgtgtggtgatggttctcatctctgcaactcgccattttcgcgagagaaccaaatccaagttggtgaagatcatgatttgggctcatgggctggcatagtagctattacctttgcaattgtggttcgaatctatccgatattctccttttcagggagagctaatgcttatgcttattgggtattttggtttgacactgcttcacgcccaaaaaaaggcaactatgtctgagttggatatggcccaaaaaaaggcagctatgtctgagttggatatggaagtcttctttcgtttagggtgaagtaagaccaagctcatgagcttattatcttaggtcggaacaaattagttgataggcatggcacatttatcaaattataatgattttaacagaaaagcaacacctctttttcagcagcaccagctttgcaagctgcaattgacactccaagcatagtatttgctccaaactcagcctgcatttcgcacaatatcatatctatttccatttggataaaatatattttccagaaatatgggaacagaatcaagatacagaaaaaagttgtggtagtagtggtaagtggaaacacaagtacagtgaaaagatagcattatttctgaacagtcaaattaaccgaaataagtagtatcacatactgcccctaaattgactacacccaatgtaaagaattgcttgagcatattgagccatcagttgtttgtttgtgtaacggatttgacaatgcagagttcaggagcaaaaaaccgcaaaggagagaaagagggaaaggatctcctagtatcccaccttgtggcgcgccctgtcaagtgcatgatggcctggtcgatctgcgtctgctgctgcggttccatcccaacgagtgcctccgacaccttgtcgttgatcacccgcaccgcgtaggcgacccccctggcgaggaacttccgcctctcggaggccccggccgcgtcggcggcggcgccctcgagcgcgcccacgctagccgtagatgctcggtgcacggccttgttggtgtgcaactcgacctcaacggccggtgcgctacgcccgtcaaggatctggcgcgcccgcaccctcgtgatcacggtgggcgcctcccgcctcatgtggccgacgatgaaaagcgccgggttaggggccttggcgcgcaccgccgtattcagggcctcctcgctcttgcgcgagagcaggtgcttccccaggtactcctgcactgacaaggctgccacagcggtggaatttgtcctcacgacttcgccacgtcgtcctcacctccctggcttcccacgactccgccgtatcgaggtgctcggtgggtcgtcttaatccgaagtccgaactaggaagacgagacagagaggtctgaggaatgggcctcgtttgatgttgagctgaattatttttccagcataagcccaggtcttggtccatgaacaaaattactagaaacccagcccagtactacgatctaaaagagggactgccactggatagctctctctagcattctccacgctccaatacagcggcgtcgtgtctatccgggtctatccgcgaacacgtgagaactctccagaaactgctttctcctccacttcatctctctcgctttccctctataaaaagaccccttctaggaattgagggagacagcaagcaccaagcagcgatccgaagctcaatcaattcactcaaacctcttccccaaatcttcgattagatcttcgttgacaagaagactagaaccgaacctgacatgtccaacctgctcacggttcaccagaaccttccggctcttccagtggacgcgacgtccgatgaagtcaggaagaacctcatggacatgttccgcgacaggcaagcgttcagcgagcacacctggaagatgctgctctccgtctgccgctcctgggctgcatggtgcaagctgaacaacaggaagtggttccccgctgagcccgaggacgtgagggattaccttctgtacctgcaagcgcgaggtttgtttctgcttctacctttgatatatatataataattatcattaattagtagtaatataatatttcaaatatttttttcaaaataaaagaatgtagtatatagcaattgcttttctgtagtttataagtgtgtatattttaatttataacttttctaatatatgaccaaaacatggtgatgcctaggtctggcagtgaagaccatccagcaacaccttggacaactgaacatgcttcacaggcgctccggcctcccgcgccccagcgactcgaacgccgtgagcctcgtcatgcgccgcatcaggaaggaaaacgtcgatgccggcgaaagggcaaagcaggccctcgcgttcgagaggaccgatttcgaccaggtccgcagcctgatggagaacagcgacaggtgccaggacattaggaacctggcgttcctcggaattgcatacaacacgctcctcaggatcgcggaaattgcccgcattcgcgtgaaggacattagccgcaccgacggcggcaggatgcttatccacattggcaggaccaagacgctcgtttccaccgcaggcgtcgaaaaggccctcagcctcggagtgaccaagctcgtcgaacgctggatctccgtgtccggcgtcgcggacgacccaaacaactacctcttctgccgcgtccgcaagaacggggtggctgcccctagcgccaccagccaactcagcacgagggccttggaaggtattttcgaggccacccaccgcctgatctacggcgcgaaggatgacagcggtcaacgctacctcgcatggtccgggcactccgcccgcgttggagctgctagggacatggcccgcgccggtgtttccatccccgaaatcatgcaggcgggtggatggacgaacgtgaacattgtcatgaactacattcgcaaccttgacagcgagacgggcgcaatggttcgcctcctggaagatggtgactgaggtacccaacctagacttgtccatcttctggattggccaacttaattaatgtatgaaataaaaggatgcacacatagtgacatgctaatcactataatgtgggcatcaaagttgtgtgttatgtgtaattactagttatctgaataaaagagaaagagatcatccatatttcttatcctaaatgaatgtcacgtgtctttataattctttgatgaaccagatgcatttcattaaccaaatccatatacatataaatattaatcatatataattaatatcaattgggttagcaaaacaaatctagtctaggtgtgttttgcgatccgatatcgatgacgtctaaaaacggcccctaactaacgcttagttgcccgctagattagtcccccgttagtgcctagttagacacacgacgaactaggggctagccgtgcgcacgataacttcgtatagcatacattatacgaagttataacagcggaccgggttaccgaattcctgcccttaaggccaattgttcaagattcattcaacaattgaaacatctcccatgattaaatcagtataaggttgctatggtcttgcttgacaaagtttttttttgagggaatttcaactaaatttttgagtgaaactatcaaatactgattttaaaaaatttttataaaaggaagcgcagagataaaaggccatctatgctacaaaagtacccaaaaatgtaatcctaaagtatgaattgcattttttttttgtttggacgaaaggaaaggagtattaccacaagaatgatatcatcttcatatttagatcttttttgggtaaagcttgagattctctaaatatagagaaatcagaagaaaaaaaaaccgtgttttggtggttttgatttctagcctccacaataactttgacggcgtcgacaagtctaacggacaccaagcagcgaaccaccagcgccgagccaagcgaagcagacggccgagacgttgacaccttcggcgcggcatctctcgagagttccgctccggcgctccacctccaccgctggcggtttcttattccgttccgttccgcctcctgctctgctcctctccacaccacacggcacgaaaccgttacggcaccggcagcacccagcacgggagaggggattcctttcccaccgttccttccctttccgccccgccgctataaatagccagccccatccccagcttttttccccaatctcatctcctctctcctgttgttcggagcacacgcacaatccgatcgatccccaaatccccttcgtctctcctcgcgagcctcgtggatcccagcttcaaggtacggcgatcgatcatcccccctccttctctctaccttcttttctctagactacatcggatggcgatccatggttagggcctgctagtttcccttcctgttttgtcgatggctgcgaggcacaatagatctgatggcgttatgacggctaacttgtcatgttgttgcgatttatagtccctttaggagatcagtttaatttctcggatggttcgagatcggtggtccatggttagtaccctaagatccgcgctgttagggttcgtagatggaggcgacctgttctgattgttaacttgtcagtacctgggaaatcctgggatggttctagctcgtccgcagatgagatcgatttcatgatcctctgtatcttgtttcgttgcctaggttccgtctaatctatccgtggtatgatgtagatgttttgatcgtgctaactacgtcttgtaaagttaattgtcaggtcataatttttagcatgcctttttttttgtttggttttgtctaattgggctgtcgttctagatcagagtagaagactgttccaaactacctgctggatttattgaacttggatctgtatgtgtgtcacatatcttcataaattcatgattaagatggattgaaatatcttttatctttttggtatggatagttctatatgttggtgtggctttgttagatgtatacatgcttagatacatgaagcaacgtgctgctactgtttagtaattgctgttcatttgtctaataaacagataaggatatgtatttatgttgctgttggttttgctggtactttgttggatacaaatgcttcaatacagaaaacagcatgctgctacgatttaccatttatctaatcttatcatatgtctaatctaataaacaaacatgcttttaaattatcttcatatgcttggatgatggcatacacagcggctatgtgtggttttttaaatacccagcatcatgggcatgcatgacactgctttaatatgctttttatttgcttgagactgtttcttttgtttatactgaccctttagttcggtgactcttctgcaggtcgactttaacttagcctaggatccatggcccagtccaagcacggcctgaccaaggagatgaccatgaagtaccgcatggagggctgcgtggacggccacaagttcgtgatcaccggcgagggcatcggctaccccttcaagggcaagcaggccatcaacctgtgcgtggtggagggcggccccttgcccttcgccgaggacatcttgtccgccgccttcatgtacggcaaccgcgtgttcaccgagtacccccaggacatcgtcgactacttcaagaactcctgccccgccggctacacctgggaccgctccttcctgttcgaggacggcgccgtgtgcatctgcaacgccgacatcaccgtgagcgtggaggagaactgcatgtaccacgagtccaagttctacggcgtgaacttccccgccgacggccccgtgatgaagaagatgaccgacaactgggagccctcctgcgagaagatcatccccgtgcccaagcagggcatcttgaagggcgacgtgagcatgtacctgctgctgaaggacggtggccgcttgcgctgccagttcgacaccgtgtacaaggccaagtccgtgccccgcaagatgcccgactggcacttcatccagcacaagctgacccgcgaggaccgcagcgacgccaagaaccagaagtggcacctgaccgagcacgccatcgcctccggctccgccttgccctccggactcagatctcgatagggtaccaatggccagttaacagatccagctgctgctgttctagggttcacaagtctgcctatttgtcttccccaatggagctatggttgtctggtctggtccttggtcgtgtcccgtttcattgtgtactatttacctgtaatgtgtatccttaagtctggtttgatggtgtctgaaacgttttgctgtggtagagcagcatggaagaactataatgaataagtgatccctaatcattgtgtccaaattttgcttctgctatacccttttgtgctgtttcttatgttttgcttaaaaatttgatctgacaaacaaatttgtctaaattatgctcttgttctgactgtgtactgtacacatttgtattgctaccggtttggcacatagttttctctttgattgcagatcaaacccttctgattgcagattgcttggctatggctgatgtgctcactgttcttctttagcttgtatattgctgatggtggcttggctacggctgaaaaagttgctgctgcgccgacttggcaactgttgctccagtaatgctttgtcctctcttcctagccgccgacttggcacttggcagctgttgctcctgtaatgcgttgttatctcttatctcttgagatgtactatgattttgaggctgtttgacttgtgccagattgccagtgctgatgctatattatctcaggtttttatgctagtatatgttttactgtgtgctgcctgtgtcgagttacgtaatctattgaaccgctatgcgtgttgatgccctgttgttgcttgccagattgatgcccctgttgcttgcagcttgcaagctgtagtgaaatcctaaaattcgaaaccaaatctattctgaacttttgaagatctgtgatgtccggaagaaaagattcaaacagataaacgggactctccagaatctataaaataaatgatcgacaaacgctttgctttggtaggcttcctagttagttagcggaccgaagcttcggtccgggcctagaaggccagcttcggccgcccctcggtaccctgggatctgcccttactttaacgcctctaaccaacacccctttatctttataaggaacaataaacagaatttgccccactgttctaaatcacctaataatatccccagctaaaaacaataaaggtttcctagaattaagacaagcatgactgttcctccaggagggtttggaacattgttgcagtcttgcagatacgggcgaagggtgagaaacagagcggagggctggaggtgacctcggtagtcgacgccggagttgagcttgacaacgacggggcggcccctgatggacttgaggaagtccgatggcgtcttcaccgtcccgccggcgcccgaggcgggcctgtcgctgccgccgccgccgctgctcatcttgcgcgctgtgcccccggcggtgtccctgtgttgcggatcgcgggtgggccaggtggatgcgagggcgacccgtttggactccggccggagccgccggatccctggtcggtgtcagtgccgtttactctgggccccacgtgtcagtaccgtctgtagatgacaacaacccgtcgtccacagtcatgtccaaaatatcctttcttcttttttttcgattcggatatctatcttccttttttttttccaaaaatcttcttgacgcaccagcgcgcacgtttgtggtaaacgccgacacgtcggtcccacgtcgatagaccccacccaccagtgagtagcgtgtacgtattcgggggtgacggacgtgtcgccgtcgtcttgctagtcccattcccatctgagccacacatctctgaacaaaaaaaaggagggaggcctccacgcacatccccctccgtgccacccgccccaaaccctcgcgccgcctccgagacagccgccgcaaccatggccaccgccgccgccgcgtctaccgcgctcactggcgccactaccgctgcgcccaaggcgaggcgccgggcgcacctcctggccacccgccgcgccctcgccgcgcccatcaggtgctcagcggcgtcacccgccatgccgatggctcccccggccaccccgctccggccgtggggccccaccgagccccgcaagggtgctgacatcctcgtcgagtccctcgagcgctgcggcgtccgcgacgtcttcgcctaccccggcggcgcgtccatggagatccaccaggcactcacccgctcccccgtcatcgccaaccacctcttccgccacgagcaaggggaggcctttgccgcctccggctacgcgcgctcctcgggccgcgtcggcgtctgcatcgccacctccggccccggcgccaccaacctagtctccgcgctcgccgacgcgctgctcgattccgtccccatggtcgccatcacgggacaggtggcgcgacgcatgattggcaccgacgccttccaggagacgcccatcgtcgaggtcacccgctccatcaccaagcacaactacctggtcctcgacgtcgacgacatcccccgcgtcgtgcaggaggctttcttcctcgcctcctctggtcgaccagggccggtgcttgtcgacatccccaaggacatccagcagcagatggcggtgcctgtctgggacaagcccatgagtctgcctgggtacattgcgcgccttcccaagccccctgcgactgagttgcttgagcaggtgctgcgtcttgttggtgaatcgcggcgccctgttctttatgtgggcggtggctgcgcagcatctggtgaggagttgcgacgctttgtggagctgactggaatcccggtcacaactactcttatgggcctcggcaacttccccagcgacgacccactgtctctgcgcatgctaggtatgcatgggacggtgtatgcaaattatgcagtggataaggccgatctgttgcttgcacttggtgtgcggtttgatgatcgcgtgacagggaagattgaggcttttgcaagcagggctaagattgtgcacgttgatattgatccggctgagattggcaagaacaagcagccacatgtgtccatctgtgcagatgttaagcttgctttgcagggcatgaatgctcttcttgaaggaagcacatcaaagaagagctttgactttggctcatggaacgatgagttggatcagcagaagagggaattcccccttgggtataaaacatctaatgaggagatccagccacaatatgctattcaggttcttgatgagctgacgaaaggcgaggccatcatcggcacaggtgttgggcagcaccagatgtgggcggcacagtactacacttacaagcggccaaggcagtggttgtcttcagctggtcttggggctatgggatttggtttgccggctgctgctggtgcttctgtggcaaacccaggtgtcactgttgttgacatcgatggagatggtagctttctcatgaacgttcaggagctagctatgatccgaattgagaacctcccagtgaaggtctttgtgctaaacaaccagcacctggggatggtggtgcagttggaggacaggttctataaggccaacagagcgcacacatacttgggaaacccagagaatgaaagtgagatatatccagatttcgtgacgatcgccaaagggttcaacattccagccgtccgtgtgacaaagaagaacgaagtccgcgcagcgataaagaagatgctcgagactccagggccgtacctcttggatataatcgtcccacaccaggagcatgtgttgcctatgatccctagtggtggggctttcaaggatatgatcctggatggtgatggcaggactgtgtactgacttcgaataggtacccggggatcctctagtgccgtgggtcgtttaagctgccgctgtacctgtgtcgtctggtgccttctggtgtacctgggaggttgtcgtctatcaagtatctgtggttggtgtcatgagtcagtgagtcccaatactgttcgtgtcctgtgtgcattatacccaaaactgttatgggcaaatcatgaataagcttgatgttcgaacttaaaagtctctgctcaatatggtattatggttgtttttgttcgtctcctaatatttgcctgggatcaaattttattggctggtgttcatttgacctccatgttcttgctaggctccattttttactctacagccataatatgtttgattgtttggtttgttctttgttgtacacctggttctgtcgagcttagttttcgacactggcttacagcttaacatgttgctattttattgggttctgattgctattttattgggttctgattgctagtttttgctgaatccaaaaaccatgttatttatttaagcgatccaggttattattatgatggtggctaagtttttttttttccaagggtaaattttctggattctccagtgtttctgtggccgaattcaatcactagagtcgacctgcaaagcttcggtccgggcctagaaggcccgcgccacttacgcttgattccgatgacttcgtaggttcctagctcaagccgctcgtgtccaagcgtcacttacgattagctaatgattacggcatctaggaccgactagttcttatgtgcttctagtctccaaatgtggttgatagttattttgctctaagatcaacagtaatgaagtataaatcatcgttgtggtgtgctactcggttaattgagcattaacacacacaaacatgacgaggatggtataatctccaaaaatgtgtactttgttaggtgggaccctatagccttgattaatgtgctatgttaggcatgcctggaaacgtgtgacgcatatgttttgtgaacctgttgatattatatgtgcttttatattaccatattttattaaaatactaatatttattactagtaagatataacattctatctagcttaaaaactaaccataaatattccataataactagatttaccaaactaatatactaaatatacataataaatacaaaattaacaagacaataatcaatatttatgagcttaatatatttagacattatggttggtcgacgataatcatgctaacttttcgtaattgcttgattgaaatatgcttagaataatgcctctttgttctacatggcaaatagggaccattatggtgtaacaccctgggaaccacaaacaccccgaaatgctactaaactacacaactaaccttcatatataaaatttcgacagcatctcctttgaaaatttgcatagacgtggaagcaacagagtataaacagatctgcgtttaaacgtgcaagcgctactagacaattcagtacattaaaaacgtccgcaatgtgttattaagttgtctaagcgtcaatttgtttacaccacaatatatcctgcca

SEQ ID NO: 71 - DNA, 25839 bp, Artificial sequence
  PHP96716
gtttacccgccaatatatcctgtcaaacactgatagtttaaactgaaggcgggaaacgacaatctgatcatgagcggagaattaagggagtcacgttatgacccccgccgatgacgcgggacaagccgttttacgtttggaactgacagaaccgcaacgttgaaggagccactcagcaagctggtacgattgtaatacgactcactatagggcgaattgagcgctgtttaaacgctcttcaactggaagagcggttacgctgtttaaacgctcttcaactggaagagcggttactaccggttcactagctagctgctaatcgagctagttaccctatgaggtgacatgaagcgctcacggttactatgacggttagcttcacgactgttggtggcagtagcgtacgacttagctatagttccggacttacccttaagcgatttaaatctgcggttaccgaattcgagctcggtacctagtacccttgtacttttggtttcacctgcatagagaaaacccacaagaatatgacagtctgatttgtcagtctcattctcaagcaacatttctctatccgttactttcatggtgaataacacaatccatcatcaatactttgtgttactcagaaactgaaagttattccgagtcttgcatatctttggacctactcgtttttctaccattattgctgattgttaagctctcgctacttgaatcggcattgttggagtgggaaggttcaaaaaattggagttatgactagttgtctctttctatgtacgatggagaaaatgaataaacaactgagaaaatggctcttgtttagttgatgatgctcttaagctttccactggttgccatatatgatttgggcatttcactttgatcttaatgggccttgtaaagcccaagactcatgattatctttagttgatgctcttaattaggtgtgggcaaataattcaaactgtatgtacccgaccaaaaccaaagcaaaaataatcgaaccaaaccgaaaatttaaaaataaccgaatgaaaactaaatcctataactgaaagaactgaaaccgaatcaaaatatttaatgtaaccaaaaatatccgaaatataattatattgtcaaaaatattaataatttctagattaaataattaaaaatacttaaaaatttatataaaatagtaaaaatactcgaaaataaccacaaatattcaaaaacaaccgaaatatcccaaaatattcaaagcaaaataaccgaatggataccaaattttaaaaccgaaaaaactggaacaaaaccaaaatcgaaccaaaatttcaaaaatcgaataaatactaaactttagaacaaaaaaaaacgataaccgaatgtatacgaaccaaagccgaattagataaccgaacgtccaggactactcttaatctttccgccacttatgatttgggctattactttgtttataatgagccttttcaagctcaagttcatgattgtccgtgagatgagaaactgacttgttggattcgaaaccctagctagtattggttaatacttaatacataaatgacctgcattgacatcatcatccaagaaaataaaaattgtatgcttgagatatttagttttcctagctaggttttctttattttagtaccgaatctttaggtgtgccacgttaatttagacccattttttcatacttaccaactgagtctagtttaatcatgactataatcgtataaaatgattcagtcgacgtcattgcgaacgtatataaaatcatccaaattgacgtcattccaaagaggtaagcatgcttatctaagagtccgagcatactaaacaagacgacattttatttgcactccaaatcaaattttgtattgcctaaagaaaaacaatcaaactcaagtttcttaaaattaatttcattcaaactaatcactttcaatatctcacatattattcatgccatttctatttgtctaaacatgatttaaaaaaaaaagtaaaatacaaagattactatgcaaaaactctataaaaaaaaattcaaatttcttatttatttgtgacatcaaattttcaaaataatttttttaattatcggttgatccggtcagtcgataaaaacataaactttcagcgaccgttaaaactttcctactaccgatttagagaaaatcttagcttgaaacgtaattgtaacctgccttcatgcaagtcgcaagatatgtcatcctaagttgtatatgttttctcaaaagatgtatttacttgagaaaatacgtttcaacgttgatggacaaccaattaagaatcaagcacctttcgtaatcaatttaggcttatcgtctaaggtatactgatttacgacagttgactagacttataaggaacaaaataatagaatagtttctaaacacttcacctaatcatagagactaagatggtaattcgtaaacgacaaagcctagtgacactgtccattgtaaaattccacatcatattagtattaaacatatacatgtagtttcctgaacacatgtagtatcaaacacacttcgtggcttcttcctcgaaacctgcggccgcgctatagttccggacttacccttaagataacttcgtatagcatacattatacgaagttatgggcccacgcgtgaagagcggttaccagagctggtcacctttgtccaccaagatggaactgtcttcggccagaatggccatctggattcagcaggcctagaaggccatttatcgctatcaactttgtatagaaaagttgggccgagctcggtacggccagaatggcccggaccgggttaccaagcggccgcacactgatagtttaaactgaaggcgggaaacgacaatctgatcatgagcggagaattaagggagtcacgttatgacccccgccgatgacgcgggacaagccgttttacgtttggaactgacagaaccgcaacgattgaaggagccactcagccgcgggtttctggagtttaatgagctaagcacatacgtcagaaaccattattgcgcgttcaaaagtcgcctaaggtcactatcagctagcaaatatttcttgtcaaaaatgctccactgacgttccataaattcccctcggtatccaattagagtctcatattcactcccatggcggccaatgcgggcggcggtggagcgggaggaggcagcggcagcggcagcgtggctgcgccggcggtgtgccgccccagcggctcgcggtggacgccgacgccggagcagatcaggatgctgaaggagctctactacggctgcggcatccggtcgcccagctcggagcagatccagcgcatcaccgccatgctgcggcagcacggcaagatcgagggcaagaacgtcttctactggttccagaaccacaaggcccgcgagcgccagaagcgccgcctcaccagcctcgacgtcaacgtgcccgccgccggcgcggccgacgccaccaccagccaactcggcgtcctctcgctgtcgtcgccgccgccttcaggcgcggcgcctccctcgcccaccctcggcttctacgccgccggcaatggcggcggatcggctgtgctgctggacacgagttccgactggggcagcagcggcgctgctatggccaccgagacatgcttcctgcaggactacatgggcgtgacggacacgggcagctcgtcgcagtggccacgcttctcgtcgtcggacacgataatggcggcggccgcggcgcgggcggcgacgacgcgggcgcccgagacgctccctctcttcccgacctgcggcgacgacggcggcagcggtagcagcagctacttgccgttctggggtgccgcgtccacaactgccggcgccacttcttccgttgcgatccaacagcaacaccagctgcaggagcagtacagcttttacagcaacagcaacagcacccagctggccggcaccggcaaccaagacgtatcggcaacagcagcagcagccgccgccctggagctgagcctcagctcatggtgctccccttaccctgctgcagggagtatgtgagagcaacgcgagctgccactgctcttcactgatgtctctggaatggaaggaggaggaagtgagaacagatcattcgacaaagcagcattagtccgttgatcggtggaagaccactcgtcagtgttgagttgaatgtttgatcaataaaatacggcaatgctgtaagggttgttttttatgccattgataatacactgtactgttcagttgttgaactctatttcttagccatgccaagtgcttttcttattttgaataacattacagcaaaaagttgaaagacaaaaaaaaaaacccccgaacagagtgctttgggtcccaagcttctttagactgtgttcggcgttccccctaaatttctccccctatatctcactcacttgtcacatcagcgttctctttccccctatatctccacgctctacagcagttccacctatatcaaacctctataccccaccacaacaatattatatactttcatcttcaactaactcatgtaccttccaatttttttctactaataattatttacgtgcacagaaacttagcaaggagagagagagcgggaatttaaatgctcggcgttaggcttttagtccgctaggtggctagaccgaggttaggacgctagttcactaggggcctagtggtgttttaagacgtcacggtcaccacgcgtggaccgaagcttgcatgcctgcagtgcagcgtgacccggtcgtgcccctctctagagataatgagcattgcatgtctaagttataaaaaattaccacatattttttttgtcacacttgtttgaagtgcagtttatctatctttatacatatatttaaactttactctacgaataatataatctatagtactacaataatatcagtgttttagagaatcatataaatgaacagttagacatggtctaaaggacaattgagtattttgacaacaggactctacagttttatctttttagtgtgcatgtgttctcctttttttttgcaaatagcttcacctatataatacttcatccattttattagtacatccatttagggtttagggttaatggtttttatagactaatttttttagtacatctattttattctattttagcctctaaattaagaaaactaaaactctattttagtttttttatttaataatttagatataaaatagaataaaataaagtgactaaaaattaaacaaataccctttaagaaattaaaaaaactaaggaaacatttttcttgtttcgagtagataatgccagcctgttaaacgccgtcgacgagtctaacggacaccaaccagcgaaccagcagcgtcgcgtcgggccaagcgaagcagacggcacggcatctctgtcgctgcctctggacccctctcgagagttccgctccaccgttggacttgctccgctgtcggcatccagaaattgcgtggcggagcggcagacgtgagccggcacggcaggcggcctcctcctcctctcacggcaccggcagctacgggggattcctttcccaccgctccttcgctttcccttcctcgcccgccgtaataaatagacaccccctccacaccctctttccccaacctcgtgttgttcggagcgcacacacacacaaccagatctcccccaaatccacccgtcggcacctccgcttcaaggtacgccgctcgtcctcccccccccccctctctaccttctctagatcggcgttccggtccatgcatggttagggcccggtagttctacttctgttcatgtttgtgttagatccgtgtttgtgttagatccgtgctgctagcgttcgtacacggatgcgacctgtacgtcagacacgttctgattgctaacttgccagtgtttctctttggggaatcctgggatggctctagccgttccgcagacgggatcgatttcatgattttttttgtttcgttgcatagggtttggtttgcccttttcctttatttcaatatatgccgtgcacttgtttgtcgggtcatcttttcatgcttttttttgtcttggttgtgatgatgtggtctggttgggcggtcgttctagatcggagtagaattctgtttcaaactacctggtggatttattaattttggatctgtatgtgtgtgccatacatattcatagttacgaattgaagatgatggatggaaatatcgatctaggataggtatacatgttgatgcgggttttactgatgcatatacagagatgctttttgttcgcttggttgtgatgatgtggtgtggttgggcggtcgttcattcgttctagatcggagtagaatactgtttcaaactacctggtgtatttattaattttggaactgtatgtgtgtgtcatacatcttcatagttacgagtttaagatggatggaaatatcgatctaggataggtatacatgttgatgtgggttttactgatgcatatacatgatggcatatgcagcatctattcatatgctctaaccttgagtacctatctattataataaacaagtatgttttataattattttgatcttgatatacttggatgatggcatatgcagcagctatatgtggatttttttagcactgccttcatacgctatttatttgcttggtactgtttcttttgtcgatgctcaccctgttgtttggtgttacttctgcaggtcgactttaacttagcctaggatccatggccactgtgaacaactggctcgctttctccctctccccgcaggagctgccgccctcccagacgacggactccacactcatctcggccgccaccgccgaccatgtctccggcgatgtctgcttcaacatcccccaagattggagcatgaggggatcagagctttcggcgctcgtcgcggagccgaagctggaggacttcctcggcggcatctccttctccgagcagcatcacaaggccaactgcaacatgatacccagcactagcagcacagtttgctacgcgagctcaggtgctagcaccggctaccatcaccagctgtaccaccagcccaccagctcagcgctccacttcgcggactccgtaatggtggcttcctcggccggtgtccacgacggcggtgccatgctcagcgcggccgccgctaacggtgtcgctggcgctgccagtgccaacggcggcggcatcgggctgtccatgattaagaactggctgcggagccaaccggcgcccatgcagccgagggtggcggcggctgagggcgcgcaggggctctctttgtccatgaacatggcggggacgacccaaggcgctgctggcatgccacttctcgctggagagcgcgcacgggcgcccgagagtgtatcgacgtcagcacagggtggagccgtcgtcgtcacggcgccgaaggaggatagcggtggcagcggtgttgccggcgctctagtagccgtgagcacggacacgggtggcagcggcggcgcgtcggctgacaacacggcaaggaagacggtggacacgttcgggcagcgcacgtcgatttaccgtggcgtgacaaggcatagatggactgggagatatgaggcacatctttgggataacagttgcagaagggaagggcaaactcgtaagggtcgtcaagtctatttaggtggctatgataaagaggagaaagctgctagggcttatgatcttgctgctctgaagtactggggtgccacaacaacaacaaattttccagtgagtaactacgaaaaggagctcgaggacatgaagcacatgacaaggcaggagtttgtagcgtctctgagaaggaagagcagtggtttctccagaggtgcatccatttacaggggagtgactaggcatcaccaacatggaagatggcaagcacggattggacgagttgcagggaacaaggatctttacttgggcaccttcagcacccaggaggaggcagcggaggcgtacgacatcgcggcgatcaagttccgcggcctcaacgccgtcaccaacttcgacatgagccgctacgacgtgaagagcatcctggacagcagcgccctccccatcggcagcgccgccaagcgcctcaaggaggccgaggccgcagcgtccgcgcagcaccaccacgccggcgtggtgagctacgacgtcggccgcatcgcctcgcagctcggcgacggcggagccctggcggcggcgtacggcgcgcactaccacggcgccgcctggccgaccatcgcgttccagccgggcgccgccagcacaggcctgtaccacccgtacgcgcagcagccaatgcgcggcggcgggtggtgcaagcaggagcaggaccacgcggtgatcgcggccgcgcacagcctgcaggacctccaccacctgaacctgggcgcggccggcgcgcacgactttttctcggcagggcagcaggccgccgccgctgcgatgcacggcctgggtagcatcgacagtgcgtcgctcgagcacagcaccggctccaactccgtcgtctacaacggcggggtcggcgacagcaacggcgccagcgccgtcggcggcagtggcggtggctacatgatgccgatgagcgctgccggagcaaccactacatcggcaatggtgagccacgagcaggtgcatgcacgggcctacgacgaagccaagcaggctgctcagatggggtacgagagctacctggtgaacgcggagaacaatggtggcggaaggatgtctgcatgggggactgtcgtgtctgcagccgcggcggcagcagcaagcagcaacgacaacatggccgccgacgtcgggcatggcggcgcgcagctcttcagtgtctggaacgacacttaagcgtacctagtggtacctgacatcttatagtctgcaacctctcgtgtctgaattcctatctttatcaagtgttattgcttccacgactataggacagctttcgtcgaaagcttttgctcatgtgatctcgaaggattcatctagtctgatttttcgtgacttgtatcggttttattggattcatccaacatatatcaataaaaaatgagttgtgtttcctttcttcctagttcagttaaaattatttccctcctgcgcttgtgctgtaattgtctgtgtacctgttgtttgtgactgtgttagttcccttggatatgatttcgtatttgatatgtacatggagatagcttagcttcattattggagtatgaagttagtatgacatagtcactctcctggaaaattgacactgcaaaccatatttttattctgaaccacaaatcctagtcagtccgctggcatatgccgtccgtttgctgaatccagaacgtgggtttggagatgtacggctgagatgcctctatgcgaaggggatttcgtggtgaaacgagatgggagtagagcaacgcccgtggaagatgcttcaaacttccacacttttgagcaacgatcggcagtagtaaggtagacgatttcaagatcaaagcatatgaagataaacaacatcaacaacaaaatttgttggggttctatagagagaaacagagctacatacatacactgttttgtatctaccatctgagatgatgaaaagatgaaaaactaaagaatgccccggcgccaacgccaggacacgccgcgcgcgcgtcacccgagccatctcttgacccagccggcgctgtatatttacacacgttgcagcatcgatcaccacctgttcgatcgcgtcgccgtcaccggcgcgccgcgacttattgaactagtctagggcgcggctaacaacctagcttagattgccttgtctaaacccttaggctaacgcgccacggtaacccggtccgggcctagaaggccccagagctggtcaccccatacgattggaagcttcaagtttgtacaaaaaagcaggctccggccagaatggcccggaccgggttaccgaattcgagctcggtaccctgggatccgatatcgatgggccctggccgaagcttgcatgcctgcagtgcagcgtgacccggtcgtgcccctctctagagataatgagcattgcatgtctaagttataaaaaattaccacatattttttttgtcacacttgtttgaagtgcagtttatctatctttatacatatatttaaactttactctacgaataatataatctatagtactacaataatatcagtgttttagagaatcatataaatgaacagttagacatggtctaaaggacaattgagtattttgacaacaggactctacagttttatctttttagtgtgcatgtgttctcctttttttttgcaaatagcttcacctatataatacttcatccattttattagtacatccatttagggtttagggttaatggtttttatagactaatttttttagtacatctattttattctattttagcctctaaattaagaaaactaaaactctattttagtttttttatttaataatttagatataaaatagaataaaataaagtgactaaaaattaaacaaataccctttaagaaattaaaaaaactaaggaaacatttttcttgtttcgagtagataatgccagcctgttaaacgccgtcgacgagtctaacggacaccaaccagcgaaccagcagcgtcgcgtcgggccaagcgaagcagacggcacggcatctctgtcgctgcctctggacccctctcgagagttccgctccaccgttggacttgctccgctgtcggcatccagaaattgcgtggcggagcggcagacgtgagccggcacggcaggcggcctcctcctcctctcacggcaccggcagctacgggggattcctttcccaccgctccttcgctttcccttcctcgcccgccgtaataaatagacaccccctccacaccctctttccccaacctcgtgttgttcggagcgcacacacacacaaccagatctcccccaaatccacccgtcggcacctccgcttcaaggtacgccgctcgtcctccccccccccccctctctaccttctctagatcggcgttccggtccatggttagggcccggtagttctacttctgttcatgtttgtgttagatccgtgtttgtgttagatccgtgctgctagcgttcgtacacggatgcgacctgtacgtcagacacgttctgattgctaacttgccagtgtttctctttggggaatcctgggatggctctagccgttccgcagacgggatcgatttcatgattttttttgtttcgttgcatagggtttggtttgcccttttcctttatttcaatatatgccgtgcacttgtttgtcgggtcatcttttcatgcttttttttgtcttggttgtgatgatgtggtctggttgggcggtcgttctagatcggagtagaattctgtttcaaactacctggtggatttattaattttggatctgtatgtgtgtgccatacatattcatagttacgaattgaagatgatggatggaaatatcgatctaggataggtatacatgttgatgcgggttttactgatgcatatacagagatgctttttgttcgcttggttgtgatgatgtggtgtggttgggcggtcgttcattcgttctagatcggagtagaatactgtttcaaactacctggtgtatttattaattttggaactgtatgtgtgtgtcatacatcttcatagttacgagtttaagatggatggaaatatcgatctaggataggtatacatgttgatgtgggttttactgatgcatatacatgatggcatatgcagcatctattcatatgctctaaccttgagtacctatctattataataaacaagtatgttttataattattttgatcttgatatacttggatgatggcatatgcagcagctatatgtggatttttttagccctgccttcatacgctatttatttgcttggtactgtttcttttgtcgatgctcaccctgttgtttggtgttacttctgcaggtcgactctagaggatccatggaggagatcacccaacactttggagttggcgcaagcagccacggccatggccacggccagcaccaccatcatcaccaccaccaccacccgtgggcatcctccctcagcgccgtcgtagcgccgctgccgccgcaaccgccaagcgcaggcctgccgctgaccctgaacacggtggcggccactgggaacagcggcggtagcggcaacccggtgctgcagcttgccaacggtggcggcctcctcgacgcatgcgtcaaggcgaaggagccctcgtcgtcgtctccctacgcaggcgacgtcgaggccatcaaggccaagatcatctcgcacccacactactactcgctcctcactgcctacctcgagtgcaacaaggtgggggcaccaccggaggtgtcggcgaggctgacggagatagcgcaggaggtggaggcgcggcagcgcacggcgctcggcggcctggccgctgcgacggagccggagctggaccagttcatggaggcgtaccacgagatgctggtgaagttcagggaggagctgacgaggccgctgcaggaggcgatggagttcatgcgaagggtggagtcgcagctgaactcgctttccatctccggaaggtcgctgcgcaacatcctttcatctggctcttctgaggaggatcaagaaggtagcggaggagagaccgagctccctgaagttgatgcacatggtgtggaccaagagctgaagcaccatctcctgaagaaatacagtggctatctaagctcgctcaagcaagaactgtcaaagaagaagaagaaagggaagctccccaaggaggctcgccagcagctccttagctggtgggatcagcactacaaatggccttacccctcagagactcagaaggtggcactggctgagtctaccgggcttgacctgaagcagatcaacaactggttcatcaaccagcggaagcggcactggaagccatccgaggagatgcaccacctgatgatggacgggtaccacaccaccaatgccttctacatggacggccacttcatcaacgacggcgggctgtaccggctcggctagccaccggtatctcgcttccattgttaacctagacttgtccatcttctggattggccaacttaattaatgtatgaaataaaaggatgcacacatagtgacatgctaatcactataatgtgggcatcaaagttgtgtgttatgtgtaattactagttatctgaataaaagagaaagagatcatccatatttcttatcctaaatgaatgtcacgtgtctttataattctttgatgaaccagatgcatttcattaaccaaatccatatacatataaatattaatcatatataattaatatcaattgggttagcaaaacaaatctagtctaggtgtgttttgcgaattgcaatgatcatcatgacagatctgcgcgcgatcgatgggcacccagctttcttgtacaaagtggccgttaacggatcggccagaatggcccggaccgggttaccgaattcgagctcggtaccctggttcacaaactcaatacaacacacagtggagtagggtattacgctccggcggcccgaaccactctaaatccttgtgtcctcgtgtgctcttccaccattaatgactgtaattgcagggacacgaagagttgtagcgcttttgccaacaagatccgctatatgctagtagagtggaacctgcacagcaacaagcatccaataatctgagaataagaattatgtgtggtgatggttctcatctctgcaactcgccattttcgcgagagaaccaaatccaagttggtgaagatcatgatttgggctcatgggctggcatagtagctattacctttgcaattgtggttcgaatctatccgatattctccttttcagggagagctaatgcttatgcttattgggtattttggtttgacactgcttcacgcccaaaaaaaggcaactatgtctgagttggatatggcccaaaaaaaggcagctatgtctgagttggatatggaagtcttctttcgtttagggtgaagtaagaccaagctcatgagcttattatcttaggtcggaacaaattagttgataggcatggcacatttatcaaattataatgattttaacagaaaagcaacacctctttttcagcagcaccagctttgcaagctgcaattgacactccaagcatagtatttgctccaaactcagcctgcatttcgcacaatatcatatctatttccatttggataaaatatattttccagaaatatgggaacagaatcaagatacagaaaaaagttgtggtagtagtggtaagtggaaacacaagtacagtgaaaagatagcattatttctgaacagtcaaattaaccgaaataagtagtatcacatactgcccctaaattgactacacccaatgtaaagaattgcttgagcatattgagccatcagttgtttgtttgtgtaacggatttgacaatgcagagttcaggagcaaaaaaccgcaaaggagagaaagagggaaaggatctcctagtatcccaccttgtggcgcgccctgtcaagtgcatgatggcctggtcgatctgcgtctgctgctgcggttccatcccaacgagtgcctccgacaccttgtcgttgatcacccgcaccgcgtaggcgacccccctggcgaggaacttccgcctctcggaggccccggccgcgtcggcggcggcgccctcgagcgcgcccacgctagccgtagatgctcggtgcacggccttgttggtgtgcaactcgacctcaacggccggtgcgctacgcccgtcaaggatctggcgcgcccgcaccctcgtgatcacggtgggcgcctcccgcctcatgtggccgacgatgaaaagcgccgggttaggggccttggcgcgcaccgccgtattcagggcctcctcgctcttgcgcgagagcaggtgcttccccaggtactcctgcactgacaaggctgccacagcggtggaatttgtcctcacgacttcgccacgtcgtcctcacctccctggcttcccacgactccgccgtatcgaggtgctcggtgggtcgtcttaatccgaagtccgaactaggaagacgagacagagaggtctgaggaatgggcctcgtttgatgttgagctgaattatttttccagcataagcccaggtcttggtccatgaacaaaattactagaaacccagcccagtactacgatctaaaagagggactgccactggatagctctctctagcattctccacgctccaatacagcggcgtcgtgtctatccgggtctatccgcgaacacgtgagaactctccagaaactgctttctcctccacttcatctctctcgctttccctctataaaaagaccccttctaggaattgagggagacagcaagcaccaagcagcgatccgaagctcaatcaattcactcaaacctcttccccaaatcttcgattagatcttcgttgacaagaagactagaaccgaacctgacatgtccaacctgctcacggttcaccagaaccttccggctcttccagtggacgcgacgtccgatgaagtcaggaagaacctcatggacatgttccgcgacaggcaagcgttcagcgagcacacctggaagatgctgctctccgtctgccgctcctgggctgcatggtgcaagctgaacaacaggaagtggttccccgctgagcccgaggacgtgagggattaccttctgtacctgcaagcgcgaggtttgtttctgcttctacctttgatatatatataataattatcattaattagtagtaatataatatttcaaatatttttttcaaaataaaagaatgtagtatatagcaattgcttttctgtagtttataagtgtgtatattttaatttataacttttctaatatatgaccaaaacatggtgatgcctaggtctggcagtgaagaccatccagcaacaccttggacaactgaacatgcttcacaggcgctccggcctcccgcgccccagcgactcgaacgccgtgagcctcgtcatgcgccgcatcaggaaggaaaacgtcgatgccggcgaaagggcaaagcaggccctcgcgttcgagaggaccgatttcgaccaggtccgcagcctgatggagaacagcgacaggtgccaggacattaggaacctggcgttcctcggaattgcatacaacacgctcctcaggatcgcggaaattgcccgcattcgcgtgaaggacattagccgcaccgacggcggcaggatgcttatccacattggcaggaccaagacgctcgtttccaccgcaggcgtcgaaaaggccctcagcctcggagtgaccaagctcgtcgaacgctggatctccgtgtccggcgtcgcggacgacccaaacaactacctcttctgccgcgtccgcaagaacggggtggctgcccctagcgccaccagccaactcagcacgagggccttggaaggtattttcgaggccacccaccgcctgatctacggcgcgaaggatgacagcggtcaacgctacctcgcatggtccgggcactccgcccgcgttggagctgctagggacatggcccgcgccggtgtttccatccccgaaatcatgcaggcgggtggatggacgaacgtgaacattgtcatgaactacattcgcaaccttgacagcgagacgggcgcaatggttcgcctcctggaagatggtgactgaggtacccaacctagacttgtccatcttctggattggccaacttaattaatgtatgaaataaaaggatgcacacatagtgacatgctaatcactataatgtgggcatcaaagttgtgtgttatgtgtaattactagttatctgaataaaagagaaagagatcatccatatttcttatcctaaatgaatgtcacgtgtctttataattctttgatgaaccagatgcatttcattaaccaaatccatatacatataaatattaatcatatataattaatatcaattgggttagcaaaacaaatctagtctaggtgtgttttgcgatccgatatcgaattggccacggtaccagctgctgctgttctagggttcacaagtctgcctatttgtcttccccaatggagctatggttgtctggtctggtccttggtcgtgtcccgtttcattgtgtactatttacctgtaatgtgtatccttaagtctggtttgatggtgtctgaaacgttttgctgtggtagagcagcatggaagaactataatgaataagtgatccctaatcattgtgtccaaattttgcttctgctatacccttttgtgctgtttcttatgttttgcttaaaaatttgatctgacaaacaaatttgtctaaattatgctcttgttctgactgtgtactgtacacatttgtattgctaccggtttggcacatagttttctctttgattgcagatcaaacccttctgattgcagattgcttggctatggctgatgtgctcactgttcttctttagcttgtatattgctgatggtggcttggctacggctgaaaaagttgctgctgcgccgacttggcaactgttgctccagtaatgctttgtcctctcttcctagccgccgacttggcacttggcagctgttgctcctgtaatgcgttgttatctcttatctcttgagatgtactatgattttgaggctgtttgacttgtgccagattgccagtgctgatgctatattatctcaggtttttatgctagtatatgttttactgtgtgctgcctgtgtcgagttacgtaatctattgaaccgctatgcgtgttgatgccctgttgttgcttgccagattgatgcccctgttgcttgcagcttgcaagctgtagtgaaatcctaaaattccaaaccaaatctattctgaacttttgaagatctgtgatgtccggaagaaaagattcaaacagataaacgggactctccagaatctataaaataaatgatcgacaaacgctttgctttggtaggcttcaagcttggtcacccggtccgggcctagaaggccagcttcggccgccccgggcaactttattatacaaagttgatagataaatcagatatctggttcctaaggacccggcggaccgattaaactgattcggtccgacgcgttacctaataacttcgtatagcatacattatacgaagttattagctaactaactagtaagcttaagccatgggtcgacggatccgttaactagcgtggcatttggcaccgccgcacactatgcgagctaggagtgctagtttacagatgaaactatgaaaccaagaaaacacaattgtccgtagctagcgcgtggcgtcgtgtcaagcttcacacagtatcttcgttcttcactataaatcgcgcctgttgttcgtgagacccaccaccgtggataacagtcccctaataataagcgatcaacagcactgctgatggctgaacaccgaggcgccgccgcgcgtaaccatccgccggagcagcccgtcgtgccggcgaacgacgccttccccgaccgcgcccagcagctctgcctcgacgccgggcgcgcgctcgcgatgtgcggcgtgctcgtcgccgtccctcccgcattttacgcgtcgacgtcgcggacgacaccgcacttgccttcgtcggcttcgtcctctggatcatcggtgcgtggctgtgcctcctggcgctcacgcccttggctccacgggcggtgagggcgggcggggccgccgccagcaccttgctgatcaggtgcctgtccctttcatgaactactagcgcccgcgcccgcggccgccgggcacaagagaacacatcgatgttcgctgcgtacgtcagcaataaggcactctttgtcagtagtcgagtgcatatgttgggtgtttgccctgggagatttcaagtgttgtggccattatcccgcaggataaaaaatcggcggcttttggattgatacggaaaataacgatgtttcatgctcgtgttgtgtgtgtgacatcttgtcagccaagtttttaaccgttgctactccccctctgtgggctcagtgtgtggaccggaatacgtcgtacataggccgtagcctaagcccaatatgccgtttttcaggttggcctgtgtgacgacaagcgggtctcaaaagcccatcacgcaactggcctgcaattattggaggagagcgcgtcgagttggttccagaggctgcgtggtggggccggactctgcgacgacctctcgttcgcgtccgatttggttgccgtgagccgtgacgtaacgcctccttccgttcctccctatataagttccacccccgggtccggtttccccaagccccagtgacccccgatcccgatcgcgaaatctccgcacccgccggcaagggaccgaagcaagcctctctcccgaccgtcgcatcaaggtacgcgtccgctcgatctgtcctcttccttctcgatttgacttgctgtggtgcccgatcacgggatcagaatcgcaccagtgtagatttcgcatgttctaagatgtgttagtttccaggctaatccagttctcttgacgcccgatccgatcgagctccgtgtttatttcagcctaatcgtagtattcccctaaaatttcctcattagggggttcgcaagattgttggtcgacaggttcacttatgctcgatcgcttacttttagtcgattcatgctgcgtactattgttgccccccgtggttttatcttttctcgtgtgaaatccagtagatatagtagatatcgtagcattaggttttaattcaatcgattgattattgtatcatcaaaattgagaagttcgaatcatgcctatcatgctgcctcaaccgaaatcctgtatattgaagtttcaattcaattgattgatcattcattagattcaaccaaaatctagaaggttagatgacgcatgtcatgctgcctgcgtagtttacctttgatctgtttatgattaccttatcagtaggatatttgtgattttgggaagtagcactaactgattcatgctgacatgatgttccctttcagattatactgttgagtcctatctaattgatgctttgtatgctatatgaatacgtcatggtaaattagcagttaattagcatattagcaattgggcgtacctcatcaggattgctcttgtagatgtgtgtggtgatgtttcttgttcaattcatgttctgctttaaaagtatgtgttctctgtttgttaattaagattcatggttataatgatttggacctaattaatcagggttgcccttttagatgcgtggttacttgttgagttcatttttttcctgctatagttgtatgcgtttgttcattcatggttagatttgatttgtttcttctctattccatgccttccatatacttcaattgtagcttaacatgagatttctgtatatgcaggtcgaccgccggggatccacacgacaccatggcccagtccaagcacggcctgaccaaggagatgaccatgaagtaccgcatggagggctgcgtggacggccacaagttcgtgatcaccggcgagggcatcggctaccccttcaagggcaagcaggccatcaacctgtgcgtggtggagggcggccccttgcccttcgccgaggacatcttgtccgccgccttcatgtacggcaaccgcgtgttcaccgagtacccccaggacatcgtcgactacttcaagaactcctgccccgccggctacacctgggaccgctccttcctgttcgaggacggcgccgtgtgcatctgcaacgccgacatcaccgtgagcgtggaggagaactgcatgtaccacgagtccaagttctacggcgtgaacttccccgccgacggccccgtgatgaagaagatgaccgacaactgggagccctcctgcgagaagatcatccccgtgcccaagcagggcatcttgaagggcgacgtgagcatgtacctgctgctgaaggacggtggccgcttgcgctgccagttcgacaccgtgtacaaggccaagtccgtgccccgcaagatgcccgactggcacttcatccagcacaagctgacccgcgaggaccgcagcgacgccaagaaccagaagtggcacctgaccgagcacgccatcgcctccggctccgccttgccctccggactcagatctcgatagagtcaacctagacttgtccatcttctggattggccaacttaattaatgtatgaaataaaaggatgcacacatagtgacatgctaatcactataatgtgggcatcaaagttgtgtgttatgtgtaattactagttatctgaataaaagagaaagagatcatccatatttcttatcctaaatgaatgtcacgtgtctttataattctttgatgaaccagatgcatttcattaaccaaatccatatacatataaatattaatcatatataattaatatcaattgggttagcaaaacaaatctagtctaggtgtgttttgcgaattgcggcgcccttactttaacgcctctaaccaacacccctttatctttataaggaacaataaacagaatttgccccactgttctaaatcacctaataatatccccagctaaaaacaataaaggtttcctagaattaagacaagcatgactgttcctccaggagggtttggaacattgttgcagtcttgcagatacgggcgaagggtgagaaacagagcggagggctggaggtgacctcggtagtcgacgccggagttgagcttgacaacgacggggcggcccctgatggacttgaggaagtccgatggcgtcttcaccgtcccgccggcgcccgaggcgggcctgtcgctgccgccgccgccgctgctcatcttgcgcgctgtgcccccggcggtgtccctgtgttgcggatcgcgggtgggccaggtggatgcgagggcgacccgtttggactccggccggagccgccggatccctggtcggtgtcagtgccgtttactctgggccccacgtgtcagtaccgtctgtagatgacaacaacccgtcgtccacagtcatgtccaaaatatcctttcttcttttttttcgattcggatatctatcttccttttttttttccaaaaatcttcttgacgcaccagcgcgcacgtttgtggtaaacgccgacacgtcggtcccacgtcgatagaccccacccaccagtgagtagcgtgtacgtattcgggggtgacggacgtgtcgccgtcgtcttgctagtcccattcccatctgagccacacatctctgaacaaaaaaaaggagggaggcctccacgcacatccccctccgtgccacccgccccaaaccctcgcgccgcctccgagacagccgccgcaaccatggccaccgccgccgccgcgtctaccgcgctcactggcgccactaccgctgcgcccaaggcgaggcgccgggcgcacctcctggccacccgccgcgccctcgccgcgcccatcaggtgctcagcggcgtcacccgccatgccgatggctcccccggccaccccgctccggccgtggggccccaccgagccccgcaagggtgctgacatcctcgtcgagtccctcgagcgctgcggcgtccgcgacgtcttcgcctaccccggcggcgcgtccatggagatccaccaggcactcacccgctcccccgtcatcgccaaccacctcttccgccacgagcaaggggaggcctttgccgcctccggctacgcgcgctcctcgggccgcgtcggcgtctgcatcgccacctccggccccggcgccaccaacctagtctccgcgctcgccgacgcgctgctcgattccgtccccatggtcgccatcacgggacaggtggcgcgacgcatgattggcaccgacgccttccaggagacgcccatcgtcgaggtcacccgctccatcaccaagcacaactacctggtcctcgacgtcgacgacatcccccgcgtcgtgcaggaggctttcttcctcgcctcctctggtcgaccagggccggtgcttgtcgacatccccaaggacatccagcagcagatggcggtgcctgtctgggacaagcccatgagtctgcctgggtacattgcgcgccttcccaagccccctgcgactgagttgcttgagcaggtgctgcgtcttgttggtgaatcgcggcgccctgttctttatgtgggcggtggctgcgcagcatctggtgaggagttgcgacgctttgtggagctgactggaatcccggtcacaactactcttatgggcctcggcaacttccccagcgacgacccactgtctctgcgcatgctaggtatgcatgggacggtgtatgcaaattatgcagtggataaggccgatctgttgcttgcacttggtgtgcggtttgatgatcgcgtgacagggaagattgaggcttttgcaagcagggctaagattgtgcacgttgatattgatccggctgagattggcaagaacaagcagccacatgtgtccatctgtgcagatgttaagcttgctttgcagggcatgaatgctcttcttgaaggaagcacatcaaagaagagctttgactttggctcatggaacgatgagttggatcagcagaagagggaattcccccttgggtataaaacatctaatgaggagatccagccacaatatgctattcaggttcttgatgagctgacgaaaggcgaggccatcatcggcacaggtgttgggcagcaccagatgtgggcggcacagtactacacttacaagcggccaaggcagtggttgtcttcagctggtcttggggctatgggatttggtttgccggctgctgctggtgcttctgtggcaaacccaggtgtcactgttgttgacatcgatggagatggtagctttctcatgaacgttcaggagctagctatgatccgaattgagaacctcccagtgaaggtctttgtgctaaacaaccagcacctggggatggtggtgcagttggaggacaggttctataaggccaacagagcgcacacatacttgggaaacccagagaatgaaagtgagatatatccagatttcgtgacgatcgccaaagggttcaacattccagcggtccgtgtgacaaagaagaacgaagtccgcgcagcgataaagaagatgctcgagactccagggccgtacctcttggatataatcgtcccacaccaggagcatgtgttgcctatgatccctagtggtggggctttcaaggatatgatcctggatggtgatggcaggactgtgtactgactagctagtcagttaacagatctgccagatcctcggtgtacaaataacccgtcttatcctatgagacgggccggcgtcagtgtgttctggaggaatttttatgtcagagcctttttctttgtgtgcttgatgtagatgccaagggaagcttattggctgttgaagcttgatgcaaaataaattatggaactctgttttttgtttatctaataataactagcaaatatgcttccattgcattgaaactaacagccttttgtgtttccaagttttattttgtgacaatgtcatctatttcaattagttgtggaatcggaaacttgcaggactaacttggaaactccaatccctcagcatcctggactttttcctggtgtaatccatgtagatattattttaatcatcattttagttctggaggtttttccatctccggttttgctcccctttcttcaaaaaaaaaaaaaaaatgccgtaggcgccgcaacgcccacctgttgttcaaactcatgggcacgagtggctcgaagattttatacaacaattgctgtagtttcaccgttgctggtgaagaagcatttttttaaaaaaatatagtggtattcattttaattagtttagttgtgcagcgagcaaaatttggacatgctctgctcggaatctgatcgacctagacacagattagcagcagtagctttgtcatctgttccaagagttgcgatctgatagaagaaaaaaaaaccttcccttcaatgtaaaaccgaaactaacaagaaagaagcacagtgccgtttaggcaagtatggagtacgtattaagcatgtagaaggccatgcatgaaccactaacaagaaagaagcgcagtgccattcaggcaagcataagcatgtagattggcatgcatgaacaactaacagtagatcgtctctggtctgattagaagttttttgggaagccaagaaatcatgtacaactggttccatctcaaattccgtggcaaaaagaggcctaagcaacatacctcgagtagatcacattcaagcttggtcacccggtccgtcaatattctgattccgatgacttcgtaggttcctagctcaagccgctcgtgtccaagcgtcacttacgattagctaatgattacggcatctaggaccgactagtggcgcgccgactagctagctaaggtaccgagctcgaattcattccgattaatcgtggcctcttgctcttcaggatgaagagctatgtttaaacgtgcaagcgctactagacaattcagtacattaaaaacgtccgcaatgtgttattaagttgtctaagcgtcaatttgtttacaccacaatatatcctgcca

SEQ ID NO: 72 - DNA, 22767 bp, Artificial sequence
  PHP96730
gtttacccgccaatatatcctgtcaaacactgatagtttaaactgaaggcgggaaacgacaatctgatcatgagcggagaattaagggagtcacgttatgacccccgccgatgacgcgggacaagccgttttacgtttggaactgacagaaccgcaacgttgaaggagccactcagcaagctggtacgattgtaatacgactcactatagggcgaattgagcgctgtttaaacgctcttcaactggaagagcggttacgctgtttaaacgctcttcaactggaagagcggttactaccggttcactagctagctgctaatcgagctagttaccctatgaggtgacatgaagcgctcacggttactatgacggttagcttcacgactgttggtggcagtagcgtacgacttagctatagttccggacttacccttaagcgatttaaatctgcggttaccgaattcgagctcggtacctagtacccttgtacttttggtttcacctgcatagagaaaacccacaagaatatgacagtctgatttgtcagtctcattctcaagcaacatttctctatccgttactttcatggtgaataacacaatccatcatcaatactttgtgttactcagaaactgaaagttattccgagtcttgcatatctttggacctactcgtttttctaccattattgctgattgttaagctctcgctacttgaatcggcattgttggagtgggaaggttcaaaaaattggagttatgactagttgtctctttctatgtacgatggagaaaatgaataaacaactgagaaaatggctcttgtttagttgatgatgctcttaagctttccactggttgccatatatgatttgggcatttcactttgatcttaatgggccttgtaaagcccaagactcatgattatctttagttgatgctcttaattaggtgtgggcaaataattcaaactgtatgtacccgaccaaaaccaaagcaaaaataatcgaaccaaaccgaaaatttaaaaataaccgaatgaaaactaaatcctataactgaaagaactgaaaccgaatcaaaatatttaatgtaaccaaaaatatccgaaatataattatattgtcaaaaatattaataatttctagattaaataattaaaaatacttaaaaatttatataaaatagtaaaaatactcgaaaataaccacaaatattcaaaaacaaccgaaatatcccaaaatattcaaagcaaaataaccgaatggataccaaattttaaaaccgaaaaaactggaacaaaaccaaaatcgaaccaaaatttcaaaaatcgaataaatactaaactttagaacaaaaaaaaacgataaccgaatgtatacgaaccaaagccgaattagataaccgaacgtccaggactactcttaatctttccgccacttatgatttgggctattactttgtttataatgagccttttcaagctcaagttcatgattgtccgtgagatgagaaactgacttgttggattcgaaaccctagctagtattggttaatacttaatacataaatgacctgcattgacatcatcatccaagaaaataaaaattgtatgcttgagatatttagttttcctagctaggttttctttattttagtaccgaatctttaggtgtgccacgttaatttagacccattttttcatacttaccaactgagtctagtttaatcatgactataatcgtataaaatgattcagtcgacgtcattgcgaacgtatataaaatcatccaaattgacgtcattccaaagaggtaagcatgcttatctaagagtccgagcatactaaacaagacgacattttatttgcactccaaatcaaattttgtattgcctaaagaaaaacaatcaaactcaagtttcttaaaattaatttcattcaaactaatcactttcaatatctcacatattattcatgccatttctatttgtctaaacatgatttaaaaaaaaaagtaaaatacaaagattactatgcaaaaactctataaaaaaaaattcaaatttcttatttatttgtgacatcaaattttcaaaataatttttttaattatcggttgatccggtcagtcgataaaaacataaactttcagcgaccgttaaaactttcctactaccgatttagagaaaatcttagcttgaaacgtaattgtaacctgccttcatgcaagtcgcaagatatgtcatcctaagttgtatatgttttctcaaaagatgtatttacttgagaaaatacgtttcaacgttgatggacaaccaattaagaatcaagcacctttcgtaatcaatttaggcttatcgtctaaggtatactgatttacgacagttgactagacttataaggaacaaaataatagaatagtttctaaacacttcacctaatcatagagactaagatggtaattcgtaaacgacaaagcctagtgacactgtccattgtaaaattccacatcatattagtattaaacatatacatgtagtttcctgaacacatgtagtatcaaacacacttcgtggcttcttcctcgaaacctgcggccgcgctatagttccggacttacccttaagataacttcgtatagcatacattatacgaagttatgggcccacgcgtgaagagcggttaccagagctggtcacctttgtccaccaagatggaactgtcttcggccagaatggccatctggattcagcaggcctagaaggccatttatcgctatcaactttgtatagaaaagttgggccgaattcgagctcggtacggccagaatggcccggaccgaagcttaacgcttacgcttatgaatcagcttgattcgtaattggttctaacgagccttaatgcatggatgttggagagaaccaatatttatggaggaaataaagcatttaaatcagatttttttccatacatgttttccttatgaaatagatcgatgatttacactaaagttcatacccatttacgatgttttgcttaacgttttatgctgaaatccgcctgagctcacacgcacgatcggttccatatcttttgttccgatatatacggtaacttctagcttcatgggcgagctaatcacggtggtgtatggacccacctgaacgaaccaatgaaaaatttgttgccgctctcatgttatgcaagtctgaaccattaaatatgctagcataaacacgagtaggaaccaactacccgaccagcgaacacgacgttggcccaccttcgtccatcccaactcgaccccaccacgtgcgcaccttctgtttacgtaaaacataacatatgtttacacatgtataaacgtgccccacaatcgcgcggacgcacgtgccccactgacccgacctgaccacgcgtgtgaccactaccctggctaggacttcccatgcctatcggaagccctgagcttccattatcaacgcctatatatattattcaattgaagcaaaacatagtggttttttgtaagctgtataaaaatatttcattgttaaatcctgaggtataccaaaaaaaaggtgtttaaccaatggtttgaacaactttttttcatctttaaattacatttccaaaaatgatatttatttaatttattattattagattccactgaggagcaaaaacacatattcaagttaagaatgctgtattgagtcccccgttgtcggaaattaaaattatacttcatgtgatttataatttgctgtagtgcggcgcgcggctcttacgactgagctgaggccaaaataaagcagcaggttcgttgggggcgataatcccaggcggtgcactacaatttgaagtgtactaccctggcactctaaaagcatacacgcatgcaaaagcagctcccgctttttttgaatggagaagattatctcaatcgacaaatatatacgcgtaggacaatttatacactttagttatatatacatggccagaaaattgtcatctctaaagcaactacactgaaaaagaactttgcattttcacagtcccacaaaaaaaaaacaaaaaaaagttaaagagacatgtgcttgaagagcccctgcgcacttgtacacggtgacacaacatgcatgtacaccaaggcctgcctgcgcgccacctcgtcgtgctcgtgcctatataaagccactcgcatcccagcctatcattgcaagagtttgagacagcagaggacactcctcctcagaactctcccttccctcttgtaggggccaaaagggtcagagaactaggaagaagagaactagtccccaagcctaacaagaaagcaagatcttctgcaactgttggcattcgccttaatttgtatccatatccccccgggggatctcgactctagaggatcgctcaggaaggccgctgagatagaggcatggcggccaatgcgggcggcggtggagcgggaggaggcagcggcagcggcagcgtggctgcgccggcggtgtgccgccccagcggctcgcggtggacgccgacgccggagcagatcaggatgctgaaggagctctactacggctgcggcatccggtcgcccagctcggagcagatccagcgcatcaccgccatgctgcggcagcacggcaagatcgagggcaagaacgtcttctactggttccagaaccacaaggcccgcgagcgccagaagcgccgcctcaccagcctcgacgtcaacgtgcccgccgccggcgcggccgacgccaccaccagccaactcggcgtcctctcgctgtcgtcgccgccgccttcaggcgcggcgcctccctcgcccaccctcggcttctacgccgccggcaatggcggcggatcggctgtgctgctggacacgagttccgactggggcagcagcggcgctgccatggccaccgagacatgcttcctgcaggactacatgggcgtgacggacacgggcagctcgtcgcagtggccacgcttctcgtcgtcggacacgataatggcggcggccgcggcgcgggcggcgacgacgcgggcgcccgagacgctccctctcttcccgacctgcggcgacgacggcggcagcggtagcagcagctacttgccgttctggggtgccgcgtccacaactgccggcgccacttcttccgttgcgatccagcagcaacaccagctgcaggagcagtacagcttttacagcaacagcaacagcacccagctggccggcaccggcaaccaagacgtatcggcaacagcagcagcagccgccgccctggagctgagcctcagctcatggtgctccccttaccctgctgcagggagtatgtgagagcaacgcgagctgccactgctcttcactgatgtctctggaatggaaggaggaggaagtgagcatagcgttggtgcgttgctgtcaagggcgaattcacatggttaacctagacttgtccatcttctggattggccaacttaattaatgtatgaaataaaaggatgcacacatagtgacatgctaatcactataatgtgggcatcaaagttgtgtgttatgtgtaattactagttatctgaataaaagagaaagagatcatccatatttcttatcctaaatgaatgtcacgtgtctttataattctttgatgaaccagatgcatttcattaaccaaatccatatacatataaatattaatcatatataattaatatcaattgggttagcaaaacaaatctagtctaggtgtgttttgcgaatgcggccgccaccgcggtggagctcgaattccggtccgggcctagaaggccagcttcaagtttgtacaaaaaagcaggctccggccagaatggcccggaccgggttaccgaattcgagctcggtaccatttaaattgcgcccgccacggccgtggaggtcgtattccggtcagcttgcatccctgcagtgcagcgtgacccggtcgtgcccctctctagagataatgagcattgcatgtctaagttataaaaaattaccacatattttttttgtcacacttgtttgaagtgcagtttatctatctttatacatatatttaaactttactctacgaataatataatctatagtactacaataatatcagtgttttagagaatcatataaatgaacagttagacatggtctaaaggacaattgagtattttgacaacaggactctacagttttatctttttagtgtgcatgtgttctcctttttttttgcaaatagcttcacctatataatacttcatccattttattagtacatccatttagggtttagggttaatggtttttatagactaatttttttagtacatctattttattctattttagcctctaaattaagaaaactaaaactctattttagtttttttatttaataatttagatataaaatagaataaaataaagtgactaaaaattaaacaaataccctttaagaaattaaaaaaactaaggaaacatttttcttgtttcgagtagataatgccagcctgttaaacgccgtcgacgagtctaacggacaccaaccagcgaaccagcagcgtcgcgtcgggccaagcgaagcagacggcacggcatctctgtcgctgcctctggacccctctcgagagttccgctccaccgttggacttgctccgctgtcggcatccagaaattgcgtggcggagcggcagacgtgagccggcacggcaggcggcctcctcctcctctcacggcaccggcagctacgggggattcctttcccaccgctccttcgctttcccttcctcgcccgccgtaataaatagacaccccctccacaccctctttccccaacctcgtgttgttcggagcgcacacacacacaaccagatctcccccaaatccacccgtcggcacctccgcttcaaggtacgccgctcgtcctcccccccccccctctctaccttctctagatcggcgttccggtccatgcatggttagggcccggtagttctacttctgttcatgtttgtgttagatccgtgtttgtgttagatccgtgctgctagcgttcgtacacggatgcgacctgtacgtcagacacgttctgattgctaacttgccagtgtttctctttggggaatcctgggatggctctagccgttccgcagacgggatcgatttcatgattttttttgtttcgttgcatagggtttggtttgcccttttcctttatttcaatatatgccgtgcacttgtttgtcgggtcatcttttcatgcttttttttgtcttggttgtgatgatgtggtctggttgggcggtcgttctagatcggagtagaattctgtttcaaactacctggtggatttattaattttggatctgtatgtgtgtgccatacatattcatagttacgaattgaagatgatggatggaaatatcgatctaggataggtatacatgttgatgcgggttttactgatgcatatacagagatgctttttgttcgcttggttgtgatgatgtggtgtggttgggcggtcgttcattcgttctagatcggagtagaatactgtttcaaactacctggtgtatttattaattttggaactgtatgtgtgtgtcatacatcttcatagttacgagtttaagatggatggaaatatcgatctaggataggtatacatgttgatgtgggttttactgatgcatatacatgatggcatatgcagcatctattcatatgctctaaccttgagtacctatctattataataaacaagtatgttttataattattttgatcttgatatacttggatgatggcatatgcagcagctatatgtggatttttttagccctgccttcatacgctatttatttgcttggtactgtttcttttgtcgatgctcaccctgttgtttggtgttacttctgcaggtcgactctagaggatccatggccactgtgaacaactggctcgctttctccctctccccgcaggagctgccgccctcccagacgacggactccacactcatctcggccgccaccgccgaccatgtctccggcgatgtctgcttcaacatcccccaagattggagcatgaggggatcagagctttcggcgctcgtcgcggagccgaagctggaggacttcctcggcggcatctccttctccgagcagcatcacaaggccaactgcaacatgatacccagcactagcagcacagtttgctacgcgagctcaggtgctagcaccggctaccatcaccagctgtaccaccagcccaccagctcagcgctccacttcgcggactccgtaatggtggcttcctcggccggtgtccacgacggcggtgccatgctcagcgcggccgccgctaacggtgtcgctggcgctgccagtgccaacggcggcggcatcgggctgtccatgattaagaactggctgcggagccaaccggcgcccatgcagccgagggtggcggcggctgagggcgcgcaggggctctctttgtccatgaacatggcggggacgacccaaggcgctgctggcatgccacttctcgctggagagcgcgcacgggcgcccgagagtgtatcgacgtcagcacagggtggagccgtcgtcgtcacggcgccgaaggaggatagcggtggcagcggtgttgccggcgctctagtagccgtgagcacggacacgggtggcagcggcggcgcgtcggctgacaacacggcaaggaagacggtggacacgttcgggcagcgcacgtcgatttaccgtggcgtgacaaggcatagatggactgggagatatgaggcacatctttgggataacagttgcagaagggaagggcaaactcgtaagggtcgtcaagtctatttaggtggctatgataaagaggagaaagctgctagggcttatgatcttgctgctctgaagtactggggtgccacaacaacaacaaattttccagtgagtaactacgaaaaggagctcgaggacatgaagcacatgacaaggcaggagtttgtagcgtctctgagaaggaagagcagtggtttctccagaggtgcatccatttacaggggagtgactaggcatcaccaacatggaagatggcaagcacggattggacgagttgcagggaacaaggatctttacttgggcaccttcagcacccaggaggaggcagcggaggcgtacgacatcgcggcgatcaagttccgcggcctcaacgccgtcaccaacttcgacatgagccgctacgacgtgaagagcatcctggacagcagcgccctccccatcggcagcgccgccaagcgcctcaaggaggccgaggccgcagcgtccgcgcagcaccaccacgccggcgtggtgagctacgacgtcggccgcatcgcctcgcagctcggcgacggcggagccctggcggcggcgtacggcgcgcactaccacggcgccgcctggccgaccatcgcgttccagccgggcgccgccagcacaggcctgtaccacccgtacgcgcagcagccaatgcgcggcggcgggtggtgcaagcaggagcaggaccacgcggtgatcgcggccgcgcacagcctgcaggacctccaccacctgaacctgggcgcggccggcgcgcacgactttttctcggcagggcagcaggccgccgccgctgcgatgcacggcctgggtagcatcgacagtgcgtcgctcgagcacagcaccggctccaactccgtcgtctacaacggcggggtcggcgacagcaacggcgccagcgccgtcggcggcagtggcggtggctacatgatgccgatgagcgctgccggagcaaccactacatcggcaatggtgagccacgagcaggtgcatgcacgggcctacgacgaagccaagcaggctgctcagatggggtacgagagctacctggtgaacgcggagaacaatggtggcggaaggatgtctgcatgggggactgtcgtgtctgcagccgcggcggcagcagcaagcagcaacgacaacatggccgccgacgtcgggcatggcggcgcgcagctcttcagtgtctggaacgacacttaagcgtacgtgccggcctggctctccgaaagggcgtattccagcacactggcggccgttactagacccaacctagacttgtccatcttctggattggccaacttaattaatgtatgaaataaaaggatgcacacatagtgacatgctaatcactataatgtgggcatcaaagttgtgtgttatgtgtaattactagttatctgaataaaagagaaagagatcatccatatttcttatcctaaatgaatgtcacgtgtctttataattctttgatgaaccagatgcatttcattaaccaaatccatatacatataaatattaatcatatataattaatatcaattgggttagcaaaacaaatctagtctaggtgtgttttgcgaatgcggcctccgggcacccagctttcttgtacaaagtggccgttaacggatcggccagaatggcccggaccgggttaccgaattcgagctcggtaccctggttcacaaactcaatacaacacacagtggagtagggtattacgctccggcggcccgaaccactctaaatccttgtgtcctcgtgtgctcttccaccattaatgactgtaattgcagggacacgaagagttgtagcgcttttgccaacaagatccgctatatgctagtagagtggaacctgcacagcaacaagcatccaataatctgagaataagaattatgtgtggtgatggttctcatctctgcaactcgccattttcgcgagagaaccaaatccaagttggtgaagatcatgatttgggctcatgggctggcatagtagctattacctttgcaattgtggttcgaatctatccgatattctccttttcagggagagctaatgcttatgcttattgggtattttggtttgacactgcttcacgcccaaaaaaaggcaactatgtctgagttggatatggcccaaaaaaaggcagctatgtctgagttggatatggaagtcttctttcgtttagggtgaagtaagaccaagctcatgagcttattatcttaggtcggaacaaattagttgataggcatggcacatttatcaaattataatgattttaacagaaaagcaacacctctttttcagcagcaccagctttgcaagctgcaattgacactccaagcatagtatttgctccaaactcagcctgcatttcgcacaatatcatatctatttccatttggataaaatatattttccagaaatatgggaacagaatcaagatacagaaaaaagttgtggtagtagtggtaagtggaaacacaagtacagtgaaaagatagcattatttctgaacagtcaaattaaccgaaataagtagtatcacatactgcccctaaattgactacacccaatgtaaagaattgcttgagcatattgagccatcagttgtttgtttgtgtaacggatttgacaatgcagagttcaggagcaaaaaaccgcaaaggagagaaagagggaaaggatctcctagtatcccaccttgtggcgcgccctgtcaagtgcatgatggcctggtcgatctgcgtctgctgctgcggttccatcccaacgagtgcctccgacaccttgtcgttgatcacccgcaccgcgtaggcgacccccctggcgaggaacttccgcctctcggaggccccggccgcgtcggcggcggcgccctcgagcgcgcccacgctagccgtagatgctcggtgcacggccttgttggtgtgcaactcgacctcaacggccggtgcgctacgcccgtcaaggatctggcgcgcccgcaccctcgtgatcacggtgggcgcctcccgcctcatgtggccgacgatgaaaagcgccgggttaggggccttggcgcgcaccgccgtattcagggcctcctcgctcttgcgcgagagcaggtgcttccccaggtactcctgcactgacaaggctgccacagcggtggaatttgtcctcacgacttcgccacgtcgtcctcacctccctggcttcccacgactccgccgtatcgaggtgctcggtgggtcgtcttaatccgaagtccgaactaggaagacgagacagagaggtctgaggaatgggcctcgtttgatgttgagctgaattatttttccagcataagcccaggtcttggtccatgaacaaaattactagaaacccagcccagtactacgatctaaaagagggactgccactggatagctctctctagcattctccacgctccaatacagcggcgtcgtgtctatccgggtctatccgcgaacacgtgagaactctccagaaactgctttctcctccacttcatctctctcgctttccctctataaaaagaccccttctaggaattgagggagacagcaagcaccaagcagcgatccgaagctcaatcaattcactcaaacctcttccccaaatcttcgattagatcttcgttgacaagaagactagaaccgaacctgacatgtccaacctgctcacggttcaccagaaccttccggctcttccagtggacgcgacgtccgatgaagtcaggaagaacctcatggacatgttccgcgacaggcaagcgttcagcgagcacacctggaagatgctgctctccgtctgccgctcctgggctgcatggtgcaagctgaacaacaggaagtggttccccgctgagcccgaggacgtgagggattaccttctgtacctgcaagcgcgaggtttgtttctgcttctacctttgatatatatataataattatcattaattagtagtaatataatatttcaaatatttttttcaaaataaaagaatgtagtatatagcaattgcttttctgtagtttataagtgtgtatattttaatttataacttttctaatatatgaccaaaacatggtgatgcctaggtctggcagtgaagaccatccagcaacaccttggacaactgaacatgcttcacaggcgctccggcctcccgcgccccagcgactcgaacgccgtgagcctcgtcatgcgccgcatcaggaaggaaaacgtcgatgccggcgaaagggcaaagcaggccctcgcgttcgagaggaccgatttcgaccaggtccgcagcctgatggagaacagcgacaggtgccaggacattaggaacctggcgttcctcggaattgcatacaacacgctcctcaggatcgcggaaattgcccgcattcgcgtgaaggacattagccgcaccgacggcggcaggatgcttatccacattggcaggaccaagacgctcgtttccaccgcaggcgtcgaaaaggccctcagcctcggagtgaccaagctcgtcgaacgctggatctccgtgtccggcgtcgcggacgacccaaacaactacctcttctgccgcgtccgcaagaacggggtggctgcccctagcgccaccagccaactcagcacgagggccttggaaggtattttcgaggccacccaccgcctgatctacggcgcgaaggatgacagcggtcaacgctacctcgcatggtccgggcactccgcccgcgttggagctgctagggacatggcccgcgccggtgtttccatccccgaaatcatgcaggcgggtggatggacgaacgtgaacattgtcatgaactacattcgcaaccttgacagcgagacgggcgcaatggttcgcctcctggaagatggtgactgaggtacccaacctagacttgtccatcttctggattggccaacttaattaatgtatgaaataaaaggatgcacacatagtgacatgctaatcactataatgtgggcatcaaagttgtgtgttatgtgtaattactagttatctgaataaaagagaaagagatcatccatatttcttatcctaaatgaatgtcacgtgtctttataattctttgatgaaccagatgcatttcattaaccaaatccatatacatataaatattaatcatatataattaatatcaattgggttagcaaaacaaatctagtctaggtgtgttttgcgatccgatatcgaattggccacggtaccagctgctgctgttctagggttcacaagtctgcctatttgtcttccccaatggagctatggttgtctggtctggtccttggtcgtgtcccgtttcattgtgtactatttacctgtaatgtgtatccttaagtctggtttgatggtgtctgaaacgttttgctgtggtagagcagcatggaagaactataatgaataagtgatccctaatcattgtgtccaaattttgcttctgctatacccttttgtgctgtttcttatgttttgcttaaaaatttgatctgacaaacaaatttgtctaaattatgctcttgttctgactgtgtactgtacacatttgtattgctaccggtttggcacatagttttctctttgattgcagatcaaacccttctgattgcagattgcttggctatggctgatgtgctcactgttcttctttagcttgtatattgctgatggtggcttggctacggctgaaaaagttgctgctgcgccgacttggcaactgttgctccagtaatgctttgtcctctcttcctagccgccgacttggcacttggcagctgttgctcctgtaatgcgttgttatctcttatctcttgagatgtactatgattttgaggctgtttgacttgtgccagattgccagtgctgatgctatattatctcaggtttttatgctagtatatgttttactgtgtgctgcctgtgtcgagttacgtaatctattgaaccgctatgcgtgttgatgccctgttgttgcttgccagattgatgcccctgttgcttgcagcttgcaagctgtagtgaaatcctaaaattccaaaccaaatctattctgaacttttgaagatctgtgatgtccggaagaaaagattcaaacagataaacgggactctccagaatctataaaataaatgatcgacaaacgctttgctttggtaggcttcaagcttggtcacccggtccgggcctagaaggccagcttcggccgccccgggcaactttattatacaaagttgatagataaatcagatatctggttcctaaggacccggcggaccgattaaactgattcggtccgacgcgttacctaataacttcgtatagcatacattatacgaagttattagctaactaactagtaagcttaagccatgggtcgacggatccgttaactagcgtggcatttggcaccgccgcacactatgcgagctaggagtgctagtttacagatgaaactatgaaaccaagaaaacacaattgtccgtagctagcgcgtggcgtcgtgtcaagcttcacacagtatcttcgttcttcactataaatcgcgcctgttgttcgtgagacccaccaccgtggataacagtcccctaataataagcgatcaacagcactgctgatggctgaacaccgaggcgccgccgcgcgtaaccatccgccggagcagcccgtcgtgccggcgaacgacgccttccccgaccgcgcccagcagctctgcctcgacgccgggcgcgcgctcgcgatgtgcggcgtgctcgtcgccgtccctcccgcattttacgcgtcgacgtcgcggacgacaccgcacttgccttcgtcggcttcgtcctctggatcatcggtgcgtggctgtgcctcctggcgctcacgcccttggctccacgggcggtgagggcgggcggggccgccgccagcaccttgctgatcaggtgcctgtccctttcatgaactactagcgcccgcgcccgcggccgccgggcacaagagaacacatcgatgttcgctgcgtacgtcagcaataaggcactctttgtcagtagtcgagtgcatatgttgggtgtttgccctgggagatttcaagtgttgtggccattatcccgcaggataaaaaatcggcggcttttggattgatacggaaaataacgatgtttcatgctcgtgttgtgtgtgtgacatcttgtcagccaagtttttaaccgttgctactccccctctgtgggctcagtgtgtggaccggaatacgtcgtacataggccgtagcctaagcccaatatgccgtttttcaggttggcctgtgtgacgacaagcgggtctcaaaagcccatcacgcaactggcctgcaattattggaggagagcgcgtcgagttggttccagaggctgcgtggtggggccggactctgcgacgacctctcgttcgcgtccgatttggttgccgtgagccgtgacgtaacgcctccttccgttcctccctatataagttccacccccgggtccggtttccccaagccccagtgacccccgatcccgatcgcgaaatctccgcacccgccggcaagggaccgaagcaagcctctctcccgaccgtcgcatcaaggtacgcgtccgctcgatctgtcctcttccttctcgatttgacttgctgtggtgcccgatcacgggatcagaatcgcaccagtgtagatttcgcatgttctaagatgtgttagtttccaggctaatccagttctcttgacgcccgatccgatcgagctccgtgtttatttcagcctaatcgtagtattcccctaaaatttcctcattagggggttcgcaagattgttggtcgacaggttcacttatgctcgatcgcttacttttagtcgattcatgctgcgtactattgttgccccccgtggttttatcttttctcgtgtgaaatccagtagatatagtagatatcgtagcattaggttttaattcaatcgattgattattgtatcatcaaaattgagaagttcgaatcatgcctatcatgctgcctcaaccgaaatcctgtatattgaagtttcaattcaattgattgatcattcattagattcaaccaaaatctagaaggttagatgacgcatgtcatgctgcctgcgtagtttacctttgatctgtttatgattaccttatcagtaggatatttgtgattttgggaagtagcactaactgattcatgctgacatgatgttccctttcagattatactgttgagtcctatctaattgatgctttgtatgctatatgaatacgtcatggtaaattagcagttaattagcatattagcaattgggcgtacctcatcaggattgctcttgtagatgtgtgtggtgatgtttcttgttcaattcatgttctgctttaaaagtatgtgttctctgtttgttaattaagattcatggttataatgatttggacctaattaatcagggttgcccttttagatgcgtggttacttgttgagttcatttttttcctgctatagttgtatgcgtttgttcattcatggttagatttgatttgtttcttctctattccatgccttccatatacttcaattgtagcttaacatgagatttctgtatatgcaggtcgaccgccggggatccacacgacaccatggcccagtccaagcacggcctgaccaaggagatgaccatgaagtaccgcatggagggctgcgtggacggccacaagttcgtgatcaccggcgagggcatcggctaccccttcaagggcaagcaggccatcaacctgtgcgtggtggagggcggccccttgcccttcgccgaggacatcttgtccgccgccttcatgtacggcaaccgcgtgttcaccgagtacccccaggacatcgtcgactacttcaagaactcctgccccgccggctacacctgggaccgctccttcctgttcgaggacggcgccgtgtgcatctgcaacgccgacatcaccgtgagcgtggaggagaactgcatgtaccacgagtccaagttctacggcgtgaacttccccgccgacggccccgtgatgaagaagatgaccgacaactgggagccctcctgcgagaagatcatccccgtgcccaagcagggcatcttgaagggcgacgtgagcatgtacctgctgctgaaggacggtggccgcttgcgctgccagttcgacaccgtgtacaaggccaagtccgtgccccgcaagatgcccgactggcacttcatccagcacaagctgacccgcgaggaccgcagcgacgccaagaaccagaagtggcacctgaccgagcacgccatcgcctccggctccgccttgccctccggactcagatctcgatagagtcaacctagacttgtccatcttctggattggccaacttaattaatgtatgaaataaaaggatgcacacatagtgacatgctaatcactataatgtgggcatcaaagttgtgtgttatgtgtaattactagttatctgaataaaagagaaagagatcatccatatttcttatcctaaatgaatgtcacgtgtctttataattctttgatgaaccagatgcatttcattaaccaaatccatatacatataaatattaatcatatataattaatatcaattgggttagcaaaacaaatctagtctaggtgtgttttgcgaattgcggcgcccttactttaacgcctctaaccaacacccctttatctttataaggaacaataaacagaatttgccccactgttctaaatcacctaataatatccccagctaaaaacaataaaggtttcctagaattaagacaagcatgactgttcctccaggagggtttggaacattgttgcagtcttgcagatacgggcgaagggtgagaaacagagcggagggctggaggtgacctcggtagtcgacgccggagttgagcttgacaacgacggggcggcccctgatggacttgaggaagtccgatggcgtcttcaccgtcccgccggcgcccgaggcgggcctgtcgctgccgccgccgccgctgctcatcttgcgcgctgtgcccccggcggtgtccctgtgttgcggatcgcgggtgggccaggtggatgcgagggcgacccgtttggactccggccggagccgccggatccctggtcggtgtcagtgccgtttactctgggccccacgtgtcagtaccgtctgtagatgacaacaacccgtcgtccacagtcatgtccaaaatatcctttcttcttttttttcgattcggatatctatcttccttttttttttccaaaaatcttcttgacgcaccagcgcgcacgtttgtggtaaacgccgacacgtcggtcccacgtcgatagaccccacccaccagtgagtagcgtgtacgtattcgggggtgacggacgtgtcgccgtcgtcttgctagtcccattcccatctgagccacacatctctgaacaaaaaaaaggagggaggcctccacgcacatccccctccgtgccacccgccccaaaccctcgcgccgcctccgagacagccgccgcaaccatggccaccgccgccgccgcgtctaccgcgctcactggcgccactaccgctgcgcccaaggcgaggcgccgggcgcacctcctggccacccgccgcgccctcgccgcgcccatcaggtgctcagcggcgtcacccgccatgccgatggctcccccggccaccccgctccggccgtggggccccaccgagccccgcaagggtgctgacatcctcgtcgagtccctcgagcgctgcggcgtccgcgacgtcttcgcctaccccggcggcgcgtccatggagatccaccaggcactcacccgctcccccgtcatcgccaaccacctcttccgccacgagcaaggggaggcctttgccgcctccggctacgcgcgctcctcgggccgcgtcggcgtctgcatcgccacctccggccccggcgccaccaacctagtctccgcgctcgccgacgcgctgctcgattccgtccccatggtcgccatcacgggacaggtggcgcgacgcatgattggcaccgacgccttccaggagacgcccatcgtcgaggtcacccgctccatcaccaagcacaactacctggtcctcgacgtcgacgacatcccccgcgtcgtgcaggaggctttcttcctcgcctcctctggtcgaccagggccggtgcttgtcgacatccccaaggacatccagcagcagatggcggtgcctgtctgggacaagcccatgagtctgcctgggtacattgcgcgccttcccaagccccctgcgactgagttgcttgagcaggtgctgcgtcttgttggtgaatcgcggcgccctgttctttatgtgggcggtggctgcgcagcatctggtgaggagttgcgacgctttgtggagctgactggaatcccggtcacaactactcttatgggcctcggcaacttccccagcgacgacccactgtctctgcgcatgctaggtatgcatgggacggtgtatgcaaattatgcagtggataaggccgatctgttgcttgcacttggtgtgcggtttgatgatcgcgtgacagggaagattgaggcttttgcaagcagggctaagattgtgcacgttgatattgatccggctgagattggcaagaacaagcagccacatgtgtccatctgtgcagatgttaagcttgctttgcagggcatgaatgctcttcttgaaggaagcacatcaaagaagagctttgactttggctcatggaacgatgagttggatcagcagaagagggaattcccccttgggtataaaacatctaatgaggagatccagccacaatatgctattcaggttcttgatgagctgacgaaaggcgaggccatcatcggcacaggtgttgggcagcaccagatgtgggcggcacagtactacacttacaagcggccaaggcagtggttgtcttcagctggtcttggggctatgggatttggtttgccggctgctgctggtgcttctgtggcaaacccaggtgtcactgttgttgacatcgatggagatggtagctttctcatgaacgttcaggagctagctatgatccgaattgagaacctcccagtgaaggtctttgtgctaaacaaccagcacctggggatggtggtgcagttggaggacaggttctataaggccaacagagcgcacacatacttgggaaacccagagaatgaaagtgagatatatccagatttcgtgacgatcgccaaagggttcaacattccagcggtccgtgtgacaaagaagaacgaagtccgcgcagcgataaagaagatgctcgagactccagggccgtacctcttggatataatcgtcccacaccaggagcatgtgttgcctatgatccctagtggtggggctttcaaggatatgatcctggatggtgatggcaggactgtgtactgactagctagtcagttaacagatctgccagatcctcggtgtacaaataacccgtcttatcctatgagacgggccggcgtcagtgtgttctggaggaatttttatgtcagagcctttttctttgtgtgcttgatgtagatgccaagggaagcttattggctgttgaagcttgatgcaaaataaattatggaactctgttttttgtttatctaataataactagcaaatatgcttccattgcattgaaactaacagccttttgtgtttccaagttttattttgtgacaatgtcatctatttcaattagttgtggaatcggaaacttgcaggactaacttggaaactccaatccctcagcatcctggactttttcctggtgtaatccatgtagatattattttaatcatcattttagttctggaggtttttccatctccggttttgctcccctttcttcaaaaaaaaaaaaaaaatgccgtaggcgccgcaacgcccacctgttgttcaaactcatgggcacgagtggctcgaagattttatacaacaattgctgtagtttcaccgttgctggtgaagaagcatttttttaaaaaaatatagtggtattcattttaattagtttagttgtgcagcgagcaaaatttggacatgctctgctcggaatctgatcgacctagacacagattagcagcagtagctttgtcatctgttccaagagttgcgatctgatagaagaaaaaaaaaccttcccttcaatgtaaaaccgaaactaacaagaaagaagcacagtgccgtttaggcaagtatggagtacgtattaagcatgtagaaggccatgcatgaaccactaacaagaaagaagcgcagtgccattcaggcaagcataagcatgtagattggcatgcatgaacaactaacagtagatcgtctctggtctgattagaagttttttgggaagccaagaaatcatgtacaactggttccatctcaaattccgtggcaaaaagaggcctaagcaacatacctcgagtagatcacattcaagcttggtcacccggtccgtcaatattctgattccgatgacttcgtaggttcctagctcaagccgctcgtgtccaagcgtcacttacgattagctaatgattacggcatctaggaccgactagtggcgcgccgactagctagctaaggtaccgagctcgaattcattccgattaatcgtggcctcttgctcttcaggatgaagagctatgtttaaacgtgcaagcgctactagacaattcagtacattaaaaacgtccgcaatgtgttattaagttgtctaagcgtcaatttgtttacaccacaatatatcctgcca

SEQ ID NO: 73 - DNA, 23240 bp, Artificial sequence
  PHP96731
gtttacccgccaatatatcctgtcaaacactgatagtttaaactgaaggcgggaaacgacaatctgatcatgagcggagaattaagggagtcacgttatgacccccgccgatgacgcgggacaagccgttttacgtttggaactgacagaaccgcaacgttgaaggagccactcagcaagctggtacgattgtaatacgactcactatagggcgaattgagcgctgtttaaacgctcttcaactggaagagcggttacgctgtttaaacgctcttcaactggaagagcggttactaccggttcactagctagctgctaatcgagctagttaccctatgaggtgacatgaagcgctcacggttactatgacggttagcttcacgactgttggtggcagtagcgtacgacttagctatagttccggacttacccttaagcgatttaaatctgcggttaccgaattcgagctcggtacctagtacccttgtacttttggtttcacctgcatagagaaaacccacaagaatatgacagtctgatttgtcagtctcattctcaagcaacatttctctatccgttactttcatggtgaataacacaatccatcatcaatactttgtgttactcagaaactgaaagttattccgagtcttgcatatctttggacctactcgtttttctaccattattgctgattgttaagctctcgctacttgaatcggcattgttggagtgggaaggttcaaaaaattggagttatgactagttgtctctttctatgtacgatggagaaaatgaataaacaactgagaaaatggctcttgtttagttgatgatgctcttaagctttccactggttgccatatatgatttgggcatttcactttgatcttaatgggccttgtaaagcccaagactcatgattatctttagttgatgctcttaattaggtgtgggcaaataattcaaactgtatgtacccgaccaaaaccaaagcaaaaataatcgaaccaaaccgaaaatttaaaaataaccgaatgaaaactaaatcctataactgaaagaactgaaaccgaatcaaaatatttaatgtaaccaaaaatatccgaaatataattatattgtcaaaaatattaataatttctagattaaataattaaaaatacttaaaaatttatataaaatagtaaaaatactcgaaaataaccacaaatattcaaaaacaaccgaaatatcccaaaatattcaaagcaaaataaccgaatggataccaaattttaaaaccgaaaaaactggaacaaaaccaaaatcgaaccaaaatttcaaaaatcgaataaatactaaactttagaacaaaaaaaaacgataaccgaatgtatacgaaccaaagccgaattagataaccgaacgtccaggactactcttaatctttccgccacttatgatttgggctattactttgtttataatgagccttttcaagctcaagttcatgattgtccgtgagatgagaaactgacttgttggattcgaaaccctagctagtattggttaatacttaatacataaatgacctgcattgacatcatcatccaagaaaataaaaattgtatgcttgagatatttagttttcctagctaggttttctttattttagtaccgaatctttaggtgtgccacgttaatttagacccattttttcatacttaccaactgagtctagtttaatcatgactataatcgtataaaatgattcagtcgacgtcattgcgaacgtatataaaatcatccaaattgacgtcattccaaagaggtaagcatgcttatctaagagtccgagcatactaaacaagacgacattttatttgcactccaaatcaaattttgtattgcctaaagaaaaacaatcaaactcaagtttcttaaaattaatttcattcaaactaatcactttcaatatctcacatattattcatgccatttctatttgtctaaacatgatttaaaaaaaaaagtaaaatacaaagattactatgcaaaaactctataaaaaaaaattcaaatttcttatttatttgtgacatcaaattttcaaaataatttttttaattatcggttgatccggtcagtcgataaaaacataaactttcagcgaccgttaaaactttcctactaccgatttagagaaaatcttagcttgaaacgtaattgtaacctgccttcatgcaagtcgcaagatatgtcatcctaagttgtatatgttttctcaaaagatgtatttacttgagaaaatacgtttcaacgttgatggacaaccaattaagaatcaagcacctttcgtaatcaatttaggcttatcgtctaaggtatactgatttacgacagttgactagacttataaggaacaaaataatagaatagtttctaaacacttcacctaatcatagagactaagatggtaattcgtaaacgacaaagcctagtgacactgtccattgtaaaattccacatcatattagtattaaacatatacatgtagtttcctgaacacatgtagtatcaaacacacttcgtggcttcttcctcgaaacctgcggccgcgctatagttccggacttacccttaagataacttcgtatagcatacattatacgaagttatgggcccacgcgtgaagagcggttaccagagctggtcacctttgtccaccaagatggaactgtcttcggccagaatggccatctggattcagcaggcctagaaggccatttatcgctatcaactttgtatagaaaagttgggccgaattcgagctcggtacggccagaatggcccggaccgaagcttctaactaactagctagagtctacgtgtaagccaaacactctttaaacccgctttaccaatatattggagttgtttaatgataaaggtggaaaaccgaagctacaatttctgaagtgaatccttccaaacatggccttaattaaattgtttgggagtacggttttttttacgatttctagacaatgtcatgttttttagtaatattatagtattttatgttataaaaggtttcgttcaattcctaaaaactatgtttttaaaatcaagatattatagataccatgatatttttacagtattgaaaattttgctctactctaaagtcttcatgacatgactaacctttgccgaatactatggcctacaattttacatataaataattacagagaacaatattgtaaaaccgtatttttgagaaatattggtgccaaacagagccttgagttgagaagctgatacattcggttcggccctgcaattccagacagatggttctggttgcagctcaaattctttggctggaagaagggcgcacgtcgctgtctctgatgagcaggctttagttggatcaaggtcgctgttgctcggtttatatggtccagtctaaatccgtctactgcttctatgcccaaaaaaagatcgatccactctctcgtaggatttgtttttgggaaggaaaaaaaaacaattcatatgccttgagtggaaaaaaatcgaaatggaaatgaaaggcttgctaattatcaaaggacattagctaagctctgcacatcactctaagtctttacccctactagtactacctaaggtattaaaaaaggagaataaaaaccaaaagcaaaaaaagaagaagaagaaaacttgtggccagggttgctttggcagcgtaacgttaacgacggccacaagttggggtggggtgggtggtgtgggccccgccgcaggatctttctgggcctcgaagctggccgcgtgacgtggcgccgaaaaagcgcagcgagaaatacttgtggccacgctttttgcggccacggatattcttcttttctttccctgcacaagcacagcacagcacggtgcacttcctatattattttacttttctgttacaaaaaaagagaggaaatgctcttggaatttcttgtggacacgacacagctaggaatttatccttctttcttgttcgtttcctttttcttatctagtaacgagaaaaccgtccgggtttatccgcggaaaaaatatctgctatttgaacggccgcagatatttgcggtgttttctcttttattttctctacgctgcttcgtgccctattgtcaacacgtggaaaccttcctatccactccaatcacttcactccacttctcaaattttcagaacaaacttctaaatttataatgaggctcaatgaaatatttaatttcgatacaatgctatagataaacaaaaccaccctgagaaattggggaaaaaaaagagaaagagaccctctatctcaaaagggaaaacagaggggtcagaacgtaaaatatccgcagagggcggaggtgggccctcccctcccggggcctccccagccactcgatccctggcccttctcgaaatttccagccctgacaggcggggcccacggccgacgtggcccgcctcccctcccctcccttcgcccccagaaatctcgccgctcccacccctctccttcctctcgccatttccatttccttgcccttgccagccagagcgagactccaccgcttcctctccgccgcgtcctcctcccctccctccgttcctcacggctctccggactcgccccgcggctggccgtgctgagtttcgttctctggccggcaaagaagcgatttttttgtgctttctggacggatcccggccggagaagggaccgaatttccacgacctcgaccgccggctgctcctctgctgggctctccgtgcgcaagaagagcctaccaaggtgaatccggagatttcagctccgggcccgcccctcccgggggatctcgactctagaggatcgctcaggaaggccgctgagatagaggcatggcggccaatgcgggcggcggtggagcgggaggaggcagcggcagcggcagcgtggctgcgccggcggtgtgccgccccagcggctcgcggtggacgccgacgccggagcagatcaggatgctgaaggagctctactacggctgcggcatccggtcgcccagctcggagcagatccagcgcatcaccgccatgctgcggcagcacggcaagatcgagggcaagaacgtcttctactggttccagaaccacaaggcccgcgagcgccagaagcgccgcctcaccagcctcgacgtcaacgtgcccgccgccggcgcggccgacgccaccaccagccaactcggcgtcctctcgctgtcgtcgccgccgccttcaggcgcggcgcctccctcgcccaccctcggcttctacgccgccggcaatggcggcggatcggctgtgctgctggacacgagttccgactggggcagcagcggcgctgccatggccaccgagacatgcttcctgcaggactacatgggcgtgacggacacgggcagctcgtcgcagtggccacgcttctcgtcgtcggacacgataatggcggcggccgcggcgcgggcggcgacgacgcgggcgcccgagacgctccctctcttcccgacctgcggcgacgacggcggcagcggtagcagcagctacttgccgttctggggtgccgcgtccacaactgccggcgccacttcttccgttgcgatccagcagcaacaccagctgcaggagcagtacagcttttacagcaacagcaacagcacccagctggccggcaccggcaaccaagacgtatcggcaacagcagcagcagccgccgccctggagctgagcctcagctcatggtgctccccttaccctgctgcagggagtatgtgagagcaacgcgagctgccactgctcttcactgatgtctctggaatggaaggaggaggaagtgagcatagcgttggtgcgttgctgtcaagggcgaattcacatggttaacctagacttgtccatcttctggattggccaacttaattaatgtatgaaataaaaggatgcacacatagtgacatgctaatcactataatgtgggcatcaaagttgtgtgttatgtgtaattactagttatctgaataaaagagaaagagatcatccatatttcttatcctaaatgaatgtcacgtgtctttataattctttgatgaaccagatgcatttcattaaccaaatccatatacatataaatattaatcatatataattaatatcaattgggttagcaaaacaaatctagtctaggtgtgttttgcgaatgcggccgccaccgcggtggagctcgaattccggtccgggcctagaaggccagcttcaagtttgtacaaaaaagcaggctccggccagaatggcccggaccgggttaccgaattcgagctcggtaccatttaaattgcgcccgccacggccgtggaggtcgtattccggtcagcttgcatccctgcagtgcagcgtgacccggtcgtgcccctctctagagataatgagcattgcatgtctaagttataaaaaattaccacatattttttttgtcacacttgtttgaagtgcagtttatctatctttatacatatatttaaactttactctacgaataatataatctatagtactacaataatatcagtgttttagagaatcatataaatgaacagttagacatggtctaaaggacaattgagtattttgacaacaggactctacagttttatctttttagtgtgcatgtgttctcctttttttttgcaaatagcttcacctatataatacttcatccattttattagtacatccatttagggtttagggttaatggtttttatagactaatttttttagtacatctattttattctattttagcctctaaattaagaaaactaaaactctattttagtttttttatttaataatttagatataaaatagaataaaataaagtgactaaaaattaaacaaataccctttaagaaattaaaaaaactaaggaaacatttttcttgtttcgagtagataatgccagcctgttaaacgccgtcgacgagtctaacggacaccaaccagcgaaccagcagcgtcgcgtcgggccaagcgaagcagacggcacggcatctctgtcgctgcctctggacccctctcgagagttccgctccaccgttggacttgctccgctgtcggcatccagaaattgcgtggcggagcggcagacgtgagccggcacggcaggcggcctcctcctcctctcacggcaccggcagctacgggggattcctttcccaccgctccttcgctttcccttcctcgcccgccgtaataaatagacaccccctccacaccctctttccccaacctcgtgttgttcggagcgcacacacacacaaccagatctcccccaaatccacccgtcggcacctccgcttcaaggtacgccgctcgtcctcccccccccccctctctaccttctctagatcggcgttccggtccatgcatggttagggcccggtagttctacttctgttcatgtttgtgttagatccgtgtttgtgttagatccgtgctgctagcgttcgtacacggatgcgacctgtacgtcagacacgttctgattgctaacttgccagtgtttctctttggggaatcctgggatggctctagccgttccgcagacgggatcgatttcatgattttttttgtttcgttgcatagggtttggtttgcccttttcctttatttcaatatatgccgtgcacttgtttgtcgggtcatcttttcatgcttttttttgtcttggttgtgatgatgtggtctggttgggcggtcgttctagatcggagtagaattctgtttcaaactacctggtggatttattaattttggatctgtatgtgtgtgccatacatattcatagttacgaattgaagatgatggatggaaatatcgatctaggataggtatacatgttgatgcgggttttactgatgcatatacagagatgctttttgttcgcttggttgtgatgatgtggtgtggttgggcggtcgttcattcgttctagatcggagtagaatactgtttcaaactacctggtgtatttattaattttggaactgtatgtgtgtgtcatacatcttcatagttacgagtttaagatggatggaaatatcgatctaggataggtatacatgttgatgtgggttttactgatgcatatacatgatggcatatgcagcatctattcatatgctctaaccttgagtacctatctattataataaacaagtatgttttataattattttgatcttgatatacttggatgatggcatatgcagcagctatatgtggatttttttagccctgccttcatacgctatttatttgcttggtactgtttcttttgtcgatgctcaccctgttgtttggtgttacttctgcaggtcgactctagaggatccatggccactgtgaacaactggctcgctttctccctctccccgcaggagctgccgccctcccagacgacggactccacactcatctcggccgccaccgccgaccatgtctccggcgatgtctgcttcaacatcccccaagattggagcatgaggggatcagagctttcggcgctcgtcgcggagccgaagctggaggacttcctcggcggcatctccttctccgagcagcatcacaaggccaactgcaacatgatacccagcactagcagcacagtttgctacgcgagctcaggtgctagcaccggctaccatcaccagctgtaccaccagcccaccagctcagcgctccacttcgcggactccgtaatggtggcttcctcggccggtgtccacgacggcggtgccatgctcagcgcggccgccgctaacggtgtcgctggcgctgccagtgccaacggcggcggcatcgggctgtccatgattaagaactggctgcggagccaaccggcgcccatgcagccgagggtggcggcggctgagggcgcgcaggggctctctttgtccatgaacatggcggggacgacccaaggcgctgctggcatgccacttctcgctggagagcgcgcacgggcgcccgagagtgtatcgacgtcagcacagggtggagccgtcgtcgtcacggcgccgaaggaggatagcggtggcagcggtgttgccggcgctctagtagccgtgagcacggacacgggtggcagcggcggcgcgtcggctgacaacacggcaaggaagacggtggacacgttcgggcagcgcacgtcgatttaccgtggcgtgacaaggcatagatggactgggagatatgaggcacatctttgggataacagttgcagaagggaagggcaaactcgtaagggtcgtcaagtctatttaggtggctatgataaagaggagaaagctgctagggcttatgatcttgctgctctgaagtactggggtgccacaacaacaacaaattttccagtgagtaactacgaaaaggagctcgaggacatgaagcacatgacaaggcaggagtttgtagcgtctctgagaaggaagagcagtggtttctccagaggtgcatccatttacaggggagtgactaggcatcaccaacatggaagatggcaagcacggattggacgagttgcagggaacaaggatctttacttgggcaccttcagcacccaggaggaggcagcggaggcgtacgacatcgcggcgatcaagttccgcggcctcaacgccgtcaccaacttcgacatgagccgctacgacgtgaagagcatcctggacagcagcgccctccccatcggcagcgccgccaagcgcctcaaggaggccgaggccgcagcgtccgcgcagcaccaccacgccggcgtggtgagctacgacgtcggccgcatcgcctcgcagctcggcgacggcggagccctggcggcggcgtacggcgcgcactaccacggcgccgcctggccgaccatcgcgttccagccgggcgccgccagcacaggcctgtaccacccgtacgcgcagcagccaatgcgcggcggcgggtggtgcaagcaggagcaggaccacgcggtgatcgcggccgcgcacagcctgcaggacctccaccacctgaacctgggcgcggccggcgcgcacgactttttctcggcagggcagcaggccgccgccgctgcgatgcacggcctgggtagcatcgacagtgcgtcgctcgagcacagcaccggctccaactccgtcgtctacaacggcggggtcggcgacagcaacggcgccagcgccgtcggcggcagtggcggtggctacatgatgccgatgagcgctgccggagcaaccactacatcggcaatggtgagccacgagcaggtgcatgcacgggcctacgacgaagccaagcaggctgctcagatggggtacgagagctacctggtgaacgcggagaacaatggtggcggaaggatgtctgcatgggggactgtcgtgtctgcagccgcggcggcagcagcaagcagcaacgacaacatggccgccgacgtcgggcatggcggcgcgcagctcttcagtgtctggaacgacacttaagcgtacgtgccggcctggctctccgaaagggcgtattccagcacactggcggccgttactagacccaacctagacttgtccatcttctggattggccaacttaattaatgtatgaaataaaaggatgcacacatagtgacatgctaatcactataatgtgggcatcaaagttgtgtgttatgtgtaattactagttatctgaataaaagagaaagagatcatccatatttcttatcctaaatgaatgtcacgtgtctttataattctttgatgaaccagatgcatttcattaaccaaatccatatacatataaatattaatcatatataattaatatcaattgggttagcaaaacaaatctagtctaggtgtgttttgcgaatgcggcctccgggcacccagctttcttgtacaaagtggccgttaacggatcggccagaatggcccggaccgggttaccgaattcgagctcggtaccctggttcacaaactcaatacaacacacagtggagtagggtattacgctccggcggcccgaaccactctaaatccttgtgtcctcgtgtgctcttccaccattaatgactgtaattgcagggacacgaagagttgtagcgcttttgccaacaagatccgctatatgctagtagagtggaacctgcacagcaacaagcatccaataatctgagaataagaattatgtgtggtgatggttctcatctctgcaactcgccattttcgcgagagaaccaaatccaagttggtgaagatcatgatttgggctcatgggctggcatagtagctattacctttgcaattgtggttcgaatctatccgatattctccttttcagggagagctaatgcttatgcttattgggtattttggtttgacactgcttcacgcccaaaaaaaggcaactatgtctgagttggatatggcccaaaaaaaggcagctatgtctgagttggatatggaagtcttctttcgtttagggtgaagtaagaccaagctcatgagcttattatcttaggtcggaacaaattagttgataggcatggcacatttatcaaattataatgattttaacagaaaagcaacacctctttttcagcagcaccagctttgcaagctgcaattgacactccaagcatagtatttgctccaaactcagcctgcatttcgcacaatatcatatctatttccatttggataaaatatattttccagaaatatgggaacagaatcaagatacagaaaaaagttgtggtagtagtggtaagtggaaacacaagtacagtgaaaagatagcattatttctgaacagtcaaattaaccgaaataagtagtatcacatactgcccctaaattgactacacccaatgtaaagaattgcttgagcatattgagccatcagttgtttgtttgtgtaacggatttgacaatgcagagttcaggagcaaaaaaccgcaaaggagagaaagagggaaaggatctcctagtatcccaccttgtggcgcgccctgtcaagtgcatgatggcctggtcgatctgcgtctgctgctgcggttccatcccaacgagtgcctccgacaccttgtcgttgatcacccgcaccgcgtaggcgacccccctggcgaggaacttccgcctctcggaggccccggccgcgtcggcggcggcgccctcgagcgcgcccacgctagccgtagatgctcggtgcacggccttgttggtgtgcaactcgacctcaacggccggtgcgctacgcccgtcaaggatctggcgcgcccgcaccctcgtgatcacggtgggcgcctcccgcctcatgtggccgacgatgaaaagcgccgggttaggggccttggcgcgcaccgccgtattcagggcctcctcgctcttgcgcgagagcaggtgcttccccaggtactcctgcactgacaaggctgccacagcggtggaatttgtcctcacgacttcgccacgtcgtcctcacctccctggcttcccacgactccgccgtatcgaggtgctcggtgggtcgtcttaatccgaagtccgaactaggaagacgagacagagaggtctgaggaatgggcctcgtttgatgttgagctgaattatttttccagcataagcccaggtcttggtccatgaacaaaattactagaaacccagcccagtactacgatctaaaagagggactgccactggatagctctctctagcattctccacgctccaatacagcggcgtcgtgtctatccgggtctatccgcgaacacgtgagaactctccagaaactgctttctcctccacttcatctctctcgctttccctctataaaaagaccccttctaggaattgagggagacagcaagcaccaagcagcgatccgaagctcaatcaattcactcaaacctcttccccaaatcttcgattagatcttcgttgacaagaagactagaaccgaacctgacatgtccaacctgctcacggttcaccagaaccttccggctcttccagtggacgcgacgtccgatgaagtcaggaagaacctcatggacatgttccgcgacaggcaagcgttcagcgagcacacctggaagatgctgctctccgtctgccgctcctgggctgcatggtgcaagctgaacaacaggaagtggttccccgctgagcccgaggacgtgagggattaccttctgtacctgcaagcgcgaggtttgtttctgcttctacctttgatatatatataataattatcattaattagtagtaatataatatttcaaatatttttttcaaaataaaagaatgtagtatatagcaattgcttttctgtagtttataagtgtgtatattttaatttataacttttctaatatatgaccaaaacatggtgatgcctaggtctggcagtgaagaccatccagcaacaccttggacaactgaacatgcttcacaggcgctccggcctcccgcgccccagcgactcgaacgccgtgagcctcgtcatgcgccgcatcaggaaggaaaacgtcgatgccggcgaaagggcaaagcaggccctcgcgttcgagaggaccgatttcgaccaggtccgcagcctgatggagaacagcgacaggtgccaggacattaggaacctggcgttcctcggaattgcatacaacacgctcctcaggatcgcggaaattgcccgcattcgcgtgaaggacattagccgcaccgacggcggcaggatgcttatccacattggcaggaccaagacgctcgtttccaccgcaggcgtcgaaaaggccctcagcctcggagtgaccaagctcgtcgaacgctggatctccgtgtccggcgtcgcggacgacccaaacaactacctcttctgccgcgtccgcaagaacggggtggctgcccctagcgccaccagccaactcagcacgagggccttggaaggtattttcgaggccacccaccgcctgatctacggcgcgaaggatgacagcggtcaacgctacctcgcatggtccgggcactccgcccgcgttggagctgctagggacatggcccgcgccggtgtttccatccccgaaatcatgcaggcgggtggatggacgaacgtgaacattgtcatgaactacattcgcaaccttgacagcgagacgggcgcaatggttcgcctcctggaagatggtgactgaggtacccaacctagacttgtccatcttctggattggccaacttaattaatgtatgaaataaaaggatgcacacatagtgacatgctaatcactataatgtgggcatcaaagttgtgtgttatgtgtaattactagttatctgaataaaagagaaagagatcatccatatttcttatcctaaatgaatgtcacgtgtctttataattctttgatgaaccagatgcatttcattaaccaaatccatatacatataaatattaatcatatataattaatatcaattgggttagcaaaacaaatctagtctaggtgtgttttgcgatccgatatcgaattggccacggtaccagctgctgctgttctagggttcacaagtctgcctatttgtcttccccaatggagctatggttgtctggtctggtccttggtcgtgtcccgtttcattgtgtactatttacctgtaatgtgtatccttaagtctggtttgatggtgtctgaaacgttttgctgtggtagagcagcatggaagaactataatgaataagtgatccctaatcattgtgtccaaattttgcttctgctatacccttttgtgctgtttcttatgttttgcttaaaaatttgatctgacaaacaaatttgtctaaattatgctcttgttctgactgtgtactgtacacatttgtattgctaccggtttggcacatagttttctctttgattgcagatcaaacccttctgattgcagattgcttggctatggctgatgtgctcactgttcttctttagcttgtatattgctgatggtggcttggctacggctgaaaaagttgctgctgcgccgacttggcaactgttgctccagtaatgctttgtcctctcttcctagccgccgacttggcacttggcagctgttgctcctgtaatgcgttgttatctcttatctcttgagatgtactatgattttgaggctgtttgacttgtgccagattgccagtgctgatgctatattatctcaggtttttatgctagtatatgttttactgtgtgctgcctgtgtcgagttacgtaatctattgaaccgctatgcgtgttgatgccctgttgttgcttgccagattgatgcccctgttgcttgcagcttgcaagctgtagtgaaatcctaaaattccaaaccaaatctattctgaacttttgaagatctgtgatgtccggaagaaaagattcaaacagataaacgggactctccagaatctataaaataaatgatcgacaaacgctttgctttggtaggcttcaagcttggtcacccggtccgggcctagaaggccagcttcggccgccccgggcaactttattatacaaagttgatagataaatcagatatctggttcctaaggacccggcggaccgattaaactgattcggtccgacgcgttacctaataacttcgtatagcatacattatacgaagttattagctaactaactagtaagcttaagccatgggtcgacggatccgttaactagcgtggcatttggcaccgccgcacactatgcgagctaggagtgctagtttacagatgaaactatgaaaccaagaaaacacaattgtccgtagctagcgcgtggcgtcgtgtcaagcttcacacagtatcttcgttcttcactataaatcgcgcctgttgttcgtgagacccaccaccgtggataacagtcccctaataataagcgatcaacagcactgctgatggctgaacaccgaggcgccgccgcgcgtaaccatccgccggagcagcccgtcgtgccggcgaacgacgccttccccgaccgcgcccagcagctctgcctcgacgccgggcgcgcgctcgcgatgtgcggcgtgctcgtcgccgtccctcccgcattttacgcgtcgacgtcgcggacgacaccgcacttgccttcgtcggcttcgtcctctggatcatcggtgcgtggctgtgcctcctggcgctcacgcccttggctccacgggcggtgagggcgggcggggccgccgccagcaccttgctgatcaggtgcctgtccctttcatgaactactagcgcccgcgcccgcggccgccgggcacaagagaacacatcgatgttcgctgcgtacgtcagcaataaggcactctttgtcagtagtcgagtgcatatgttgggtgtttgccctgggagatttcaagtgttgtggccattatcccgcaggataaaaaatcggcggcttttggattgatacggaaaataacgatgtttcatgctcgtgttgtgtgtgtgacatcttgtcagccaagtttttaaccgttgctactccccctctgtgggctcagtgtgtggaccggaatacgtcgtacataggccgtagcctaagcccaatatgccgtttttcaggttggcctgtgtgacgacaagcgggtctcaaaagcccatcacgcaactggcctgcaattattggaggagagcgcgtcgagttggttccagaggctgcgtggtggggccggactctgcgacgacctctcgttcgcgtccgatttggttgccgtgagccgtgacgtaacgcctccttccgttcctccctatataagttccacccccgggtccggtttccccaagccccagtgacccccgatcccgatcgcgaaatctccgcacccgccggcaagggaccgaagcaagcctctctcccgaccgtcgcatcaaggtacgcgtccgctcgatctgtcctcttccttctcgatttgacttgctgtggtgcccgatcacgggatcagaatcgcaccagtgtagatttcgcatgttctaagatgtgttagtttccaggctaatccagttctcttgacgcccgatccgatcgagctccgtgtttatttcagcctaatcgtagtattcccctaaaatttcctcattagggggttcgcaagattgttggtcgacaggttcacttatgctcgatcgcttacttttagtcgattcatgctgcgtactattgttgccccccgtggttttatcttttctcgtgtgaaatccagtagatatagtagatatcgtagcattaggttttaattcaatcgattgattattgtatcatcaaaattgagaagttcgaatcatgcctatcatgctgcctcaaccgaaatcctgtatattgaagtttcaattcaattgattgatcattcattagattcaaccaaaatctagaaggttagatgacgcatgtcatgctgcctgcgtagtttacctttgatctgtttatgattaccttatcagtaggatatttgtgattttgggaagtagcactaactgattcatgctgacatgatgttccctttcagattatactgttgagtcctatctaattgatgctttgtatgctatatgaatacgtcatggtaaattagcagttaattagcatattagcaattgggcgtacctcatcaggattgctcttgtagatgtgtgtggtgatgtttcttgttcaattcatgttctgctttaaaagtatgtgttctctgtttgttaattaagattcatggttataatgatttggacctaattaatcagggttgcccttttagatgcgtggttacttgttgagttcatttttttcctgctatagttgtatgcgtttgttcattcatggttagatttgatttgtttcttctctattccatgccttccatatacttcaattgtagcttaacatgagatttctgtatatgcaggtcgaccgccggggatccacacgacaccatggcccagtccaagcacggcctgaccaaggagatgaccatgaagtaccgcatggagggctgcgtggacggccacaagttcgtgatcaccggcgagggcatcggctaccccttcaagggcaagcaggccatcaacctgtgcgtggtggagggcggccccttgcccttcgccgaggacatcttgtccgccgccttcatgtacggcaaccgcgtgttcaccgagtacccccaggacatcgtcgactacttcaagaactcctgccccgccggctacacctgggaccgctccttcctgttcgaggacggcgccgtgtgcatctgcaacgccgacatcaccgtgagcgtggaggagaactgcatgtaccacgagtccaagttctacggcgtgaacttccccgccgacggccccgtgatgaagaagatgaccgacaactgggagccctcctgcgagaagatcatccccgtgcccaagcagggcatcttgaagggcgacgtgagcatgtacctgctgctgaaggacggtggccgcttgcgctgccagttcgacaccgtgtacaaggccaagtccgtgccccgcaagatgcccgactggcacttcatccagcacaagctgacccgcgaggaccgcagcgacgccaagaaccagaagtggcacctgaccgagcacgccatcgcctccggctccgccttgccctccggactcagatctcgatagagtcaacctagacttgtccatcttctggattggccaacttaattaatgtatgaaataaaaggatgcacacatagtgacatgctaatcactataatgtgggcatcaaagttgtgtgttatgtgtaattactagttatctgaataaaagagaaagagatcatccatatttcttatcctaaatgaatgtcacgtgtctttataattctttgatgaaccagatgcatttcattaaccaaatccatatacatataaatattaatcatatataattaatatcaattgggttagcaaaacaaatctagtctaggtgtgttttgcgaattgcggcgcccttactttaacgcctctaaccaacacccctttatctttataaggaacaataaacagaatttgccccactgttctaaatcacctaataatatccccagctaaaaacaataaaggtttcctagaattaagacaagcatgactgttcctccaggagggtttggaacattgttgcagtcttgcagatacgggcgaagggtgagaaacagagcggagggctggaggtgacctcggtagtcgacgccggagttgagcttgacaacgacggggcggcccctgatggacttgaggaagtccgatggcgtcttcaccgtcccgccggcgcccgaggcgggcctgtcgctgccgccgccgccgctgctcatcttgcgcgctgtgcccccggcggtgtccctgtgttgcggatcgcgggtgggccaggtggatgcgagggcgacccgtttggactccggccggagccgccggatccctggtcggtgtcagtgccgtttactctgggccccacgtgtcagtaccgtctgtagatgacaacaacccgtcgtccacagtcatgtccaaaatatcctttcttcttttttttcgattcggatatctatcttccttttttttttccaaaaatcttcttgacgcaccagcgcgcacgtttgtggtaaacgccgacacgtcggtcccacgtcgatagaccccacccaccagtgagtagcgtgtacgtattcgggggtgacggacgtgtcgccgtcgtcttgctagtcccattcccatctgagccacacatctctgaacaaaaaaaaggagggaggcctccacgcacatccccctccgtgccacccgccccaaaccctcgcgccgcctccgagacagccgccgcaaccatggccaccgccgccgccgcgtctaccgcgctcactggcgccactaccgctgcgcccaaggcgaggcgccgggcgcacctcctggccacccgccgcgccctcgccgcgcccatcaggtgctcagcggcgtcacccgccatgccgatggctcccccggccaccccgctccggccgtggggccccaccgagccccgcaagggtgctgacatcctcgtcgagtccctcgagcgctgcggcgtccgcgacgtcttcgcctaccccggcggcgcgtccatggagatccaccaggcactcacccgctcccccgtcatcgccaaccacctcttccgccacgagcaaggggaggcctttgccgcctccggctacgcgcgctcctcgggccgcgtcggcgtctgcatcgccacctccggccccggcgccaccaacctagtctccgcgctcgccgacgcgctgctcgattccgtccccatggtcgccatcacgggacaggtggcgcgacgcatgattggcaccgacgccttccaggagacgcccatcgtcgaggtcacccgctccatcaccaagcacaactacctggtcctcgacgtcgacgacatcccccgcgtcgtgcaggaggctttcttcctcgcctcctctggtcgaccagggccggtgcttgtcgacatccccaaggacatccagcagcagatggcggtgcctgtctgggacaagcccatgagtctgcctgggtacattgcgcgccttcccaagccccctgcgactgagttgcttgagcaggtgctgcgtcttgttggtgaatcgcggcgccctgttctttatgtgggcggtggctgcgcagcatctggtgaggagttgcgacgctttgtggagctgactggaatcccggtcacaactactcttatgggcctcggcaacttccccagcgacgacccactgtctctgcgcatgctaggtatgcatgggacggtgtatgcaaattatgcagtggataaggccgatctgttgcttgcacttggtgtgcggtttgatgatcgcgtgacagggaagattgaggcttttgcaagcagggctaagattgtgcacgttgatattgatccggctgagattggcaagaacaagcagccacatgtgtccatctgtgcagatgttaagcttgctttgcagggcatgaatgctcttcttgaaggaagcacatcaaagaagagctttgactttggctcatggaacgatgagttggatcagcagaagagggaattcccccttgggtataaaacatctaatgaggagatccagccacaatatgctattcaggttcttgatgagctgacgaaaggcgaggccatcatcggcacaggtgttgggcagcaccagatgtgggcggcacagtactacacttacaagcggccaaggcagtggttgtcttcagctggtcttggggctatgggatttggtttgccggctgctgctggtgcttctgtggcaaacccaggtgtcactgttgttgacatcgatggagatggtagctttctcatgaacgttcaggagctagctatgatccgaattgagaacctcccagtgaaggtctttgtgctaaacaaccagcacctggggatggtggtgcagttggaggacaggttctataaggccaacagagcgcacacatacttgggaaacccagagaatgaaagtgagatatatccagatttcgtgacgatcgccaaagggttcaacattccagcggtccgtgtgacaaagaagaacgaagtccgcgcagcgataaagaagatgctcgagactccagggccgtacctcttggatataatcgtcccacaccaggagcatgtgttgcctatgatccctagtggtggggctttcaaggatatgatcctggatggtgatggcaggactgtgtactgactagctagtcagttaacagatctgccagatcctcggtgtacaaataacccgtcttatcctatgagacgggccggcgtcagtgtgttctggaggaatttttatgtcagagcctttttctttgtgtgcttgatgtagatgccaagggaagcttattggctgttgaagcttgatgcaaaataaattatggaactctgttttttgtttatctaataataactagcaaatatgcttccattgcattgaaactaacagccttttgtgtttccaagttttattttgtgacaatgtcatctatttcaattagttgtggaatcggaaacttgcaggactaacttggaaactccaatccctcagcatcctggactttttcctggtgtaatccatgtagatattattttaatcatcattttagttctggaggtttttccatctccggttttgctcccctttcttcaaaaaaaaaaaaaaaatgccgtaggcgccgcaacgcccacctgttgttcaaactcatgggcacgagtggctcgaagattttatacaacaattgctgtagtttcaccgttgctggtgaagaagcatttttttaaaaaaatatagtggtattcattttaattagtttagttgtgcagcgagcaaaatttggacatgctctgctcggaatctgatcgacctagacacagattagcagcagtagctttgtcatctgttccaagagttgcgatctgatagaagaaaaaaaaaccttcccttcaatgtaaaaccgaaactaacaagaaagaagcacagtgccgtttaggcaagtatggagtacgtattaagcatgtagaaggccatgcatgaaccactaacaagaaagaagcgcagtgccattcaggcaagcataagcatgtagattggcatgcatgaacaactaacagtagatcgtctctggtctgattagaagttttttgggaagccaagaaatcatgtacaactggttccatctcaaattccgtggcaaaaagaggcctaagcaacatacctcgagtagatcacattcaagcttggtcacccggtccgtcaatattctgattccgatgacttcgtaggttcctagctcaagccgctcgtgtccaagcgtcacttacgattagctaatgattacggcatctaggaccgactagtggcgcgccgactagctagctaaggtaccgagctcgaattcattccgattaatcgtggcctcttgctcttcaggatgaagagctatgtttaaacgtgcaagcgctactagacaattcagtacattaaaaacgtccgcaatgtgttattaagttgtctaagcgtcaatttgtttacaccacaatatatcctgcca

SEQ ID NO: 74 - DNA, 20874 bp, Artificial sequence
  PHP96751
gtttacccgccaatatatcctgtcaaacactgcggccgcacttgaccgcggatggagccggagctgtggtgaggccatcgacgggaggtgggggagaacacagtctcagtgttctttgtgagtccgcaaggtttttagcttttctgtattaattaaggttgctgttggctgtagaatacggtcgtggaagagctgtatcggtagctactacgtaagctattatatactggaagtctggagctcgtcgatctccggtcgtcttcctccatttctcctcgtcttgctttgactgctgctaccatttgcttctgttttctgatgaagcatgccatgtcggccaccagtgtttgtgtggtttttgcagggaatggctttcaagtgctgtgattgaatggccctcgtcgtcctcggctgagctcacatggacgcgtcatgtgagtgagatatatgatcatatgatgagtggggttcgggtgagtgcgtacttgaagtaggatcccgctttcactcattcattcattggcctttaaaccgggaaattttcgcgaggagatggagggaagcaagcagggtgacgagtgcagagtgccgcgagcgctttgtcaaaaggcaccgccgtaggcaaaaaaatcaatggccctgactgactcgatggtagtactactgtagagactagagagggttgctccccatatcttcgtgtgacttttactccagcattgcatttccgtcattgagacgttaattaatagcagctttcgggacagatgactgtggccatgtttcgtcacggccgcttcgtgccagctgggggtactatagtactgtgattttgttagtaaaaactttcattaggccaccattgacgaccgggccttcgcttttgctgcgctaattaaccatttcccggcgaccgaagggaacatgaacatgccccgacacatgagggcatgaggactagtgttctccctgtcgttcgttgacttgactagtgatagtttaaacgctcttcaactggaagagcggttactaccggttcactagctagctgctaatcgagctagttaccctatgaggtgacatgaagcgctcacggttactatgacggttagcttcacgactgttggtggcagtagcgtacgacttagctatagttccggacttacctagctaataacttcgtatagcatacattatacgaagttatggttaccgccctggccgaagctttccggacttacccttaagcgatttaaatcctgaggcctgcaacactgatagtttaaactgaaggcgggaaacgacaatctgatcatgagcggagaattaagggagtcacgttatgacccccgccgatgacgcgggacaagccgttttacgtttggaactgacagaaccgcaacgattgaaggagccactcagccgcgggtttctggagtttaatgagctaagcacatacgtcagaaaccattattgcgcgttcaaaagtcgcctaaggtcactatcagctagcaaatatttcttgtcaaaaatgctccactgacgttccataaattcccctcggtatccaattagagtctcatattcactcccatggcggccaatgcgggcggcggtggagcgggaggaggcagcggcagcggcagcgtggctgcgccggcggtgtgccgccccagcggctcgcggtggacgccgacgccggagcagatcaggatgctgaaggagctctactacggctgcggcatccggtcgcccagctcggagcagatccagcgcatcaccgccatgctgcggcagcacggcaagatcgagggcaagaacgtcttctactggttccagaaccacaaggcccgcgagcgccagaagcgccgcctcaccagcctcgacgtcaacgtgcccgccgccggcgcggccgacgccaccaccagccaactcggcgtcctctcgctgtcgtcgccgccgccttcaggcgcggcgcctccctcgcccaccctcggcttctacgccgccggcaatggcggcggatcggctgtgctgctggacacgagttccgactggggcagcagcggcgctgctatggccaccgagacatgcttcctgcaggactacatgggcgtgacggacacgggcagctcgtcgcagtggccacgcttctcgtcgtcggacacgataatggcggcggccgcggcgcgggcggcgacgacgcgggcgcccgagacgctccctctcttcccgacctgcggcgacgacggcggcagcggtagcagcagctacttgccgttctggggtgccgcgtccacaactgccggcgccacttcttccgttgcgatccaacagcaacaccagctgcaggagcagtacagcttttacagcaacagcaacagcacccagctggccggcaccggcaaccaagacgtatcggcaacagcagcagcagccgccgccctggagctgagcctcagctcatggtgctccccttaccctgctgcagggagtatgtgagagcaacgcgagctgccactgctcttcactgatgtctctggaatggaaggaggaggaagtgagaacagatcattcgacaaagcagcattagtccgttgatcggtggaagaccactcgtcagtgttgagttgaatgtttgatcaataaaatacggcaatgctgtaagggttgttttttatgccattgataatacactgtactgttcagttgttgaactctatttcttagccatgccaagtgcttttcttattttgaataacattacagcaaaaagttgaaagacaaaaaaaaaaacccccgaacagagtgctttgggtcccaagcttctttagactgtgttcggcgttccccctaaatttctccccctatatctcactcacttgtcacatcagcgttctctttccccctatatctccacgctctacagcagttccacctatatcaaacctctataccccaccacaacaatattatatactttcatcttcaactaactcatgtaccttccaatttttttctactaataattatttacgtgcacagaaacttagcaaggagagagagagcgggaatttaaatgctcggcgttaggcttttagtccgctaggtggctagaccgaggttaggacgctagttcactaggggcctagtggtgttttaagacgtcacggtcaccgcggccgcatcgagcagctggcttgtggggaccagacaaaaaaggaatggtgcagaattgttaggcgcacctaccaaaagcatctttgcctttattgcaaagataaagcagattcctctagtacaagtggggaacaaaataacgtggaaaagagctgtcctgacagcccactcactaatgcgtatgacgaacgcagtgacgaccacaaaactcgagcaacgagatcatgagccaatcaaagaggagtgatgtagacctaaagcaataatggagccatgacgtaagggcttacgcccatacgaaataattaaaggctgatgtgacctgtcggtctctcagaacctttactttttatgtttggcgtgtatttttaaatttccacggcaatgacgatgtgaccgtcgacccactaaaacattgctttgtcaaaagctaaaaaagatgatgcccgacagccacttgtgtgaagcatgagaagccggtccctccactaagaaaattagtgaagcatcttccagtggtccctccactcacagctcaatcagtgagcaacaggacgaaggaaatgacgtaagccatgacgtctaatcccattcgaaacgcgtggaccgaagcttgcatgcctgcagtgcagcgtgacccggtcgtgcccctctctagagataatgagcattgcatgtctaagttataaaaaattaccacatattttttttgtcacacttgtttgaagtgcagtttatctatctttatacatatatttaaactttactctacgaataatataatctatagtactacaataatatcagtgttttagagaatcatataaatgaacagttagacatggtctaaaggacaattgagtattttgacaacaggactctacagttttatctttttagtgtgcatgtgttctcctttttttttgcaaatagcttcacctatataatacttcatccattttattagtacatccatttagggtttagggttaatggtttttatagactaatttttttagtacatctattttattctattttagcctctaaattaagaaaactaaaactctattttagtttttttatttaataatttagatataaaatagaataaaataaagtgactaaaaattaaacaaataccctttaagaaattaaaaaaactaaggaaacatttttcttgtttcgagtagataatgccagcctgttaaacgccgtcgacgagtctaacggacaccaaccagcgaaccagcagcgtcgcgtcgggccaagcgaagcagacggcacggcatctctgtcgctgcctctggacccctctcgagagttccgctccaccgttggacttgctccgctgtcggcatccagaaattgcgtggcggagcggcagacgtgagccggcacggcaggcggcctcctcctcctctcacggcaccggcagctacgggggattcctttcccaccgctccttcgctttcccttcctcgcccgccgtaataaatagacaccccctccacaccctctttccccaacctcgtgttgttcggagcgcacacacacacaaccagatctcccccaaatccacccgtcggcacctccgcttcaaggtacgccgctcgtcctcccccccccccctctctaccttctctagatcggcgttccggtccatgcatggttagggcccggtagttctacttctgttcatgtttgtgttagatccgtgtttgtgttagatccgtgctgctagcgttcgtacacggatgcgacctgtacgtcagacacgttctgattgctaacttgccagtgtttctctttggggaatcctgggatggctctagccgttccgcagacgggatcgatttcatgattttttttgtttcgttgcatagggtttggtttgcccttttcctttatttcaatatatgccgtgcacttgtttgtcgggtcatcttttcatgcttttttttgtcttggttgtgatgatgtggtctggttgggcggtcgttctagatcggagtagaattctgtttcaaactacctggtggatttattaattttggatctgtatgtgtgtgccatacatattcatagttacgaattgaagatgatggatggaaatatcgatctaggataggtatacatgttgatgcgggttttactgatgcatatacagagatgctttttgttcgcttggttgtgatgatgtggtgtggttgggcggtcgttcattcgttctagatcggagtagaatactgtttcaaactacctggtgtatttattaattttggaactgtatgtgtgtgtcatacatcttcatagttacgagtttaagatggatggaaatatcgatctaggataggtatacatgttgatgtgggttttactgatgcatatacatgatggcatatgcagcatctattcatatgctctaaccttgagtacctatctattataataaacaagtatgttttataattattttgatcttgatatacttggatgatggcatatgcagcagctatatgtggatttttttagccctgccttcatacgctatttatttgcttggtactgtttcttttgtcgatgctcaccctgttgtttggtgttacttctgcaggtcgactttaacttagcctaggatccatggccactgtgaacaactggctcgctttctccctctccccgcaggagctgccgccctcccagacgacggactccacactcatctcggccgccaccgccgaccatgtctccggcgatgtctgcttcaacatcccccaagattggagcatgaggggatcagagctttcggcgctcgtcgcggagccgaagctggaggacttcctcggcggcatctccttctccgagcagcatcacaaggccaactgcaacatgatacccagcactagcagcacagtttgctacgcgagctcaggtgctagcaccggctaccatcaccagctgtaccaccagcccaccagctcagcgctccacttcgcggactccgtaatggtggcttcctcggccggtgtccacgacggcggtgccatgctcagcgcggccgccgctaacggtgtcgctggcgctgccagtgccaacggcggcggcatcgggctgtccatgattaagaactggctgcggagccaaccggcgcccatgcagccgagggtggcggcggctgagggcgcgcaggggctctctttgtccatgaacatggcggggacgacccaaggcgctgctggcatgccacttctcgctggagagcgcgcacgggcgcccgagagtgtatcgacgtcagcacagggtggagccgtcgtcgtcacggcgccgaaggaggatagcggtggcagcggtgttgccggcgctctagtagccgtgagcacggacacgggtggcagcggcggcgcgtcggctgacaacacggcaaggaagacggtggacacgttcgggcagcgcacgtcgatttaccgtggcgtgacaaggcatagatggactgggagatatgaggcacatctttgggataacagttgcagaagggaagggcaaactcgtaagggtcgtcaagtctatttaggtggctatgataaagaggagaaagctgctagggcttatgatcttgctgctctgaagtactggggtgccacaacaacaacaaattttccagtgagtaactacgaaaaggagctcgaggacatgaagcacatgacaaggcaggagtttgtagcgtctctgagaaggaagagcagtggtttctccagaggtgcatccatttacaggggagtgactaggcatcaccaacatggaagatggcaagcacggattggacgagttgcagggaacaaggatctttacttgggcaccttcagcacccaggaggaggcagcggaggcgtacgacatcgcggcgatcaagttccgcggcctcaacgccgtcaccaacttcgacatgagccgctacgacgtgaagagcatcctggacagcagcgccctccccatcggcagcgccgccaagcgcctcaaggaggccgaggccgcagcgtccgcgcagcaccaccacgccggcgtggtgagctacgacgtcggccgcatcgcctcgcagctcggcgacggcggagccctggcggcggcgtacggcgcgcactaccacggcgccgcctggccgaccatcgcgttccagccgggcgccgccagcacaggcctgtaccacccgtacgcgcagcagccaatgcgcggcggcgggtggtgcaagcaggagcaggaccacgcggtgatcgcggccgcgcacagcctgcaggacctccaccacctgaacctgggcgcggccggcgcgcacgactttttctcggcagggcagcaggccgccgccgctgcgatgcacggcctgggtagcatcgacagtgcgtcgctcgagcacagcaccggctccaactccgtcgtctacaacggcggggtcggcgacagcaacggcgccagcgccgtcggcggcagtggcggtggctacatgatgccgatgagcgctgccggagcaaccactacatcggcaatggtgagccacgagcaggtgcatgcacgggcctacgacgaagccaagcaggctgctcagatggggtacgagagctacctggtgaacgcggagaacaatggtggcggaaggatgtctgcatgggggactgtcgtgtctgcagccgcggcggcagcagcaagcagcaacgacaacatggccgccgacgtcgggcatggcggcgcgcagctcttcagtgtctggaacgacacttaagcgtacctagtggtacctgacatcttatagtctgcaacctctcgtgtctgaattcctatctttatcaagtgttattgcttccacgactataggacagctttcgtcgaaagcttttgctcatgtgatctcgaaggattcatctagtctgatttttcgtgacttgtatcggttttattggattcatccaacatatatcaataaaaaatgagttgtgtttcctttcttcctagttcagttaaaattatttccctcctgcgcttgtgctgtaattgtctgtgtacctgttgtttgtgactgtgttagttcccttggatatgatttcgtatttgatatgtacatggagatagcttagcttcattattggagtatgaagttagtatgacatagtcactctcctggaaaattgacactgcaaaccatatttttattctgaaccacaaatcctagtcagtccgctggcatatgccgtccgtttgctgaatccagaacgtgggtttggagatgtacggctgagatgcctctatgcgaaggggatttcgtggtgaaacgagatgggagtagagcaacgcccgtggaagatgcttcaaacttccacacttttgagcaacgatcggcagtagtaaggtagacgatttcaagatcaaagcatatgaagataaacaacatcaacaacaaaatttgttggggttctatagagagaaacagagctacatacatacactgttttgtatctaccatctgagatgatgaaaagatgaaaaactaaagaatgccccggcgccaacgccaggacacgccgcgcgcgcgtcacccgagccatctcttgacccagccggcgctgtatatttacacacgttgcagcatcgatcaccacctgttcgatcgcgtcgccgtcaccggcgcgccgcgacttattgaactagtctagggcgcggctaacaacctagcttagattgccttgtctaaacccttaggctaacgcgccactctagaaggccgatctccccgggtttaccgagctccaccttgctagttggatattacctcttctcttcaaagtatccttgaacgctcaccggttatcaaatctctacactatagctctgtagtcttgctagatagttagttctttagctctctctagaggttcacaaactcaatacaacacacagtggagtagggtattacgctccggcggcccgaaccactctaaatccttgtgtcctcgtgtgctcttccaccattaatgactgtaattgcagggacacgaagagttgtagcgcttttgccaacaagatccgctatatgctagtagagtggaacctgcacagcaacaagcatccaataatctgagaataagaattatgtgtggtgatggttctcatctctgcaactcgccattttcgcgagagaaccaaatccaagttggtgaagatcatgatttgggctcatgggctggcatagtagctattacctttgcaattgtggttcgaatctatccgatattctccttttcagggagagctaatgcttatgcttattgggtattttggtttgacactgcttcacgcccaaaaaaaggcaactatgtctgagttggatatggcccaaaaaaaggcagctatgtctgagttggatatggaagtcttctttcgtttagggtgaagtaagaccaagctcatgagcttattatcttaggtcggaacaaattagttgataggcatggcacatttatcaaattataatgattttaacagaaaagcaacacctctttttcagcagcaccagctttgcaagctgcaattgacactccaagcatagtatttgctccaaactcagcctgcatttcgcacaatatcatatctatttccatttggataaaatatattttccagaaatatgggaacagaatcaagatacagaaaaaagttgtggtagtagtggtaagtggaaacacaagtacagtgaaaagatagcattatttctgaacagtcaaattaaccgaaataagtagtatcacatactgcccctaaattgactacacccaatgtaaagaattgcttgagcatattgagccatcagttgtttgtttgtgtaacggatttgacaatgcagagttcaggagcaaaaaaccgcaaaggagagaaagagggaaaggatctcctagtatcccaccttgtggcgcgccctgtcaagtgcatgatggcctggtcgatctgcgtctgctgctgcggttccatcccaacgagtgcctccgacaccttgtcgttgatcacccgcaccgcgtaggcgacccccctggcgaggaacttccgcctctcggaggccccggccgcgtcggcggcggcgccctcgagcgcgcccacgctagccgtagatgctcggtgcacggccttgttggtgtgcaactcgacctcaacggccggtgcgctacgcccgtcaaggatctggcgcgcccgcaccctcgtgatcacggtgggcgcctcccgcctcatgtggccgacgatgaaaagcgccgggttaggggccttggcgcgcaccgccgtattcagggcctcctcgctcttgcgcgagagcaggtgcttccccaggtactcctgcactgacaaggctgccacagcggtggaatttgtcctcacgacttcgccacgtcgtcctcacctccctggcttcccacgactccgccgtatcgaggtgctcggtgggtcgtcttaatccgaagtccgaactaggaagacgagacagagaggtctgaggaatgggcctcgtttgatgttgagctgaattatttttccagcataagcccaggtcttggtccatgaacaaaattactagaaacccagcccagtactacgatctaaaagagggactgccactggatagctctctctagcattctccacgctccaatacagcggcgtcgtgtctatccgggtctatccgcgaacacgtgagaactctccagaaactgctttctcctccacttcatctctctcgctttccctctataaaaagaccccttctaggaattgagggagacagcaagcaccaagcagcgatccgaagctcaatcaattcactcaaacctcttccccaaatcttcgattagatcttcgttgacaagaagactagaaccgaacctgacatgtccaacctgctcacggttcaccagaaccttccggctcttccagtggacgcgacgtccgatgaagtcaggaagaacctcatggacatgttccgcgacaggcaagcgttcagcgagcacacctggaagatgctgctctccgtctgccgctcctgggctgcatggtgcaagctgaacaacaggaagtggttccccgctgagcccgaggacgtgagggattaccttctgtacctgcaagcgcgaggtttgtttctgcttctacctttgatatatatataataattatcattaattagtagtaatataatatttcaaatatttttttcaaaataaaagaatgtagtatatagcaattgcttttctgtagtttataagtgtgtatattttaatttataacttttctaatatatgaccaaaacatggtgatgcctaggtctggcagtgaagaccatccagcaacaccttggacaactgaacatgcttcacaggcgctccggcctcccgcgccccagcgactcgaacgccgtgagcctcgtcatgcgccgcatcaggaaggaaaacgtcgatgccggcgaaagggcaaagcaggccctcgcgttcgagaggaccgatttcgaccaggtccgcagcctgatggagaacagcgacaggtgccaggacattaggaacctggcgttcctcggaattgcatacaacacgctcctcaggatcgcggaaattgcccgcattcgcgtgaaggacattagccgcaccgacggcggcaggatgcttatccacattggcaggaccaagacgctcgtttccaccgcaggcgtcgaaaaggccctcagcctcggagtgaccaagctcgtcgaacgctggatctccgtgtccggcgtcgcggacgacccaaacaactacctcttctgccgcgtccgcaagaacggggtggctgcccctagcgccaccagccaactcagcacgagggccttggaaggtattttcgaggccacccaccgcctgatctacggcgcgaaggatgacagcggtcaacgctacctcgcatggtccgggcactccgcccgcgttggagctgctagggacatggcccgcgccggtgtttccatccccgaaatcatgcaggcgggtggatggacgaacgtgaacattgtcatgaactacattcgcaaccttgacagcgagacgggcgcaatggttcgcctcctggaagatggtgactgaggtacccaacctagacttgtccatcttctggattggccaacttaattaatgtatgaaataaaaggatgcacacatagtgacatgctaatcactataatgtgggcatcaaagttgtgtgttatgtgtaattactagttatctgaataaaagagaaagagatcatccatatttcttatcctaaatgaatgtcacgtgtctttataattctttgatgaaccagatgcatttcattaaccaaatccatatacatataaatattaatcatatataattaatatcaattgggttagcaaaacaaatctagtctaggtgtgttttgcgatccgatatcgatgggtctaaaaacggcccctaactaacgcttagttgcccgctagattagtcccccgttagtgcctagttagacacacgacgaactaggggctagcacgcgttagataacttcgtatagcatacattatacgaagttattccggaccgggttaccgaattcctgcccttaaggccaattgttcaagattcattcaacaattgaaacatctcccatgattaaatcagtataaggttgctatggtcttgcttgacaaagtttttttttgagggaatttcaactaaatttttgagtgaaactatcaaatactgattttaaaaaatttttataaaaggaagcgcagagataaaaggccatctatgctacaaaagtacccaaaaatgtaatcctaaagtatgaattgcattttttttttgtttggacgaaaggaaaggagtattaccacaagaatgatatcatcttcatatttagatcttttttgggtaaagcttgagattctctaaatatagagaaatcagaagaaaaaaaaaccgtgttttggtggttttgatttctagcctccacaataactttgacggcgtcgacaagtctaacggacaccaagcagcgaaccaccagcgccgagccaagcgaagcagacggccgagacgttgacaccttcggcgcggcatctctcgagagttccgctccggcgctccacctccaccgctggcggtttcttattccgttccgttccgcctcctgctctgctcctctccacaccacacggcacgaaaccgttacggcaccggcagcacccagcacgggagaggggattcctttcccaccgttccttccctttccgccccgccgctataaatagccagccccatccccagcttttttccccaatctcatctcctctctcctgttgttcggagcacacgcacaatccgatcgatccccaaatccccttcgtctctcctcgcgagcctcgtggatcccagcttcaaggtacggcgatcgatcatcccccctccttctctctaccttcttttctctagactacatcggatggcgatccatggttagggcctgctagtttcccttcctgttttgtcgatggctgcgaggcacaatagatctgatggcgttatgacggctaacttgtcatgttgttgcgatttatagtccctttaggagatcagtttaatttctcggatggttcgagatcggtggtccatggttagtaccctaagatccgcgctgttagggttcgtagatggaggcgacctgttctgattgttaacttgtcagtacctgggaaatcctgggatggttctagctcgtccgcagatgagatcgatttcatgatcctctgtatcttgtttcgttgcctaggttccgtctaatctatccgtggtatgatgtagatgttttgatcgtgctaactacgtcttgtaaagttaattgtcaggtcataatttttagcatgcctttttttttgtttggttttgtctaattgggctgtcgttctagatcagagtagaagactgttccaaactacctgctggatttattgaacttggatctgtatgtgtgtcacatatcttcataaattcatgattaagatggattgaaatatcttttatctttttggtatggatagttctatatgttggtgtggctttgttagatgtatacatgcttagatacatgaagcaacgtgctgctactgtttagtaattgctgttcatttgtctaataaacagataaggatatgtatttatgttgctgttggttttgctggtactttgttggatacaaatgcttcaatacagaaaacagcatgctgctacgatttaccatttatctaatcttatcatatgtctaatctaataaacaaacatgcttttaaattatcttcatatgcttggatgatggcatacacagcggctatgtgtggttttttaaatacccagcatcatgggcatgcatgacactgctttaatatgctttttatttgcttgagactgtttcttttgtttatactgaccctttagttcggtgactcttctgcaggtcgactttaacttagcctaggatccatggcccagtccaagcacggcctgaccaaggagatgaccatgaagtaccgcatggagggctgcgtggacggccacaagttcgtgatcaccggcgagggcatcggctaccccttcaagggcaagcaggccatcaacctgtgcgtggtggagggcggccccttgcccttcgccgaggacatcttgtccgccgccttcatgtacggcaaccgcgtgttcaccgagtacccccaggacatcgtcgactacttcaagaactcctgccccgccggctacacctgggaccgctccttcctgttcgaggacggcgccgtgtgcatctgcaacgccgacatcaccgtgagcgtggaggagaactgcatgtaccacgagtccaagttctacggcgtgaacttccccgccgacggccccgtgatgaagaagatgaccgacaactgggagccctcctgcgagaagatcatccccgtgcccaagcagggcatcttgaagggcgacgtgagcatgtacctgctgctgaaggacggtggccgcttgcgctgccagttcgacaccgtgtacaaggccaagtccgtgccccgcaagatgcccgactggcacttcatccagcacaagctgacccgcgaggaccgcagcgacgccaagaaccagaagtggcacctgaccgagcacgccatcgcctccggctccgccttgccctccggactcagatctcgatagggtaccaatggccagttaacagatccagctgctgctgttctagggttcacaagtctgcctatttgtcttccccaatggagctatggttgtctggtctggtccttggtcgtgtcccgtttcattgtgtactatttacctgtaatgtgtatccttaagtctggtttgatggtgtctgaaacgttttgctgtggtagagcagcatggaagaactataatgaataagtgatccctaatcattgtgtccaaattttgcttctgctatacccttttgtgctgtttcttatgttttgcttaaaaatttgatctgacaaacaaatttgtctaaattatgctcttgttctgactgtgtactgtacacatttgtattgctaccggtttggcacatagttttctctttgattgcagatcaaacccttctgattgcagattgcttggctatggctgatgtgctcactgttcttctttagcttgtatattgctgatggtggcttggctacggctgaaaaagttgctgctgcgccgacttggcaactgttgctccagtaatgctttgtcctctcttcctagccgccgacttggcacttggcagctgttgctcctgtaatgcgttgttatctcttatctcttgagatgtactatgattttgaggctgtttgacttgtgccagattgccagtgctgatgctatattatctcaggtttttatgctagtatatgttttactgtgtgctgcctgtgtcgagttacgtaatctattgaaccgctatgcgtgttgatgccctgttgttgcttgccagattgatgcccctgttgcttgcagcttgcaagctgtagtgaaatcctaaaattcgaaaccaaatctattctgaacttttgaagatctgtgatgtccggaagaaaagattcaaacagataaacgggactctccagaatctataaaataaatgatcgacaaacgctttgctttggtaggcttcctagttagttagcggaccgaagcttcggtccgggcctagaaggccagcttcggccgcccctcggtaccctgggatctgcccttactttaacgcctctaaccaacacccctttatctttataaggaacaataaacagaatttgccccactgttctaaatcacctaataatatccccagctaaaaacaataaaggtttcctagaattaagacaagcatgactgttcctccaggagggtttggaacattgttgcagtcttgcagatacgggcgaagggtgagaaacagagcggagggctggaggtgacctcggtagtcgacgccggagttgagcttgacaacgacggggcggcccctgatggacttgaggaagtccgatggcgtcttcaccgtcccgccggcgcccgaggcgggcctgtcgctgccgccgccgccgctgctcatcttgcgcgctgtgcccccggcggtgtccctgtgttgcggatcgcgggtgggccaggtggatgcgagggcgacccgtttggactccggccggagccgccggatccctggtcggtgtcagtgccgtttactctgggccccacgtgtcagtaccgtctgtagatgacaacaacccgtcgtccacagtcatgtccaaaatatcctttcttcttttttttcgattcggatatctatcttccttttttttttccaaaaatcttcttgacgcaccagcgcgcacgtttgtggtaaacgccgacacgtcggtcccacgtcgatagaccccacccaccagtgagtagcgtgtacgtattcgggggtgacggacgtgtcgccgtcgtcttgctagtcccattcccatctgagccacacatctctgaacaaaaaaaaggagggaggcctccacgcacatccccctccgtgccacccgccccaaaccctcgcgccgcctccgagacagccgccgcaaccatggccaccgccgccgccgcgtctaccgcgctcactggcgccactaccgctgcgcccaaggcgaggcgccgggcgcacctcctggccacccgccgcgccctcgccgcgcccatcaggtgctcagcggcgtcacccgccatgccgatggctcccccggccaccccgctccggccgtggggccccaccgagccccgcaagggtgctgacatcctcgtcgagtccctcgagcgctgcggcgtccgcgacgtcttcgcctaccccggcggcgcgtccatggagatccaccaggcactcacccgctcccccgtcatcgccaaccacctcttccgccacgagcaaggggaggcctttgccgcctccggctacgcgcgctcctcgggccgcgtcggcgtctgcatcgccacctccggccccggcgccaccaacctagtctccgcgctcgccgacgcgctgctcgattccgtccccatggtcgccatcacgggacaggtggcgcgacgcatgattggcaccgacgccttccaggagacgcccatcgtcgaggtcacccgctccatcaccaagcacaactacctggtcctcgacgtcgacgacatcccccgcgtcgtgcaggaggctttcttcctcgcctcctctggtcgaccagggccggtgcttgtcgacatccccaaggacatccagcagcagatggcggtgcctgtctgggacaagcccatgagtctgcctgggtacattgcgcgccttcccaagccccctgcgactgagttgcttgagcaggtgctgcgtcttgttggtgaatcgcggcgccctgttctttatgtgggcggtggctgcgcagcatctggtgaggagttgcgacgctttgtggagctgactggaatcccggtcacaactactcttatgggcctcggcaacttccccagcgacgacccactgtctctgcgcatgctaggtatgcatgggacggtgtatgcaaattatgcagtggataaggccgatctgttgcttgcacttggtgtgcggtttgatgatcgcgtgacagggaagattgaggcttttgcaagcagggctaagattgtgcacgttgatattgatccggctgagattggcaagaacaagcagccacatgtgtccatctgtgcagatgttaagcttgctttgcagggcatgaatgctcttcttgaaggaagcacatcaaagaagagctttgactttggctcatggaacgatgagttggatcagcagaagagggaattcccccttgggtataaaacatctaatgaggagatccagccacaatatgctattcaggttcttgatgagctgacgaaaggcgaggccatcatcggcacaggtgttgggcagcaccagatgtgggcggcacagtactacacttacaagcggccaaggcagtggttgtcttcagctggtcttggggctatgggatttggtttgccggctgctgctggtgcttctgtggcaaacccaggtgtcactgttgttgacatcgatggagatggtagctttctcatgaacgttcaggagctagctatgatccgaattgagaacctcccagtgaaggtctttgtgctaaacaaccagcacctggggatggtggtgcagttggaggacaggttctataaggccaacagagcgcacacatacttgggaaacccagagaatgaaagtgagatatatccagatttcgtgacgatcgccaaagggttcaacattccagccgtccgtgtgacaaagaagaacgaagtccgcgcagcgataaagaagatgctcgagactccagggccgtacctcttggatataatcgtcccacaccaggagcatgtgttgcctatgatccctagtggtggggctttcaaggatatgatcctggatggtgatggcaggactgtgtactgacttcgaataggtacccggggatcctctagtgccgtgggtcgtttaagctgccgctgtacctgtgtcgtctggtgccttctggtgtacctgggaggttgtcgtctatcaagtatctgtggttggtgtcatgagtcagtgagtcccaatactgttcgtgtcctgtgtgcattatacccaaaactgttatgggcaaatcatgaataagcttgatgttcgaacttaaaagtctctgctcaatatggtattatggttgtttttgttcgtctcctaatatttgcctgggatcaaattttattggctggtgttcatttgacctccatgttcttgctaggctccattttttactctacagccataatatgtttgattgtttggtttgttctttgttgtacacctggttctgtcgagcttagttttcgacactggcttacagcttaacatgttgctattttattgggttctgattgctattttattgggttctgattgctagtttttgctgaatccaaaaaccatgttatttatttaagcgatccaggttattattatgatggtggctaagtttttttttttccaagggtaaattttctggattctccagtgtttctgtggccgaattcaatcactagagtcgacctgcaaagcttcggtccgggcctagaaggcccgcgccacttacgcttgattccgatgacttcgtaggttcctagctcaagccgctcgtgtccaagcgtcacttacgattagctaatgattacggcatctaggaccgactagttcttatgtgcttctagtctccaaatgtggttgatagttattttgctctaagatcaacagtaatgaagtataaatcatcgttgtggtgtgctactcggttaattgagcattaacacacacaaacatgacgaggatggtataatctccaaaaatgtgtactttgttaggtgggaccctatagccttgattaatgtgctatgttaggcatgcctggaaacgtgtgacgcatatgttttgtgaacctgttgatattatatgtgcttttatattaccatattttattaaaatactaatatttattactagtaagatataacattctatctagcttaaaaactaaccataaatattccataataactagatttaccaaactaatatactaaatatacataataaatacaaaattaacaagacaataatcaatatttatgagcttaatatatttagacattatggttggtcgacgataatcatgctaacttttcgtaattgcttgattgaaatatgcttagaataatgcctctttgttctacatggcaaatagggaccattatggtgtaacaccctgggaaccacaaacaccccgaaatgctactaaactacacaactaaccttcatatataaaatttcgacagcatctcctttgaaaatttgcatagacgtggaagcaacagagtataaacagatctgcgtttaaacgtgcaagcgctactagacaattcagtacattaaaaacgtccgcaatgtgttattaagttgtctaagcgtcaatttgtttacaccacaatatatcctgcca

SEQ ID NO: 75 - DNA, 20256 bp, Artificial sequence
  PHP96919
gtttacccgccaatatatcctgtcaaacactgcggccgcacttgaccgcggatggagccggagctgtggtgaggccatcgacgggaggtgggggagaacacagtctcagtgttctttgtgagtccgcaaggtttttagcttttctgtattaattaaggttgctgttggctgtagaatacggtcgtggaagagctgtatcggtagctactacgtaagctattatatactggaagtctggagctcgtcgatctccggtcgtcttcctccatttctcctcgtcttgctttgactgctgctaccatttgcttctgttttctgatgaagcatgccatgtcggccaccagtgtttgtgtggtttttgcagggaatggctttcaagtgctgtgattgaatggccctcgtcgtcctcggctgagctcacatggacgcgtcatgtgagtgagatatatgatcatatgatgagtggggttcgggtgagtgcgtacttgaagtaggatcccgctttcactcattcattcattggcctttaaaccgggaaattttcgcgaggagatggagggaagcaagcagggtgacgagtgcagagtgccgcgagcgctttgtcaaaaggcaccgccgtaggcaaaaaaatcaatggccctgactgactcgatggtagtactactgtagagactagagagggttgctccccatatcttcgtgtgacttttactccagcattgcatttccgtcattgagacgttaattaatagcagctttcgggacagatgactgtggccatgtttcgtcacggccgcttcgtgccagctgggggtactatagtactgtgattttgttagtaaaaactttcattaggccaccattgacgaccgggccttcgcttttgctgcgctaattaaccatttcccggcgaccgaagggaacatgaacatgccccgacacatgagggcatgaggactagtgttctccctgtcgttcgttgacttgactagtgatagtttaaacgctcttcaactggaagagcggttactaccggttcactagctagctgctaatcgagctagttaccctatgaggtgacatgaagcgctcacggttactatgacggttagcttcacgactgttggtggcagtagcgtacgacttagctatagttccggacttacctagctaataacttcgtatagcatacattatacgaagttatggttaccacactgatagtttaaactgaaggcgggaaacgacaatctgatcatgagcggagaattaagggagtcacgttatgacccccgccgatgacgcgggacaagccgttttacgtttggaactgacagaaccgcaacgattgaaggagccactcagccgcgggtttctggagtttaatgagctaagcacatacgtcagaaaccattattgcgcgttcaaaagtcgcctaaggtcactatcagctagcaaatatttcttgtcaaaacgtaagcgcttacgcaccgaacaacgtaagcgcttacgcaccgaacaacgtaagcgcttacgcaatgctccactgacgttccataaattcccctcggtatccaattagagtctcatattcactcccatggcggccaatgcgggcggcggtggagcgggaggaggcagcggcagcggcagcgtggctgcgccggcggtgtgccgccccagcggctcgcggtggacgccgacgccggagcagatcaggatgctgaaggagctctactacggctgcggcatccggtcgcccagctcggagcagatccagcgcatcaccgccatgctgcggcagcacggcaagatcgagggcaagaacgtcttctactggttccagaaccacaaggcccgcgagcgccagaagcgccgcctcaccagcctcgacgtcaacgtgcccgccgccggcgcggccgacgccaccaccagccaactcggcgtcctctcgctgtcgtcgccgccgccttcaggcgcggcgcctccctcgcccaccctcggcttctacgccgccggcaatggcggcggatcggctgtgctgctggacacgagttccgactggggcagcagcggcgctgctatggccaccgagacatgcttcctgcaggactacatgggcgtgacggacacgggcagctcgtcgcagtggccacgcttctcgtcgtcggacacgataatggcggcggccgcggcgcgggcggcgacgacgcgggcgcccgagacgctccctctcttcccgacctgcggcgacgacggcggcagcggtagcagcagctacttgccgttctggggtgccgcgtccacaactgccggcgccacttcttccgttgcgatccaacagcaacaccagctgcaggagcagtacagcttttacagcaacagcaacagcacccagctggccggcaccggcaaccaagacgtatcggcaacagcagcagcagccgccgccctggagctgagcctcagctcatggtgctccccttaccctgctgcagggagtatgtgagagcaacgcgagctgccactgctcttcactgatgtctctggaatggaaggaggaggaagtgagaacagatcattcgacaaagcagcattagtccgttgatcggtggaagaccactcgtcagtgttgagttgaatgtttgatcaataaaatacggcaatgctgtaagggttgttttttatgccattgataatacactgtactgttcagttgttgaactctatttcttagccatgccaagtgcttttcttattttgaataacattacagcaaaaagttgaaagacaaaaaaaaaaacccccgaacagagtgctttgggtcccaagcttctttagactgtgttcggcgttccccctaaatttctccccctatatctcactcacttgtcacatcagcgttctctttccccctatatctccacgctctacagcagttccacctatatcaaacctctataccccaccacaacaatattatatactttcatcttcaactaactcatgtaccttccaatttttttctactaataattatttacgtgcacagaaacttagcaaggagagagagagcgggaatttaaatgctcggcgttaggcttttagtccgctaggtggctagaccgaggttaggacgctagttcactaggggcctagtggtgttttaagacgtcacggtcaccacgcgtggaccgaagcttgcatgcctgcagtgcagcgtgacccggtcgtgcccctctctagagataatgagcattgcatgtctaagttataaaaaattaccacatattttttttgtcacacttgtttgaagtgcagtttatctatctttatacatatatttaaactttactctacgaataatataatctatagtactacaataatatcagtgttttagagaatcatataaatgaacagttagacatggtctaaaggacaattgagtattttgacaacaggactctacagttttatctttttagtgtgcatgtgttctcctttttttttgcaaatagcttcacctatataatacttcatccattttattagtacatccatttagggtttagggttaatggtttttatagactaatttttttagtacatctattttattctattttagcctctaaattaagaaaactaaaactctattttagtttttttatttaataatttagatataaaatagaataaaataaagtgactaaaaattaaacaaataccctttaagaaattaaaaaaactaaggaaacatttttcttgtttcgagtagataatgccagcctgttaaacgccgtcgacgagtctaacggacaccaaccagcgaaccagcagcgtcgcgtcgggccaagcgaagcagacggcacggcatctctgtcgctgcctctggacccctctcgagagttccgctccaccgttggacttgctccgctgtcggcatccagaaattgcgtggcggagcggcagacgtgagccggcacggcaggcggcctcctcctcctctcacggcaccggcagctacgggggattcctttcccaccgctccttcgcacgtaagcgcttacgcaccgaacaacgtaagcgcttacgcaccgaacaacgtaagcgcttacgctttcccttcctcgcccgccgtaataaatagacaccccctccacaccctctttccccaacctcgtgttgttcggagcgcacacacacacaaccagatctcccccaaatccacccgtcggcacctccgcttcaaggtacgccgctcgtcctcccccccccccctctctaccttctctagatcggcgttccggtccatgcatggttagggcccggtagttctacttctgttcatgtttgtgttagatccgtgtttgtgttagatccgtgctgctagcgttcgtacacggatgcgacctgtacgtcagacacgttctgattgctaacttgccagtgtttctctttggggaatcctgggatggctctagccgttccgcagacgggatcgatttcatgattttttttgtttcgttgcatagggtttggtttgcccttttcctttatttcaatatatgccgtgcacttgtttgtcgggtcatcttttcatgcttttttttgtcttggttgtgatgatgtggtctggttgggcggtcgttctagatcggagtagaattctgtttcaaactacctggtggatttattaattttggatctgtatgtgtgtgccatacatattcatagttacgaattgaagatgatggatggaaatatcgatctaggataggtatacatgttgatgcgggttttactgatgcatatacagagatgctttttgttcgcttggttgtgatgatgtggtgtggttgggcggtcgttcattcgttctagatcggagtagaatactgtttcaaactacctggtgtatttattaattttggaactgtatgtgtgtgtcatacatcttcatagttacgagtttaagatggatggaaatatcgatctaggataggtatacatgttgatgtgggttttactgatgcatatacatgatggcatatgcagcatctattcatatgctctaaccttgagtacctatctattataataaacaagtatgttttataattattttgatcttgatatacttggatgatggcatatgcagcagctatatgtggatttttttagccctgccttcatacgctatttatttgcttggtactgtttcttttgtcgatgctcaccctgttgtttggtgttacttctgcaggtcgactttaacttagcctagcatggccactgtgaacaactggctcgctttctccctctccccgcaggagctgccgccctcccagacgacggactccacactcatctcggccgccaccgccgaccatgtctccggcgatgtctgcttcaacatcccccaagattggagcatgaggggatcagagctttcggcgctcgtcgcggagccgaagctggaggacttcctcggcggcatctccttctccgagcagcatcacaaggccaactgcaacatgatacccagcactagcagcacagtttgctacgcgagctcaggtgctagcaccggctaccatcaccagctgtaccaccagcccaccagctcagcgctccacttcgcggactccgtaatggtggcttcctcggccggtgtccacgacggcggtgccatgctcagcgcggccgccgctaacggtgtcgctggcgctgccagtgccaacggcggcggcatcgggctgtccatgattaagaactggctgcggagccaaccggcgcccatgcagccgagggtggcggcggctgagggcgcgcaggggctctctttgtccatgaacatggcggggacgacccaaggcgctgctggcatgccacttctcgctggagagcgcgcacgggcgcccgagagtgtatcgacgtcagcacagggtggagccgtcgtcgtcacggcgccgaaggaggatagcggtggcagcggtgttgccggcgctctagtagccgtgagcacggacacgggtggcagcggcggcgcgtcggctgacaacacggcaaggaagacggtggacacgttcgggcagcgcacgtcgatttaccgtggcgtgacaaggcatagatggactgggagatatgaggcacatctttgggataacagttgcagaagggaagggcaaactcgtaagggtcgtcaagtctatttaggtggctatgataaagaggagaaagctgctagggcttatgatcttgctgctctgaagtactggggtgccacaacaacaacaaattttccagtgagtaactacgaaaaggagctcgaggacatgaagcacatgacaaggcaggagtttgtagcgtctctgagaaggaagagcagtggtttctccagaggtgcatccatttacaggggagtgactaggcatcaccaacatggaagatggcaagcacggattggacgagttgcagggaacaaggatctttacttgggcaccttcagcacccaggaggaggcagcggaggcgtacgacatcgcggcgatcaagttccgcggcctcaacgccgtcaccaacttcgacatgagccgctacgacgtgaagagcatcctggacagcagcgccctccccatcggcagcgccgccaagcgcctcaaggaggccgaggccgcagcgtccgcgcagcaccaccacgccggcgtggtgagctacgacgtcggccgcatcgcctcgcagctcggcgacggcggagccctggcggcggcgtacggcgcgcactaccacggcgccgcctggccgaccatcgcgttccagccgggcgccgccagcacaggcctgtaccacccgtacgcgcagcagccaatgcgcggcggcgggtggtgcaagcaggagcaggaccacgcggtgatcgcggccgcgcacagcctgcaggacctccaccacctgaacctgggcgcggccggcgcgcacgactttttctcggcagggcagcaggccgccgccgctgcgatgcacggcctgggtagcatcgacagtgcgtcgctcgagcacagcaccggctccaactccgtcgtctacaacggcggggtcggcgacagcaacggcgccagcgccgtcggcggcagtggcggtggctacatgatgccgatgagcgctgccggagcaaccactacatcggcaatggtgagccacgagcaggtgcatgcacgggcctacgacgaagccaagcaggctgctcagatggggtacgagagctacctggtgaacgcggagaacaatggtggcggaaggatgtctgcatgggggactgtcgtgtctgcagccgcggcggcagcagcaagcagcaacgacaacatggccgccgacgtcgggcatggcggcgcgcagctcttcagtgtctggaacgacacttaagcgtacctagtggtacctgacatcttatagtctgcaacctctcgtgtctgaattcctatctttatcaagtgttattgcttccacgactataggacagctttcgtcgaaagcttttgctcatgtgatctcgaaggattcatctagtctgatttttcgtgacttgtatcggttttattggattcatccaacatatatcaataaaaaatgagttgtgtttcctttcttcctagttcagttaaaattatttccctcctgcgcttgtgctgtaattgtctgtgtacctgttgtttgtgactgtgttagttcccttggatatgatttcgtatttgatatgtacatggagatagcttagcttcattattggagtatgaagttagtatgacatagtcactctcctggaaaattgacactgcaaaccatatttttattctgaaccacaaatcctagtcagtccgctggcatatgccgtccgtttgctgaatccagaacgtgggtttggagatgtacggctgagatgcctctatgcgaaggggatttcgtggtgaaacgagatgggagtagagcaacgcccgtggaagatgcttcaaacttccacacttttgagcaacgatcggcagtagtaaggtagacgatttcaagatcaaagcatatgaagataaacaacatcaacaacaaaatttgttggggttctatagagagaaacagagctacatacatacactgttttgtatctaccatctgagatgatgaaaagatgaaaaactaaagaatgccccggcgccaacgccaggacacgccgcgcgcgcgtcacccgagccatctcttgacccagccggcgctgtatatttacacacgttgcagcatcgatcaccacctgttcgatcgcgtcgccgtcaccggcgcgccgcgacttattgaactagtctagggcgcggctaacaacctagcttagattgccttgtctaaacccttaggctaacgcgccactctagaaggccgatctcccccgaacgcgccagatctcccgggttaccgaattcgagctcggtaccctggttcacaaactcaatacaacacacagtggagtagggtattacgctccggcggcccgaaccactctaaatccttgtgtcctcgtgtgctcttccaccattaatgactgtaattgcagggacacgaagagttgtagcgcttttgccaacaagatccgctatatgctagtagagtggaacctgcacagcaacaagcatccaataatctgagaataagaattatgtgtggtgatggttctcatctctgcaactcgccattttcgcgagagaaccaaatccaagttggtgaagatcatgatttgggctcatgggctggcatagtagctattacctttgcaattgtggttcgaatctatccgatattctccttttcagggagagctaatgcttatgcttattgggtattttggtttgacactgcttcacgcccaaaaaaaggcaactatgtctgagttggatatggcccaaaaaaaggcagctatgtctgagttggatatggaagtcttctttcgtttagggtgaagtaagaccaagctcatgagcttattatcttaggtcggaacaaattagttgataggcatggcacatttatcaaattataatgattttaacagaaaagcaacacctctttttcagcagcaccagctttgcaagctgcaattgacactccaagcatagtatttgctccaaactcagcctgcatttcgcacaatatcatatctatttccatttggataaaatatattttccagaaatatgggaacagaatcaagatacagaaaaaagttgtggtagtagtggtaagtggaaacacaagtacagtgaaaagatagcattatttctgaacagtcaaattaaccgaaataagtagtatcacatactgcccctaaattgactacacccaatgtaaagaattgcttgagcatattgagccatcagttgtttgtttgtgtaacggatttgacaatgcagagttcaggagcaaaaaaccgcaaaggagagaaagagggaaaggatctcctagtatcccaccttgtggcgcgccctgtcaagtgcatgatggcctggtcgatctgcgtctgctgctgcggttccatcccaacgagtgcctccgacaccttgtcgttgatcacccgcaccgcgtaggcgacccccctggcgaggaacttccgcctctcggaggccccggccgcgtcggcggcggcgccctcgagcgcgcccacgctagccgtagatgctcggtgcacggccttgttggtgtgcaactcgacctcaacggccggtgcgctacgcccgtcaaggatctggcgcgcccgcaccctcgtgatcacggtgggcgcctcccgcctcatgtggccgacgatgaaaagcgccgggttaggggccttggcgcgcaccgccgtattcagggcctcctcgctcttgcgcgagagcaggtgcttccccaggtactcctgcactgacaaggctgccacagcggtggaatttgtcctcacgacttcgccacgtcgtcctcacctccctggcttcccacgactccgccgtatcgaggtgctcggtgggtcgtcttaatccgaagtccgaactaggaagacgagacagagaggtctgaggaatgggcctcgtttgatgttgagctgaattatttttccagcataagcccaggtcttggtccatgaacaaaattactagaaacccagcccagtactacgatctaaaagagggactgccactggatagctctctctagcattctccacgctccaatacagcggcgtcgtgtctatccgggtctatccgcgaacacgtgagaactctccagaaactgctttctcctccacttcatctctctcgctttccctctataaaaagaccccttctaggaattgagggagacagcaagcaccaagcagcgatccgaagctcaatcaattcactcaaacctcttccccaaatcttcgattagatcttcgttgacaagaagactagaaccgaacctgacatgtccaacctgctcacggttcaccagaaccttccggctcttccagtggacgcgacgtccgatgaagtcaggaagaacctcatggacatgttccgcgacaggcaagcgttcagcgagcacacctggaagatgctgctctccgtctgccgctcctgggctgcatggtgcaagctgaacaacaggaagtggttccccgctgagcccgaggacgtgagggattaccttctgtacctgcaagcgcgaggtttgtttctgcttctacctttgatatatatataataattatcattaattagtagtaatataatatttcaaatatttttttcaaaataaaagaatgtagtatatagcaattgcttttctgtagtttataagtgtgtatattttaatttataacttttctaatatatgaccaaaacatggtgatgcctaggtctggcagtgaagaccatccagcaacaccttggacaactgaacatgcttcacaggcgctccggcctcccgcgccccagcgactcgaacgccgtgagcctcgtcatgcgccgcatcaggaaggaaaacgtcgatgccggcgaaagggcaaagcaggccctcgcgttcgagaggaccgatttcgaccaggtccgcagcctgatggagaacagcgacaggtgccaggacattaggaacctggcgttcctcggaattgcatacaacacgctcctcaggatcgcggaaattgcccgcattcgcgtgaaggacattagccgcaccgacggcggcaggatgcttatccacattggcaggaccaagacgctcgtttccaccgcaggcgtcgaaaaggccctcagcctcggagtgaccaagctcgtcgaacgctggatctccgtgtccggcgtcgcggacgacccaaacaactacctcttctgccgcgtccgcaagaacggggtggctgcccctagcgccaccagccaactcagcacgagggccttggaaggtattttcgaggccacccaccgcctgatctacggcgcgaaggatgacagcggtcaacgctacctcgcatggtccgggcactccgcccgcgttggagctgctagggacatggcccgcgccggtgtttccatccccgaaatcatgcaggcgggtggatggacgaacgtgaacattgtcatgaactacattcgcaaccttgacagcgagacgggcgcaatggttcgcctcctggaagatggtgactgaggtacccaacctagacttgtccatcttctggattggccaacttaattaatgtatgaaataaaaggatgcacacatagtgacatgctaatcactataatgtgggcatcaaagttgtgtgttatgtgtaattactagttatctgaataaaagagaaagagatcatccatatttcttatcctaaatgaatgtcacgtgtctttataattctttgatgaaccagatgcatttcattaaccaaatccatatacatataaatattaatcatatataattaatatcaattgggttagcaaaacaaatctagtctaggtgtgttttgcgatccgatatcgatgacgtctaaaaacggcccctaactaacgcttagttgcccgctagattagtcccccgttagtgcctagttagacacacgacgaactaggggctagccgtgcgcacgataacttcgtatagcatacattatacgaagttataacagcggaccgggttaccgaattcctgcccttaaggccaattgttcaagattcattcaacaattgaaacatctcccatgattaaatcagtataaggttgctatggtcttgcttgacaaagtttttttttgagggaatttcaactaaatttttgagtgaaactatcaaatactgattttaaaaaatttttataaaaggaagcgcagagataaaaggccatctatgctacaaaagtacccaaaaatgtaatcctaaagtatgaattgcattttttttttgtttggacgaaaggaaaggagtattaccacaagaatgatatcatcttcatatttagatcttttttgggtaaagcttgagattctctaaatatagagaaatcagaagaaaaaaaaaccgtgttttggtggttttgatttctagcctccacaataactttgacggcgtcgacaagtctaacggacaccaagcagcgaaccaccagcgccgagccaagcgaagcagacggccgagacgttgacaccttcggcgcggcatctctcgagagttccgctccggcgctccacctccaccgctggcggtttcttattccgttccgttccgcctcctgctctgctcctctccacaccacacggcacgaaaccgttacggcaccggcagcacccagcacgggagaggggattcctttcccaccgttccttccctttccgccccgccgctataaatagccagccccatccccagcttttttccccaatctcatctcctctctcctgttgttcggagcacacgcacaatccgatcgatccccaaatccccttcgtctctcctcgcgagcctcgtggatcccagcttcaaggtacggcgatcgatcatcccccctccttctctctaccttcttttctctagactacatcggatggcgatccatggttagggcctgctagtttcccttcctgttttgtcgatggctgcgaggcacaatagatctgatggcgttatgacggctaacttgtcatgttgttgcgatttatagtccctttaggagatcagtttaatttctcggatggttcgagatcggtggtccatggttagtaccctaagatccgcgctgttagggttcgtagatggaggcgacctgttctgattgttaacttgtcagtacctgggaaatcctgggatggttctagctcgtccgcagatgagatcgatttcatgatcctctgtatcttgtttcgttgcctaggttccgtctaatctatccgtggtatgatgtagatgttttgatcgtgctaactacgtcttgtaaagttaattgtcaggtcataatttttagcatgcctttttttttgtttggttttgtctaattgggctgtcgttctagatcagagtagaagactgttccaaactacctgctggatttattgaacttggatctgtatgtgtgtcacatatcttcataaattcatgattaagatggattgaaatatcttttatctttttggtatggatagttctatatgttggtgtggctttgttagatgtatacatgcttagatacatgaagcaacgtgctgctactgtttagtaattgctgttcatttgtctaataaacagataaggatatgtatttatgttgctgttggttttgctggtactttgttggatacaaatgcttcaatacagaaaacagcatgctgctacgatttaccatttatctaatcttatcatatgtctaatctaataaacaaacatgcttttaaattatcttcatatgcttggatgatggcatacacagcggctatgtgtggttttttaaatacccagcatcatgggcatgcatgacactgctttaatatgctttttatttgcttgagactgtttcttttgtttatactgaccctttagttcggtgactcttctgcaggtcgactttaacttagcctaggatccatggcccagtccaagcacggcctgaccaaggagatgaccatgaagtaccgcatggagggctgcgtggacggccacaagttcgtgatcaccggcgagggcatcggctaccccttcaagggcaagcaggccatcaacctgtgcgtggtggagggcggccccttgcccttcgccgaggacatcttgtccgccgccttcatgtacggcaaccgcgtgttcaccgagtacccccaggacatcgtcgactacttcaagaactcctgccccgccggctacacctgggaccgctccttcctgttcgaggacggcgccgtgtgcatctgcaacgccgacatcaccgtgagcgtggaggagaactgcatgtaccacgagtccaagttctacggcgtgaacttccccgccgacggccccgtgatgaagaagatgaccgacaactgggagccctcctgcgagaagatcatccccgtgcccaagcagggcatcttgaagggcgacgtgagcatgtacctgctgctgaaggacggtggccgcttgcgctgccagttcgacaccgtgtacaaggccaagtccgtgccccgcaagatgcccgactggcacttcatccagcacaagctgacccgcgaggaccgcagcgacgccaagaaccagaagtggcacctgaccgagcacgccatcgcctccggctccgccttgccctccggactcagatctcgatagggtaccaatggccagttaacagatccagctgctgctgttctagggttcacaagtctgcctatttgtcttccccaatggagctatggttgtctggtctggtccttggtcgtgtcccgtttcattgtgtactatttacctgtaatgtgtatccttaagtctggtttgatggtgtctgaaacgttttgctgtggtagagcagcatggaagaactataatgaataagtgatccctaatcattgtgtccaaattttgcttctgctatacccttttgtgctgtttcttatgttttgcttaaaaatttgatctgacaaacaaatttgtctaaattatgctcttgttctgactgtgtactgtacacatttgtattgctaccggtttggcacatagttttctctttgattgcagatcaaacccttctgattgcagattgcttggctatggctgatgtgctcactgttcttctttagcttgtatattgctgatggtggcttggctacggctgaaaaagttgctgctgcgccgacttggcaactgttgctccagtaatgctttgtcctctcttcctagccgccgacttggcacttggcagctgttgctcctgtaatgcgttgttatctcttatctcttgagatgtactatgattttgaggctgtttgacttgtgccagattgccagtgctgatgctatattatctcaggtttttatgctagtatatgttttactgtgtgctgcctgtgtcgagttacgtaatctattgaaccgctatgcgtgttgatgccctgttgttgcttgccagattgatgcccctgttgcttgcagcttgcaagctgtagtgaaatcctaaaattcgaaaccaaatctattctgaacttttgaagatctgtgatgtccggaagaaaagattcaaacagataaacgggactctccagaatctataaaataaatgatcgacaaacgctttgctttggtaggcttcctagttagttagcggaccgaagcttcggtccgggcctagaaggccagcttcggccgcccctcggtaccctgggatctgcccttactttaacgcctctaaccaacacccctttatctttataaggaacaataaacagaatttgccccactgttctaaatcacctaataatatccccagctaaaaacaataaaggtttcctagaattaagacaagcatgactgttcctccaggagggtttggaacattgttgcagtcttgcagatacgggcgaagggtgagaaacagagcggagggctggaggtgacctcggtagtcgacgccggagttgagcttgacaacgacggggcggcccctgatggacttgaggaagtccgatggcgtcttcaccgtcccgccggcgcccgaggcgggcctgtcgctgccgccgccgccgctgctcatcttgcgcgctgtgcccccggcggtgtccctgtgttgcggatcgcgggtgggccaggtggatgcgagggcgacccgtttggactccggccggagccgccggatccctggtcggtgtcagtgccgtttactctgggccccacgtgtcagtaccgtctgtagatgacaacaacccgtcgtccacagtcatgtccaaaatatcctttcttcttttttttcgattcggatatctatcttccttttttttttccaaaaatcttcttgacgcaccagcgcgcacgtttgtggtaaacgccgacacgtcggtcccacgtcgatagaccccacccaccagtgagtagcgtgtacgtattcgggggtgacggacgtgtcgccgtcgtcttgctagtcccattcccatctgagccacacatctctgaacaaaaaaaaggagggaggcctccacgcacatccccctccgtgccacccgccccaaaccctcgcgccgcctccgagacagccgccgcaaccatggccaccgccgccgccgcgtctaccgcgctcactggcgccactaccgctgcgcccaaggcgaggcgccgggcgcacctcctggccacccgccgcgccctcgccgcgcccatcaggtgctcagcggcgtcacccgccatgccgatggctcccccggccaccccgctccggccgtggggccccaccgagccccgcaagggtgctgacatcctcgtcgagtccctcgagcgctgcggcgtccgcgacgtcttcgcctaccccggcggcgcgtccatggagatccaccaggcactcacccgctcccccgtcatcgccaaccacctcttccgccacgagcaaggggaggcctttgccgcctccggctacgcgcgctcctcgggccgcgtcggcgtctgcatcgccacctccggccccggcgccaccaacctagtctccgcgctcgccgacgcgctgctcgattccgtccccatggtcgccatcacgggacaggtggcgcgacgcatgattggcaccgacgccttccaggagacgcccatcgtcgaggtcacccgctccatcaccaagcacaactacctggtcctcgacgtcgacgacatcccccgcgtcgtgcaggaggctttcttcctcgcctcctctggtcgaccagggccggtgcttgtcgacatccccaaggacatccagcagcagatggcggtgcctgtctgggacaagcccatgagtctgcctgggtacattgcgcgccttcccaagccccctgcgactgagttgcttgagcaggtgctgcgtcttgttggtgaatcgcggcgccctgttctttatgtgggcggtggctgcgcagcatctggtgaggagttgcgacgctttgtggagctgactggaatcccggtcacaactactcttatgggcctcggcaacttccccagcgacgacccactgtctctgcgcatgctaggtatgcatgggacggtgtatgcaaattatgcagtggataaggccgatctgttgcttgcacttggtgtgcggtttgatgatcgcgtgacagggaagattgaggcttttgcaagcagggctaagattgtgcacgttgatattgatccggctgagattggcaagaacaagcagccacatgtgtccatctgtgcagatgttaagcttgctttgcagggcatgaatgctcttcttgaaggaagcacatcaaagaagagctttgactttggctcatggaacgatgagttggatcagcagaagagggaattcccccttgggtataaaacatctaatgaggagatccagccacaatatgctattcaggttcttgatgagctgacgaaaggcgaggccatcatcggcacaggtgttgggcagcaccagatgtgggcggcacagtactacacttacaagcggccaaggcagtggttgtcttcagctggtcttggggctatgggatttggtttgccggctgctgctggtgcttctgtggcaaacccaggtgtcactgttgttgacatcgatggagatggtagctttctcatgaacgttcaggagctagctatgatccgaattgagaacctcccagtgaaggtctttgtgctaaacaaccagcacctggggatggtggtgcagttggaggacaggttctataaggccaacagagcgcacacatacttgggaaacccagagaatgaaagtgagatatatccagatttcgtgacgatcgccaaagggttcaacattccagccgtccgtgtgacaaagaagaacgaagtccgcgcagcgataaagaagatgctcgagactccagggccgtacctcttggatataatcgtcccacaccaggagcatgtgttgcctatgatccctagtggtggggctttcaaggatatgatcctggatggtgatggcaggactgtgtactgacttcgaataggtacccggggatcctctagtgccgtgggtcgtttaagctgccgctgtacctgtgtcgtctggtgccttctggtgtacctgggaggttgtcgtctatcaagtatctgtggttggtgtcatgagtcagtgagtcccaatactgttcgtgtcctgtgtgcattatacccaaaactgttatgggcaaatcatgaataagcttgatgttcgaacttaaaagtctctgctcaatatggtattatggttgtttttgttcgtctcctaatatttgcctgggatcaaattttattggctggtgttcatttgacctccatgttcttgctaggctccattttttactctacagccataatatgtttgattgtttggtttgttctttgttgtacacctggttctgtcgagcttagttttcgacactggcttacagcttaacatgttgctattttattgggttctgattgctattttattgggttctgattgctagtttttgctgaatccaaaaaccatgttatttatttaagcgatccaggttattattatgatggtggctaagtttttttttttccaagggtaaattttctggattctccagtgtttctgtggccgaattcaatcactagagtcgacctgcaaagcttcggtccgggcctagaaggcccgcgccacttacgcttgattccgatgacttcgtaggttcctagctcaagccgctcgtgtccaagcgtcacttacgattagctaatgattacggcatctaggaccgactagttcttatgtgcttctagtctccaaatgtggttgatagttattttgctctaagatcaacagtaatgaagtataaatcatcgttgtggtgtgctactcggttaattgagcattaacacacacaaacatgacgaggatggtataatctccaaaaatgtgtactttgttaggtgggaccctatagccttgattaatgtgctatgttaggcatgcctggaaacgtgtgacgcatatgttttgtgaacctgttgatattatatgtgcttttatattaccatattttattaaaatactaatatttattactagtaagatataacattctatctagcttaaaaactaaccataaatattccataataactagatttaccaaactaatatactaaatatacataataaatacaaaattaacaagacaataatcaatatttatgagcttaatatatttagacattatggttggtcgacgataatcatgctaacttttcgtaattgcttgattgaaatatgcttagaataatgcctctttgttctacatggcaaatagggaccattatggtgtaacaccctgggaaccacaaacaccccgaaatgctactaaactacacaactaaccttcatatataaaatttcgacagcatctcctttgaaaatttgcatagacgtggaagcaacagagtataaacagatctgcgtttaaacgtgcaagcgctactagacaattcagtacattaaaaacgtccgcaatgtgttattaagttgtctaagcgtcaatttgtttacaccacaatatatcctgcca

SEQ ID NO: 76 - DNA, 27949 bp, Artificial sequence
  PHP96942
gtttacccgccaatatatcctgtcaaacactgatagtttaaactgaaggcgggaaacgacaatctgatcatgagcctagttagttaggggcagctaacgtcccctagctaactagttgctattaacctttagcctagtttagtgcggtcgcgctagtgaactagtctaatgggtgcctagcttagattagatccccgttcggcttagactaggttagtcggatagggctagtctagtggcttagcttggaactgttaagctaggctgttagtgcgggacttctaggctaacctattgacccctaacgcctagaacctaagaaacgctaaggacacctagctaactttggcgacgtccagaggtccgattccggctaactaactagcttaagcttgatatcgaattcctgcagccccggaccgggttacccggaccgaagcttgcatgcctgcagtgcagcgtgacccggtcgtgcccctctctagagataatgagcattgcatgtctaagttataaaaaattaccacatattttttttgtcacacttgtttgaagtgcagtttatctatctttatacatatatttaaactttactctacgaataatataatctatagtactacaataatatcagtgttttagagaatcatataaatgaacagttagacatggtctaaaggacaattgagtattttgacaacaggactctacagttttatctttttagtgtgcatgtgttctcctttttttttgcaaatagcttcacctatataatacttcatccattttattagtacatccatttagggtttagggttaatggtttttatagactaatttttttagtacatctattttattctattttagcctctaaattaagaaaactaaaactctattttagtttttttatttaataatttagatataaaatagaataaaataaagtgactaaaaattaaacaaataccctttaagaaattaaaaaaactaaggaaacatttttcttgtttcgagtagataatgccagcctgttaaacgccgtcgacgagtctaacggacaccaaccagcgaaccagcagcgtcgcgtcgggccaagcgaagcagacggcacggcatctctgtcgctgcctctggacccctctcgagagttccgctccaccgttggacttgctccgctgtcggcatccagaaattgcgtggcggagcggcagacgtgagccggcacggcaggcggcctcctcctcctctcacggcaccggcagctacgggggattcctttcccaccgctccttcgctttcccttcctcgcccgccgtaataaatagacaccccctccacaccctctttccccaacctcgtgttgttcggagcgcacacacacacaaccagatctcccccaaatccacccgtcggcacctccgcttcaaggtacgccgctcgtcctcccccccccccctctctaccttctctagatcggcgttccggtccatgcatggttagggcccggtagttctacttctgttcatgtttgtgttagatccgtgtttgtgttagatccgtgctgctagcgttcgtacacggatgcgacctgtacgtcagacacgttctgattgctaacttgccagtgtttctctttggggaatcctgggatggctctagccgttccgcagacgggatcgatttcatgattttttttgtttcgttgcatagggtttggtttgcccttttcctttatttcaatatatgccgtgcacttgtttgtcgggtcatcttttcatgcttttttttgtcttggttgtgatgatgtggtctggttgggcggtcgttctagatcggagtagaattctgtttcaaactacctggtggatttattaattttggatctgtatgtgtgtgccatacatattcatagttacgaattgaagatgatggatggaaatatcgatctaggataggtatacatgttgatgcgggttttactgatgcatatacagagatgctttttgttcgcttggttgtgatgatgtggtgtggttgggcggtcgttcattcgttctagatcggagtagaatactgtttcaaactacctggtgtatttattaattttggaactgtatgtgtgtgtcatacatcttcatagttacgagtttaagatggatggaaatatcgatctaggataggtatacatgttgatgtgggttttactgatgcatatacatgatggcatatgcagcatctattcatatgctctaaccttgagtacctatctattataataaacaagtatgttttataattattttgatcttgatatacttggatgatggcatatgcagcagctatatgtggatttttttagccctgccttcatacgctatttatttgcttggtactgtttcttttgtcgatgctcaccctgttgtttggtgttacttctgcaggtcgactttaacttagcctaggatccaacaatgccccagttcgacatcctctgcaagaccccccccaaggtgctcgtgaggcagttcgtggagaggttcgagaggccctccggcgagaagatcgccctctgcgccgccgagctcacctacctctgctggatgatcacccacaacggcaccgccattaagagggccaccttcatgtcatacaacaccatcatctccaactccctctccttcgacatcgtgaacaagtccctccagttcaaatacaagacccagaaggccaccatcctcgaggcctccctcaagaagctcatccccgcctgggagttcaccatcatcccctactacggccagaagcaccagtccgacatcaccgacatcgtgtcatccctccagcttcagttcgagtcctccgaggaggctgacaagggcaactcccactccaagaagatgctgaaggccctcctctccgagggcgagtccatctgggagatcaccgagaagatcctcaactccttcgagtacacctccaggttcactaagaccaagaccctctaccagttcctcttcctcgccaccttcatcaactgcggcaggttctcagacatcaagaacgtggaccccaagtccttcaagctcgtgcagaacaagtacctaggtttgtttctgcttctacctttgatatatatataataattatcattaattagtagtaatataatatttcaaatatttttttcaaaataaaagaatgtagtatatagcaattgcttttctgtagtttataagtgtgtatattttaatttataacttttctaatatatgaccaaaacatggtgatgcctaggtgtcatcatccagtgcctcgtgaccgagaccaagacctccgtgtccaggcacatctacttcttctccgctcgcggcaggatcgaccccctcgtgtacctcgacgagttcctcaggaactcagagcccgtgctcaagagggtgaacaggaccggcaactcctcctccaacaagcaggagtaccagctcctcaaggacaacctcgtgaggtcctacaacaaggccctcaagaagaacgccccctactccatcttcgccatcaagaacggccccaagtcccacatcggtaggcacctcatgacctccttcctctcaatgaagggcctcaccgagctcaccaacgtggtgggcaactggtccgacaagagggcctccgccgtggccaggaccacctacacccaccagatcaccgccatccccgaccactacttcgccctcgtgtcaaggtactacgcctacgaccccatctccaaggagatgatcgccctcaaggacgagactaaccccatcgaggagtggcagcacatcgagcagctcaagggctccgccgagggctccatcaggtaccccgcctggaacggcatcatctcccaggaggtgctcgactacctctcctcctacatcaacaggaggatctgagttaacctagacttgtccatcttctggattggccaacttaattaatgtatgaaataaaaggatgcacacatagtgacatgctaatcactataatgtgggcatcaaagttgtgtgttatgtgtaattactagttatctgaataaaagagaaagagatcatccatatttcttatcctaaatgaatgtcacgtgtctttataattctttgatgaaccagatgcatttcattaaccaaatccatatacatataaatattaatcatatataattaatatcaattgggttagcaaaacaaatctagtctaggtgtgttttgcgatgtgaaaccaatctggatatccctgaaatttgaataaggttatgttgtgagtttatgaagttgtggtctagtgttgtattttgtttttcttaaggataatgcatctgtgtgctttgcttatctaaaatctaaataaagtgggtttctgcattgtgactttgcacaaacttcttttgttaaaatgaataagaaatcacatcaagaaaacagaacaagaccacaacgagaagacttgaaactctctgaaggtatataaacaaacagaacctagtaaattagagtcagcttattcaaaacttttagaccatcatcaagatcattataaacttggagtcaatgttgcggaaaccaatctgctatccccggaatttcaaataaagagactagagaattactttgaacacacttcttttattaaatcggatcacaaaaatccatcaaagacacaacagcaacaaacacaaagagaagacttaaaacactgaagcagtaaacaaacagagagaaataaagtagaatcagcttattcaaagtgtgtaaactatcatcaaaagatacttaaaatctccataatcgcgattaacggcaaacgctaattagtcactaggcccaggaaacactaactaagccctagcttatcctagcgcaacctagttaggtcttatttaaatgaagttcctattccgaagttcctattctctagaaagtataggaacttcagatccaccgggatccccgatcatgcaaaaactcattaactcagtgcaaaactatgcctggggcagcaaaacggcgttgactgaactttatggtatggaaaatccgtccagccagccgatggccgagctgtggatgggcgcacatccgaaaagcagttcacgagtgcagaatgccgccggagatatcgtttcactgcgtgatgtgattgagagtgataaatcgactctgctcggagaggccgttgccaaacgctttggcgaactgcctttcctgttcaaagtattatgcgcagcacagccactctccattcaggttcatccaaacaaacacaattctgaaatcggttttgccaaagaaaatgccgcaggtatcccgatggatgccgccgagcgtaactataaagatcctaaccacaagccggagctggtttttgcgctgacgcctttccttgcgatgaacgcgtttcgtgaattttccgagattgtctccctactccagccggtcgcaggtgcacatccggcgattgctcactttttacaacagcctgatgccgaacgtttaagcgaactgttcgccagcctgttgaatatgcagggtgaagaaaaatcccgcgcgctggcgattttaaaatcggccctcgatagccagcagggtgaaccgtggcaaacgattcgtttaatttctgaattttacccggaagacagcggtctgttctccccgctattgctgaatgtggtgaaattgaaccctggcgaagcgatgttcctgttcgctgaaacaccgcacgcttacctgcaaggcgtggcgctggaagtgatggcaaactccgataacgtgctgcgtgcgggtctgacgcctaaatacattgatattccggaactggttgccaatgtgaaattcgaagccaaaccggctaaccagttgttgacccagccggtgaaacaaggtgcagaactggacttcccgattccagtggatgattttgccttctcgctgcatgaccttagtgataaagaaaccaccattagccagcagagtgccgccattttgttctgcgtcgaaggcgatgcaacgttgtggaaaggttctcagcagttacagcttaaaccgggtgaatcagcgtttattgccgccaacgaatcaccggtgactgtcaaaggccacggccgtttagcgcgtgtttacaacaagctgtaagagcttactgaaaaaattaacatctcttgctaagctgggggtggaacctagacttgtccatcttctggattggccaacttaattaatgtatgaaataaaaggatgcacacatagtgacatgctaatcactataatgtgggcatcaaagttgtgtgttatgtgtaattactagttatctgaataaaagagaaagagatcatccatatttcttatcctaaatgaatgtcacgtgtctttataattctttgatgaaccagatgcatttcattaaccaaatccatatacatataaatattaatcatatataattaatatcaattgggttagcaaaacaaatctagtctaggtgtgttttgcgaatgcgaccttcttatgtgcttctagtctccaaatgtggttgatagttattttgctctaagatcaacagtaatgaagtataaatcatcgttgtggtgtgctactcggttaattgagcattaacacacacaaacatgacgaggatggtataatctccaaaaatgtgtactttgttaggtgggaccctatagccttgattaatgtgctatgttaggcatgcctggaaacgtgtgacgcatatgttttgtgaacctgttgatattatatgtgcttttatattaccatattttattaaaatactaatatttattactagtaagatataacattctatctagcttaaaaactaaccataaatattccataataactagatttaccaaactaatatactaaatatacataataaatacaaaattaacaagacaataatcaatatttatgagcttaatatatttagacattatggttggtcgacgataatcatgctaacttttcgtaattgcttgattgaaatatgcttagaataatgcctctttgttctacatggcaaatagggaccattatggtgtaacaccctgggaaccacaaacaccccgaaatgctactaaactacacaactaaccttcatatataaaatttcgacagcatctcctttgaaaatttgcatagacgtggaagcaacagagtataaacagatatcatgataagaaaacatactagacattaataatctgctagaaatgggaagaatcctaacttgacgactgcgtaactgactagagtcacacttagctgaccctagtcacttacaactgacttcgtgtcctagatcgatgggccctggccgaagcttggtcacccggtccgggcctagaaggccgatctcccggttaaccggacttacccttaagcgatttaaatcctgaggcctgcaacactgatagtttaaactgaaggcgggaaacgacaatctgatcatgagcggagaattaagggagtcacgttatgacccccgccgatgacgcgggacaagccgttttacgtttggaactgacagaaccgcaacgattgaaggagccactcagccgcgggtttctggagtttaatgagctaagcacatacgtcagaaaccattattgcgcgttcaaaagtcgcctaaggtcactatcagctagcaaatatttcttgtcaaaaatgctccactgacgttccataaattcccctcggtatccaattagagtctcatattcactcccatggcggccaatgcgggcggcggtggagcgggaggaggcagcggcagcggcagcgtggctgcgccggcggtgtgccgccccagcggctcgcggtggacgccgacgccggagcagatcaggatgctgaaggagctctactacggctgcggcatccggtcgcccagctcggagcagatccagcgcatcaccgccatgctgcggcagcacggcaagatcgagggcaagaacgtcttctactggttccagaaccacaaggcccgcgagcgccagaagcgccgcctcaccagcctcgacgtcaacgtgcccgccgccggcgcggccgacgccaccaccagccaactcggcgtcctctcgctgtcgtcgccgccgccttcaggcgcggcgcctccctcgcccaccctcggcttctacgccgccggcaatggcggcggatcggctgtgctgctggacacgagttccgactggggcagcagcggcgctgctatggccaccgagacatgcttcctgcaggactacatgggcgtgacggacacgggcagctcgtcgcagtggccacgcttctcgtcgtcggacacgataatggcggcggccgcggcgcgggcggcgacgacgcgggcgcccgagacgctccctctcttcccgacctgcggcgacgacggcggcagcggtagcagcagctacttgccgttctggggtgccgcgtccacaactgccggcgccacttcttccgttgcgatccaacagcaacaccagctgcaggagcagtacagcttttacagcaacagcaacagcacccagctggccggcaccggcaaccaagacgtatcggcaacagcagcagcagccgccgccctggagctgagcctcagctcatggtgctccccttaccctgctgcagggagtatgtgagagcaacgcgagctgccactgctcttcactgatgtctctggaatggaaggaggaggaagtgagaacagatcattcgacaaagcagcattagtccgttgatcggtggaagaccactcgtcagtgttgagttgaatgtttgatcaataaaatacggcaatgctgtaagggttgttttttatgccattgataatacactgtactgttcagttgttgaactctatttcttagccatgccaagtgcttttcttattttgaataacattacagcaaaaagttgaaagacaaaaaaaaaaacccccgaacagagtgctttgggtcccaagcttctttagactgtgttcggcgttccccctaaatttctccccctatatctcactcacttgtcacatcagcgttctctttccccctatatctccacgctctacagcagttccacctatatcaaacctctataccccaccacaacaatattatatactttcatcttcaactaactcatgtaccttccaatttttttctactaataattatttacgtgcacagaaacttagcaaggagagagagagcgggaatttaaatgctcggcgttaggcttttagtccgctaggtggctagaccgaggttaggacgctagttcactaggggcctagtggtgttttaagacgtcacggtcaccgcggccgcatcgagcagctggcttgtggggaccagacaaaaaaggaatggtgcagaattgttaggcgcacctaccaaaagcatctttgcctttattgcaaagataaagcagattcctctagtacaagtggggaacaaaataacgtggaaaagagctgtcctgacagcccactcactaatgcgtatgacgaacgcagtgacgaccacaaaactcgagcaacgagatcatgagccaatcaaagaggagtgatgtagacctaaagcaataatggagccatgacgtaagggcttacgcccatacgaaataattaaaggctgatgtgacctgtcggtctctcagaacctttactttttatgtttggcgtgtatttttaaatttccacggcaatgacgatgtgaccgtcgacccactaaaacattgctttgtcaaaagctaaaaaagatgatgcccgacagccacttgtgtgaagcatgagaagccggtccctccactaagaaaattagtgaagcatcttccagtggtccctccactcacagctcaatcagtgagcaacaggacgaaggaaatgacgtaagccatgacgtctaatcccattcgaaacgcgtggaccgaagcttgcatgcctgcagtgcagcgtgacccggtcgtgcccctctctagagataatgagcattgcatgtctaagttataaaaaattaccacatattttttttgtcacacttgtttgaagtgcagtttatctatctttatacatatatttaaactttactctacgaataatataatctatagtactacaataatatcagtgttttagagaatcatataaatgaacagttagacatggtctaaaggacaattgagtattttgacaacaggactctacagttttatctttttagtgtgcatgtgttctcctttttttttgcaaatagcttcacctatataatacttcatccattttattagtacatccatttagggtttagggttaatggtttttatagactaatttttttagtacatctattttattctattttagcctctaaattaagaaaactaaaactctattttagtttttttatttaataatttagatataaaatagaataaaataaagtgactaaaaattaaacaaataccctttaagaaattaaaaaaactaaggaaacatttttcttgtttcgagtagataatgccagcctgttaaacgccgtcgacgagtctaacggacaccaaccagcgaaccagcagcgtcgcgtcgggccaagcgaagcagacggcacggcatctctgtcgctgcctctggacccctctcgagagttccgctccaccgttggacttgctccgctgtcggcatccagaaattgcgtggcggagcggcagacgtgagccggcacggcaggcggcctcctcctcctctcacggcaccggcagctacgggggattcctttcccaccgctccttcgctttcccttcctcgcccgccgtaataaatagacaccccctccacaccctctttccccaacctcgtgttgttcggagcgcacacacacacaaccagatctcccccaaatccacccgtcggcacctccgcttcaaggtacgccgctcgtcctcccccccccccctctctaccttctctagatcggcgttccggtccatgcatggttagggcccggtagttctacttctgttcatgtttgtgttagatccgtgtttgtgttagatccgtgctgctagcgttcgtacacggatgcgacctgtacgtcagacacgttctgattgctaacttgccagtgtttctctttggggaatcctgggatggctctagccgttccgcagacgggatcgatttcatgattttttttgtttcgttgcatagggtttggtttgcccttttcctttatttcaatatatgccgtgcacttgtttgtcgggtcatcttttcatgcttttttttgtcttggttgtgatgatgtggtctggttgggcggtcgttctagatcggagtagaattctgtttcaaactacctggtggatttattaattttggatctgtatgtgtgtgccatacatattcatagttacgaattgaagatgatggatggaaatatcgatctaggataggtatacatgttgatgcgggttttactgatgcatatacagagatgctttttgttcgcttggttgtgatgatgtggtgtggttgggcggtcgttcattcgttctagatcggagtagaatactgtttcaaactacctggtgtatttattaattttggaactgtatgtgtgtgtcatacatcttcatagttacgagtttaagatggatggaaatatcgatctaggataggtatacatgttgatgtgggttttactgatgcatatacatgatggcatatgcagcatctattcatatgctctaaccttgagtacctatctattataataaacaagtatgttttataattattttgatcttgatatacttggatgatggcatatgcagcagctatatgtggatttttttagccctgccttcatacgctatttatttgcttggtactgtttcttttgtcgatgctcaccctgttgtttggtgttacttctgcaggtcgactttaacttagcctaggatccatggccactgtgaacaactggctcgctttctccctctccccgcaggagctgccgccctcccagacgacggactccacactcatctcggccgccaccgccgaccatgtctccggcgatgtctgcttcaacatcccccaagattggagcatgaggggatcagagctttcggcgctcgtcgcggagccgaagctggaggacttcctcggcggcatctccttctccgagcagcatcacaaggccaactgcaacatgatacccagcactagcagcacagtttgctacgcgagctcaggtgctagcaccggctaccatcaccagctgtaccaccagcccaccagctcagcgctccacttcgcggactccgtaatggtggcttcctcggccggtgtccacgacggcggtgccatgctcagcgcggccgccgctaacggtgtcgctggcgctgccagtgccaacggcggcggcatcgggctgtccatgattaagaactggctgcggagccaaccggcgcccatgcagccgagggtggcggcggctgagggcgcgcaggggctctctttgtccatgaacatggcggggacgacccaaggcgctgctggcatgccacttctcgctggagagcgcgcacgggcgcccgagagtgtatcgacgtcagcacagggtggagccgtcgtcgtcacggcgccgaaggaggatagcggtggcagcggtgttgccggcgctctagtagccgtgagcacggacacgggtggcagcggcggcgcgtcggctgacaacacggcaaggaagacggtggacacgttcgggcagcgcacgtcgatttaccgtggcgtgacaaggcatagatggactgggagatatgaggcacatctttgggataacagttgcagaagggaagggcaaactcgtaagggtcgtcaagtctatttaggtggctatgataaagaggagaaagctgctagggcttatgatcttgctgctctgaagtactggggtgccacaacaacaacaaattttccagtgagtaactacgaaaaggagctcgaggacatgaagcacatgacaaggcaggagtttgtagcgtctctgagaaggaagagcagtggtttctccagaggtgcatccatttacaggggagtgactaggcatcaccaacatggaagatggcaagcacggattggacgagttgcagggaacaaggatctttacttgggcaccttcagcacccaggaggaggcagcggaggcgtacgacatcgcggcgatcaagttccgcggcctcaacgccgtcaccaacttcgacatgagccgctacgacgtgaagagcatcctggacagcagcgccctccccatcggcagcgccgccaagcgcctcaaggaggccgaggccgcagcgtccgcgcagcaccaccacgccggcgtggtgagctacgacgtcggccgcatcgcctcgcagctcggcgacggcggagccctggcggcggcgtacggcgcgcactaccacggcgccgcctggccgaccatcgcgttccagccgggcgccgccagcacaggcctgtaccacccgtacgcgcagcagccaatgcgcggcggcgggtggtgcaagcaggagcaggaccacgcggtgatcgcggccgcgcacagcctgcaggacctccaccacctgaacctgggcgcggccggcgcgcacgactttttctcggcagggcagcaggccgccgccgctgcgatgcacggcctgggtagcatcgacagtgcgtcgctcgagcacagcaccggctccaactccgtcgtctacaacggcggggtcggcgacagcaacggcgccagcgccgtcggcggcagtggcggtggctacatgatgccgatgagcgctgccggagcaaccactacatcggcaatggtgagccacgagcaggtgcatgcacgggcctacgacgaagccaagcaggctgctcagatggggtacgagagctacctggtgaacgcggagaacaatggtggcggaaggatgtctgcatgggggactgtcgtgtctgcagccgcggcggcagcagcaagcagcaacgacaacatggccgccgacgtcgggcatggcggcgcgcagctcttcagtgtctggaacgacacttaagcgtacctagtggtacctgacatcttatagtctgcaacctctcgtgtctgaattcctatctttatcaagtgttattgcttccacgactataggacagctttcgtcgaaagcttttgctcatgtgatctcgaaggattcatctagtctgatttttcgtgacttgtatcggttttattggattcatccaacatatatcaataaaaaatgagttgtgtttcctttcttcctagttcagttaaaattatttccctcctgcgcttgtgctgtaattgtctgtgtacctgttgtttgtgactgtgttagttcccttggatatgatttcgtatttgatatgtacatggagatagcttagcttcattattggagtatgaagttagtatgacatagtcactctcctggaaaattgacactgcaaaccatatttttattctgaaccacaaatcctagtcagtccgctggcatatgccgtccgtttgctgaatccagaacgtgggtttggagatgtacggctgagatgcctctatgcgaaggggatttcgtggtgaaacgagatgggagtagagcaacgcccgtggaagatgcttcaaacttccacacttttgagcaacgatcggcagtagtaaggtagacgatttcaagatcaaagcatatgaagataaacaacatcaacaacaaaatttgttggggttctatagagagaaacagagctacatacatacactgttttgtatctaccatctgagatgatgaaaagatgaaaaactaaagaatgccccggcgccaacgccaggacacgccgcgcgcgcgtcacccgagccatctcttgacccagccggcgctgtatatttacacacgttgcagcatcgatcaccacctgttcgatcgcgtcgccgtcaccggcgcgccgcgacttattgaactagtctagggcgcggctaacaacctagcttagattgccttgtctaaacccttaggctaacgcgccactctagaaggccgatctccccgggttcacaaactcaatacaacacacagtggagtagggtattacgctccggcggcccgaaccactctaaatccttgtgtcctcgtgtgctcttccaccattaatgactgtaattgcagggacacgaagagttgtagcgcttttgccaacaagatccgctatatgctagtagagtggaacctgcacagcaacaagcatccaataatctgagaataagaattatgtgtggtgatggttctcatctctgcaactcgccattttcgcgagagaaccaaatccaagttggtgaagatcatgatttgggctcatgggctggcatagtagctattacctttgcaattgtggttcgaatctatccgatattctccttttcagggagagctaatgcttatgcttattgggtattttggtttgacactgcttcacgcccaaaaaaaggcaactatgtctgagttggatatggcccaaaaaaaggcagctatgtctgagttggatatggaagtcttctttcgtttagggtgaagtaagaccaagctcatgagcttattatcttaggtcggaacaaattagttgataggcatggcacatttatcaaattataatgattttaacagaaaagcaacacctctttttcagcagcaccagctttgcaagctgcaattgacactccaagcatagtatttgctccaaactcagcctgcatttcgcacaatatcatatctatttccatttggataaaatatattttccagaaatatgggaacagaatcaagatacagaaaaaagttgtggtagtagtggtaagtggaaacacaagtacagtgaaaagatagcattatttctgaacagtcaaattaaccgaaataagtagtatcacatactgcccctaaattgactacacccaatgtaaagaattgcttgagcatattgagccatcagttgtttgtttgtgtaacggatttgacaatgcagagttcaggagcaaaaaaccgcaaaggagagaaagagggaaaggatctcctagtatcccaccttgtggcgcgccctgtcaagtgcatgatggcctggtcgatctgcgtctgctgctgcggttccatcccaacgagtgcctccgacaccttgtcgttgatcacccgcaccgcgtaggcgacccccctggcgaggaacttccgcctctcggaggccccggccgcgtcggcggcggcgccctcgagcgcgcccacgctagccgtagatgctcggtgcacggccttgttggtgtgcaactcgacctcaacggccggtgcgctacgcccgtcaaggatctggcgcgcccgcaccctcgtgatcacggtgggcgcctcccgcctcatgtggccgacgatgaaaagcgccgggttaggggccttggcgcgcaccgccgtattcagggcctcctcgctcttgcgcgagagcaggtgcttccccaggtactcctgcactgacaaggctgccacagcggtggaatttgtcctcacgacttcgccacgtcgtcctcacctccctggcttcccacgactccgccgtatcgaggtgctcggtgggtcgtcttaatccgaagtccgaactaggaagacgagacagagaggtctgaggaatgggcctcgtttgatgttgagctgaattatttttccagcataagcccaggtcttggtccatgaacaaaattactagaaacccagcccagtactacgatctaaaagagggactgccactggatagctctctctagcattctccacgctccaatacagcggcgtcgtgtctatccgggtctatccgcgaacacgtgagaactctccagaaactgctttctcctccacttcatctctctcgctttccctctataaaaagaccccttctaggaattgagggagacagcaagcaccaagcagcgatccgaagctcaatcaattcactcaaacctcttccccaaatcttcgattagatcttcgttgacaagaagactagaaccgaacctgacatgtccaacctgctcacggttcaccagaaccttccggctcttccagtggacgcgacgtccgatgaagtcaggaagaacctcatggacatgttccgcgacaggcaagcgttcagcgagcacacctggaagatgctgctctccgtctgccgctcctgggctgcatggtgcaagctgaacaacaggaagtggttccccgctgagcccgaggacgtgagggattaccttctgtacctgcaagcgcgaggtttgtttctgcttctacctttgatatatatataataattatcattaattagtagtaatataatatttcaaatatttttttcaaaataaaagaatgtagtatatagcaattgcttttctgtagtttataagtgtgtatattttaatttataacttttctaatatatgaccaaaacatggtgatgcctaggtctggcagtgaagaccatccagcaacaccttggacaactgaacatgcttcacaggcgctccggcctcccgcgccccagcgactcgaacgccgtgagcctcgtcatgcgccgcatcaggaaggaaaacgtcgatgccggcgaaagggcaaagcaggccctcgcgttcgagaggaccgatttcgaccaggtccgcagcctgatggagaacagcgacaggtgccaggacattaggaacctggcgttcctcggaattgcatacaacacgctcctcaggatcgcggaaattgcccgcattcgcgtgaaggacattagccgcaccgacggcggcaggatgcttatccacattggcaggaccaagacgctcgtttccaccgcaggcgtcgaaaaggccctcagcctcggagtgaccaagctcgtcgaacgctggatctccgtgtccggcgtcgcggacgacccaaacaactacctcttctgccgcgtccgcaagaacggggtggctgcccctagcgccaccagccaactcagcacgagggccttggaaggtattttcgaggccacccaccgcctgatctacggcgcgaaggatgacagcggtcaacgctacctcgcatggtccgggcactccgcccgcgttggagctgctagggacatggcccgcgccggtgtttccatccccgaaatcatgcaggcgggtggatggacgaacgtgaacattgtcatgaactacattcgcaaccttgacagcgagacgggcgcaatggttcgcctcctggaagatggtgactgaggtaccggctccacgtagtcgttatcgacgatcggcgacactactggagttggagcaacgtctagttccagcaataatataatgcaatattactgtagtagtagtagtatactataggacccctcctagctagcatgcggacatgctcttgtgatcttgtctcgggtccagacttcaataaagccatcttggcattatatgtactatacaaaaaagattatcactgctttctctcgatcgcaaatcatcctgtttttttttttggcaaaaagttcagcgtttctttctctctctctgactaccaaactgttgacagaaagaaaaaggtcaaaggagtttgcgaacgtacagtacagacataaaaaaacaaacacaagcagaaatatcaaatactgtgtttggttgttgtggcacgttgggcgtggtggaactgcggcacagttcttcgtgtagttttgcacaacttctgcctaaagttcgcactgatttcttgcactagatattcggggacaccacagctacctgcgcgcgtataaggtaaacaggccctaataacaaccgtctcaatattgtgtgatgtgtttgaggtcagatttgatcaatcaagaacatcttaacctataagatataggtaaataacaagccatctctttaacagtgaacatgtgtctctcaaacatattaaataatattggtgcggttagtgtgaagaaagtactgttagctgatttgttgtgaaagaaaaatattactgaatgactaacatctcttccaaactaaatgtttgcgtgtgaaataatggatattgtcggttccaaactaaatgtttgcgtgtgaaataatggatattgtcggatagagcacaaggtgctcaccttctgcacccaatataatttcactcaagaacgagcaggatatcgatcgacgatctcaaatgagcaacacgagctcagcataatatcgtgagccgtgatccgtcgccccgctagtctaaaaacggcccctaactaacgcttagttgcccgctagattagtcccccgttagtgcctagttagacacacgacgaactaggggctagcacgcgttacccgggataacttcgtatagcatacattatacgaagttatgaattccggaccgggttaccgaattcctgcccttaaggccaattgttcaagattcattcaacaattgaaacatctcccatgattaaatcagtataaggttgctatggtcttgcttgacaaagtttttttttgagggaatttcaactaaatttttgagtgaaactatcaaatactgattttaaaaaatttttataaaaggaagcgcagagataaaaggccatctatgctacaaaagtacccaaaaatgtaatcctaaagtatgaattgcattttttttttgtttggacgaaaggaaaggagtattaccacaagaatgatatcatcttcatatttagatcttttttgggtaaagcttgagattctctaaatatagagaaatcagaagaaaaaaaaaccgtgttttggtggttttgatttctagcctccacaataactttgacggcgtcgacaagtctaacggacaccaagcagcgaaccaccagcgccgagccaagcgaagcagacggccgagacgttgacaccttcggcgcggcatctctcgagagttccgctccggcgctccacctccaccgctggcggtttcttattccgttccgttccgcctcctgctctgctcctctccacaccacacggcacgaaaccgttacggcaccggcagcacccagcacgggagaggggattcctttcccaccgttccttccctttccgccccgccgctataaatagccagccccatccccagcttttttccccaatctcatctcctctctcctgttgttcggagcacacgcacaatccgatcgatccccaaatccccttcgtctctcctcgcgagcctcgtggatcccagcttcaaggtacggcgatcgatcatcccccctccttctctctaccttcttttctctagactacatcggatggcgatccatggttagggcctgctagtttcccttcctgttttgtcgatggctgcgaggcacaatagatctgatggcgttatgacggctaacttgtcatgttgttgcgatttatagtccctttaggagatcagtttaatttctcggatggttcgagatcggtggtccatggttagtaccctaagatccgcgctgttagggttcgtagatggaggcgacctgttctgattgttaacttgtcagtacctgggaaatcctgggatggttctagctcgtccgcagatgagatcgatttcatgatcctctgtatcttgtttcgttgcctaggttccgtctaatctatccgtggtatgatgtagatgttttgatcgtgctaactacgtcttgtaaagttaattgtcaggtcataatttttagcatgcctttttttttgtttggttttgtctaattgggctgtcgttctagatcagagtagaagactgttccaaactacctgctggatttattgaacttggatctgtatgtgtgtcacatatcttcataaattcatgattaagatggattgaaatatcttttatctttttggtatggatagttctatatgttggtgtggctttgttagatgtatacatgcttagatacatgaagcaacgtgctgctactgtttagtaattgctgttcatttgtctaataaacagataaggatatgtatttatgttgctgttggttttgctggtactttgttggatacaaatgcttcaatacagaaaacagcatgctgctacgatttaccatttatctaatcttatcatatgtctaatctaataaacaaacatgcttttaaattatcttcatatgcttggatgatggcatacacagcggctatgtgtggttttttaaatacccagcatcatgggcatgcatgacactgctttaatatgctttttatttgcttgagactgtttcttttgtttatactgaccctttagttcggtgactcttctgcaggtcgactttaacttagcctaggatccatggcccagtccaagcacggcctgaccaaggagatgaccatgaagtaccgcatggagggctgcgtggacggccacaagttcgtgatcaccggcgagggcatcggctaccccttcaagggcaagcaggccatcaacctgtgcgtggtggagggcggccccttgcccttcgccgaggacatcttgtccgccgccttcatgtacggcaaccgcgtgttcaccgagtacccccaggacatcgtcgactacttcaagaactcctgccccgccggctacacctgggaccgctccttcctgttcgaggacggcgccgtgtgcatctgcaacgccgacatcaccgtgagcgtggaggagaactgcatgtaccacgagtccaagttctacggcgtgaacttccccgccgacggccccgtgatgaagaagatgaccgacaactgggagccctcctgcgagaagatcatccccgtgcccaagcagggcatcttgaagggcgacgtgagcatgtacctgctgctgaaggacggtggccgcttgcgctgccagttcgacaccgtgtacaaggccaagtccgtgccccgcaagatgcccgactggcacttcatccagcacaagctgacccgcgaggaccgcagcgacgccaagaaccagaagtggcacctgaccgagcacgccatcgcctccggctccgccttgccctccggactcagatctcgatagggtaccaatggccagttaacagatccagctgctgctgttctagggttcacaagtctgcctatttgtcttccccaatggagctatggttgtctggtctggtccttggtcgtgtcccgtttcattgtgtactatttacctgtaatgtgtatccttaagtctggtttgatggtgtctgaaacgttttgctgtggtagagcagcatggaagaactataatgaataagtgatccctaatcattgtgtccaaattttgcttctgctatacccttttgtgctgtttcttatgttttgcttaaaaatttgatctgacaaacaaatttgtctaaattatgctcttgttctgactgtgtactgtacacatttgtattgctaccggtttggcacatagttttctctttgattgcagatcaaacccttctgattgcagattgcttggctatggctgatgtgctcactgttcttctttagcttgtatattgctgatggtggcttggctacggctgaaaaagttgctgctgcgccgacttggcaactgttgctccagtaatgctttgtcctctcttcctagccgccgacttggcacttggcagctgttgctcctgtaatgcgttgttatctcttatctcttgagatgtactatgattttgaggctgtttgacttgtgccagattgccagtgctgatgctatattatctcaggtttttatgctagtatatgttttactgtgtgctgcctgtgtcgagttacgtaatctattgaaccgctatgcgtgttgatgccctgttgttgcttgccagattgatgcccctgttgcttgcagcttgcaagctgtagtgaaatcctaaaattcgaaaccaaatctattctgaacttttgaagatctgtgatgtccggaagaaaagattcaaacagataaacgggactctccagaatctataaaataaatgatcgacaaacgctttgctttggtaggcttcctcaactttattatacaaagttgatagatcctacaggccagaatggcctctggattcagcggcctagaaggccgaagtacttggtcttcctaatatcggaccgaggaccgattaaactttaattcggtccgtcaatattcaccgaagcgactaattaactagctgtcccacggcctaactagcacttaatcccctagcctaacctaagagcgctaatctaggctagtggtcacttagggctttaaggctagcgtatacgaagttcctattccgaagttcctattcttcaaaaagtataggaacttctgtacacctgagcctaactaactaggacgtcccgaggtccgattccgggctaattaacacctagctcgccactcgactaattagggactaagcctagcgcttagccgttaaaacctagcacaccctaagcacccttagttaggttcccctcttaattaagccctagtgagcccctaagttaaggggacgctaagagccccctaacctagtattcggctagaggcgaactaggctaaacacctaagcgcacctctttaagctagatcgctagggggctaggctagagcttcgctagattagtctaagggcagctaactaactaggggcgcgtcaataccgaattcattccgattaatcgtggcctcttgctcttcaggatgaagagctatgtttaaacgtgcaagcgctactagacaattcagtacattaaaaacgtccgcaatgtgttattaagttgtctaagcgtcaatttgtttacaccacaatatatcctgccaccagccagccaacagctccccgaccggcagctcggcacaaaatcaccactcgatacaggcagcccatcagtccgggacggcgtcagcgggagagccgttgtaaggcggcagactttgctcatgttaccgatgctattcggaagaacggcaactaagctgccgggtttgaaacacggatgatctcgcggagggtagcatgttgattgtaacgatgacagagcgttgctgcctgtgatcaaatatcatctccctcgcagagatccgaattatcagccttcttattcatttctcgcttaaccgtgacaggcgcgcgcggtgccacctgggtccttttcatcacgtgctataaaaataattataatttaaattttttaatataaatatataaattaaaaatagaaagtaaaaaaagaaattaaagaaaaaatagtttttgttttccgaagatgtaaaagactctagggggatcgccaacaaatactaccttttatcttgctcttcctgctctcaggtattaatgccgaattgtttcatcttgtctgtgtagaagaccacacacgaaaatcctgtgattttacattttacttatcgttaatcgaatgtatatctatttaatctgcttttcttgtctaataaatatatatgtaaagtacgctttttgttgaaattttttaaacctttgtttatttttttttcttcattccgtaactcttctaccttctttatttactttctaaaatccaaatacaaaacataaaaataaataaacacagagtaaattcccaaattattccatcattaaaagatacgaggcgcgtgtaagttacaggcaagcgatccgtcctaagaaaccattattatcatgacattaacctataaaaataggcgtatcacgaggccctttcgtctcgcgcgtttcggtgatgacggtgaaaacctctgacacatgcagctcccggagacggtcacagcttgtctgtaagcggatgccgggagcagacaagcccgtcagggcgcgtcagcgggtgttggcgggtgtcggggctggcttaactatgcggcatcagagcagattgtactgagagtgcaccataccacagcttttcaattcaattcatcattttttttttattcttttttttgatttcggtttctttgaaatttttttgattcggtaatctccgaacagaaggaagaacgaaggaaggagcacagacttagattggtatatatacgcatatgtagtgttgaagaaacatgaaattgcccagtattcttaacccaactgcacagaacaaaaacctgcaggaaacgaagataaatcatgtcgaaagctacatataaggaacgtgctgctactcatcctagtcctgttgctgccaagctatttaatatcatgcacgaaaagcaaacaaacttgtgtgcttcattggatgttcgtaccaccaaggaattactggagttagttgaagcattaggtcccaaaatttgtttactaaaaacacatgtggatatcttgactgatttttccatggagggcacagttaagccgctaaaggcattatccgccaagtacaattttttactcttcgaagacagaaaatttgctgacattggtaatacagtcaaattgcagtactctgcgggtgtatacagaatagcagaatgggcagacattacgaatgcacacggtgtggtgggcccaggtattgttagcggtttgaagcaggcggcagaagaagtaacaaaggaacctagaggccttttgatgttagcagaattgtcatgcaagggctccctatctactggagaatatactaagggtactgttgacattgcgaagagcgacaaagattttgttatcggctttattgctcaaagagacatgggtggaagagatgaaggttacgattggttgattatgacacccggtgtgggtttagatgacaagggagacgcattgggtcaacagtatagaaccgtggatgatgtggtctctacaggatctgacattattattgttggaagaggactatttgcaaagggaagggatgctaaggtagagggtgaacgttacagaaaagcaggctgggaagcatatttgagaagatgcggccagcaaaactaaaaaactgtattataagtaaacgcgcgcgggcgcgccttttcagcctgatacagattaaatcagaacgcagaagcggtctgataaaacagaatttgcctggcggcagtagcgcggtggtcccacctgaccccatgccgaactcagaagtgaaacgccgtagcgccgatggtagtgtggggtctccccatgcgagagtagggaactgccaggcatcaaataaaacgaaaggctcagtcgaaagactgggcctttcgttttatctgttgtttgtcggtgaacgctctcctgagtaggacaaatccgccgggagcggatttgaacgttgcgaagcaacggcccggagggtggcgggcaggacgcccgccataaactgccaggcatcaaattaagcagaaggccatcctgacggatggcctttttgcgtttctacaaactcttaccgcacccggagcgggcgcgaggccgccaaggcccgaggcgtgaagtttggcccccgccctaccctcaccccggcacagatcgcgcacgcccgcgagctgatcgaccaggaaggccgcaccgtgaaagaggcggctgcactgcttggcgtgcatcgctcgaccctgtaccgcgcacttgagcgcagcgaggaagtgacgcccaccgaggccaggcggcgcggtgccttccgtgaggacgcattgaccgaggccgacgccctggcggccgccgagaatgaacgccaagaggaacaagcatgaaaccgcaccaggacggccaggacgaaccgtttttcattaccgaagagatcgaggcggagatgatcgcggccgggtacgtgttcgagccgcccgcgcacgtctcaaccgtgcggctgcatgaaatcctggccggtttgtctgatgccaagctggcggcctggccggccagcttggccgctgaagaaaccgagcgccgccgtctaaaaaggtgatgtgtatttgagtaaaacagcttgcgtcatgcggtcgctgcgtatatgatgcgatgagtaaataaacaaatacgcaaggggaacgcatgaaggttatcgctgtacttaaccagaaaggcgggtcaggcaagacgaccatcgcaacccatctagcccgcgccctgcaactcgccggggccgatgttctgttagtcgattccgatccccagggcagtgcccgcgattgggcggccgtgcgggaagatcaaccgctaaccgttgtcggcatcgaccgcccgacgattgaccgcgacgtgaaggccatcggccggcgcgacttcgtagtgatcgacggagcgccccaggcggcggacttggctgtgtccgcgatcaaggcagccgacttcgtgctgattccggtgcagccaagcccttacgacatatgggccaccgccgacctggtggagctggttaagcagcgcattgaggtcacggatggaaggctacaagcggcctttgtcgtgtcgcgggcgatcaaaggcacgcgcatcggcggtgaggttgccgaggcgctggccgggtacgagctgcccattcttgagtcccgtatcacgcagcgcgtgagctacccaggcactgccgccgccggcacaaccgttcttgaatcagaacccgagggcgacgctgcccgcgaggtccaggcgctggccgctgaaattaaatcaaaactcatttgagttaatgaggtaaagagaaaatgagcaaaagcacaaacacgctaagtgccggccgtccgagcgcacgcagcagcaaggctgcaacgttggccagcctcgcagacacgccagccatgaagcgggtcaactttcagttgccggcggaggatcacaccaagctgaagatgtacgcggtacgccaaggcaagaccattaccgagctg

SEQ ID NO: 77 - DNA, 20950 bp, Artificial sequence
  PHP97334
gtttacccgccaatatatcctgtcaaacactgcggccgcacttgaccgcggatggagccggagctgtggtgaggccatcgacgggaggtgggggagaacacagtctcagtgttctttgtgagtccgcaaggtttttagcttttctgtattaattaaggttgctgttggctgtagaatacggtcgtggaagagctgtatcggtagctactacgtaagctattatatactggaagtctggagctcgtcgatctccggtcgtcttcctccatttctcctcgtcttgctttgactgctgctaccatttgcttctgttttctgatgaagcatgccatgtcggccaccagtgtttgtgtggtttttgcagggaatggctttcaagtgctgtgattgaatggccctcgtcgtcctcggctgagctcacatggacgcgtcatgtgagtgagatatatgatcatatgatgagtggggttcgggtgagtgcgtacttgaagtaggatcccgctttcactcattcattcattggcctttaaaccgggaaattttcgcgaggagatggagggaagcaagcagggtgacgagtgcagagtgccgcgagcgctttgtcaaaaggcaccgccgtaggcaaaaaaatcaatggccctgactgactcgatggtagtactactgtagagactagagagggttgctccccatatcttcgtgtgacttttactccagcattgcatttccgtcattgagacgttaattaatagcagctttcgggacagatgactgtggccatgtttcgtcacggccgcttcgtgccagctgggggtactatagtactgtgattttgttagtaaaaactttcattaggccaccattgacgaccgggccttcgcttttgctgcgctaattaaccatttcccggcgaccgaagggaacatgaacatgccccgacacatgagggcatgaggactagtgttctccctgtcgttcgttgacttgactagtgatagtttaaacgctcttcaactggaagagcggttactaccggttcactagctagctgctaatcgagctagttaccctatgaggtgacatgaagcgctcacggttactatgacggttagcttcacgactgttggtggcagtagcgtacgacttagctatagttccggacttacctagctaataacttcgtatagcatacattatacgaagttatggttaccgagctgttaccaagcggccgcacactgatagtttaaactgaaggcgggaaacgacaatctgatcatgagcggagaattaagggagtcacgttatgacccccgccgatgacgcgggacaagccgttttacgtttggaactgacagaaccgcaacgattgaaggagccactcagccgcgggtttctggagtttaatgagctaagcacatacgtcagaaaccattattgcgcgttcaaaagtcgcctaaggtcactatcagctagcaaatatttcttgtcaaaaatgctccactgacgttccataaattcccctcggtatccaattagagtctcatattcactcccatggcggccaatgcgggcggcggtggagcgggaggaggcagcggcagcggcagcgtggctgcgccggcggtgtgccgccccagcggctcgcggtggacgccgacgccggagcagatcaggatgctgaaggagctctactacggctgcggcatccggtcgcccagctcggagcagatccagcgcatcaccgccatgctgcggcagcacggcaagatcgagggcaagaacgtcttctactggttccagaaccacaaggcccgcgagcgccagaagcgccgcctcaccagcctcgacgtcaacgtgcccgccgccggcgcggccgacgccaccaccagccaactcggcgtcctctcgctgtcgtcgccgccgccttcaggcgcggcgcctccctcgcccaccctcggcttctacgccgccggcaatggcggcggatcggctgtgctgctggacacgagttccgactggggcagcagcggcgctgctatggccaccgagacatgcttcctgcaggactacatgggcgtgacggacacgggcagctcgtcgcagtggccacgcttctcgtcgtcggacacgataatggcggcggccgcggcgcgggcggcgacgacgcgggcgcccgagacgctccctctcttcccgacctgcggcgacgacggcggcagcggtagcagcagctacttgccgttctggggtgccgcgtccacaactgccggcgccacttcttccgttgcgatccaacagcaacaccagctgcaggagcagtacagcttttacagcaacagcaacagcacccagctggccggcaccggcaaccaagacgtatcggcaacagcagcagcagccgccgccctggagctgagcctcagctcatggtgctccccttaccctgctgcagggagtatgtgagagcaacgcgagctgccactgctcttcactgatgtctctggaatggaaggaggaggaagtgagaacagatcattcgacaaagcagcattagtccgttgatcggtggaagaccactcgtcagtgttgagttgaatgtttgatcaataaaatacggcaatgctgtaagggttgttttttatgccattgataatacactgtactgttcagttgttgaactctatttcttagccatgccaagtgcttttcttattttgaataacattacagcaaaaagttgaaagacaaaaaaaaaaacccccgaacagagtgctttgggtcccaagcttctttagactgtgttcggcgttccccctaaatttctccccctatatctcactcacttgtcacatcagcgttctctttccccctatatctccacgctctacagcagttccacctatatcaaacctctataccccaccacaacaatattatatactttcatcttcaactaactcatgtaccttccaatttttttctactaataattatttacgtgcacagaaacttagcaaggagagagagagcgggaatttaaatgctcggcgttaggcttttagtccgctaggtggctagaccgaggttaggacgctagttcactaggggcctagtggtgttttaagacgtcacggtcactacgaatcgaccgaagcttgcatgggccgcatcgagcagctggcttgtggggaccagacaaaaaaggaatggtgcagaattgttaggcgcacctaccaaaagcatctttgcctttattgcaaagataaagcagattcctctagtacaagtggggaacaaaataacgtggaaaagagctgtcctgacagcccactcactaatgcgtatgacgaacgcagtgacgaccacaaaactcgagcaacgagatcatgagccaatcaaagaggagtgatgtagacctaaagcaataatggagccatgacgtaagggcttacgcccatacgaaataattaaaggctgatgtgacctgtcggtctctcagaacctttactttttatgtttggcgtgtatttttaaatttccacggcaatgacgatgtgaccgtcgacccactaaaacattgctttgtcaaaagctaaaaaagatgatgcccgacagccacttgtgtgaagcatgagaagccggtccctccactaagaaaattagtgaagcatcttccagtggtccctccactcacagctcaatcagtgagcaacaggacgaaggaaatgacgtaagccatgacgtctaatcccagggccagcttgcatgcctgcagtgcagcgtgacccggtcgtgcccctctctagagataatgagcattgcatgtctaagttataaaaaattaccacatattttttttgtcacacttgtttgaagtgcagtttatctatctttatacatatatttaaactttactctacgaataatataatctatagtactacaataatatcagtgttttagagaatcatataaatgaacagttagacatggtctaaaggacaattgagtattttgacaacaggactctacagttttatctttttagtgtgcatgtgttctcctttttttttgcaaatagcttcacctatataatacttcatccattttattagtacatccatttagggtttagggttaatggtttttatagactaatttttttagtacatctattttattctattttagcctctaaattaagaaaactaaaactctattttagtttttttatttaataatttagatataaaatagaataaaataaagtgactaaaaattaaacaaataccctttaagaaattaaaaaaactaaggaaacatttttcttgtttcgagtagataatgccagcctgttaaacgccgtcgacgagtctaacggacaccaaccagcgaaccagcagcgtcgcgtcgggccaagcgaagcagacggcacggcatctctgtcgctgcctctggacccctctcgagagttccgctccaccgttggacttgctccgctgtcggcatccagaaattgcgtggcggagcggcagacgtgagccggcacggcaggcggcctcctcctcctctcacggcaccggcagctacgggggattcctttcccaccgctccttcgctttcccttcctcgcccgccgtaataaatagacaccccctccacaccctctttccccaacctcgtgttgttcggagcgcacacacacacaaccagatctcccccaaatccacccgtcggcacctccgcttcaaggtacgccgctcgtcctcccccccccccctctctaccttctctagatcggcgttccggtccatgcatggttagggcccggtagttctacttctgttcatgtttgtgttagatccgtgtttgtgttagatccgtgctgctagcgttcgtacacggatgcgacctgtacgtcagacacgttctgattgctaacttgccagtgtttctctttggggaatcctgggatggctctagccgttccgcagacgggatcgatttcatgattttttttgtttcgttgcatagggtttggtttgcccttttcctttatttcaatatatgccgtgcacttgtttgtcgggtcatcttttcatgcttttttttgtcttggttgtgatgatgtggtctggttgggcggtcgttctagatcggagtagaattctgtttcaaactacctggtggatttattaattttggatctgtatgtgtgtgccatacatattcatagttacgaattgaagatgatggatggaaatatcgatctaggataggtatacatgttgatgcgggttttactgatgcatatacagagatgctttttgttcgcttggttgtgatgatgtggtgtggttgggcggtcgttcattcgttctagatcggagtagaatactgtttcaaactacctggtgtatttattaattttggaactgtatgtgtgtgtcatacatcttcatagttacgagtttaagatggatggaaatatcgatctaggataggtatacatgttgatgtgggttttactgatgcatatacatgatggcatatgcagcatctattcatatgctctaaccttgagtacctatctattataataaacaagtatgttttataattattttgatcttgatatacttggatgatggcatatgcagcagctatatgtggatttttttagccctgccttcatacgctatttatttgcttggtactgtttcttttgtcgatgctcaccctgttgtttggtgttacttctgcaggtcgactttaacttagcctaggatccatggccactgtgaacaactggctcgctttctccctctccccgcaggagctgccgccctcccagacgacggactccacactcatctcggccgccaccgccgaccatgtctccggcgatgtctgcttcaacatcccccaagattggagcatgaggggatcagagctttcggcgctcgtcgcggagccgaagctggaggacttcctcggcggcatctccttctccgagcagcatcacaaggccaactgcaacatgatacccagcactagcagcacagtttgctacgcgagctcaggtgctagcaccggctaccatcaccagctgtaccaccagcccaccagctcagcgctccacttcgcggactccgtaatggtggcttcctcggccggtgtccacgacggcggtgccatgctcagcgcggccgccgctaacggtgtcgctggcgctgccagtgccaacggcggcggcatcgggctgtccatgattaagaactggctgcggagccaaccggcgcccatgcagccgagggtggcggcggctgagggcgcgcaggggctctctttgtccatgaacatggcggggacgacccaaggcgctgctggcatgccacttctcgctggagagcgcgcacgggcgcccgagagtgtatcgacgtcagcacagggtggagccgtcgtcgtcacggcgccgaaggaggatagcggtggcagcggtgttgccggcgctctagtagccgtgagcacggacacgggtggcagcggcggcgcgtcggctgacaacacggcaaggaagacggtggacacgttcgggcagcgcacgtcgatttaccgtggcgtgacaaggcatagatggactgggagatatgaggcacatctttgggataacagttgcagaagggaagggcaaactcgtaagggtcgtcaagtctatttaggtggctatgataaagaggagaaagctgctagggcttatgatcttgctgctctgaagtactggggtgccacaacaacaacaaattttccagtgagtaactacgaaaaggagctcgaggacatgaagcacatgacaaggcaggagtttgtagcgtctctgagaaggaagagcagtggtttctccagaggtgcatccatttacaggggagtgactaggcatcaccaacatggaagatggcaagcacggattggacgagttgcagggaacaaggatctttacttgggcaccttcagcacccaggaggaggcagcggaggcgtacgacatcgcggcgatcaagttccgcggcctcaacgccgtcaccaacttcgacatgagccgctacgacgtgaagagcatcctggacagcagcgccctccccatcggcagcgccgccaagcgcctcaaggaggccgaggccgcagcgtccgcgcagcaccaccacgccggcgtggtgagctacgacgtcggccgcatcgcctcgcagctcggcgacggcggagccctggcggcggcgtacggcgcgcactaccacggcgccgcctggccgaccatcgcgttccagccgggcgccgccagcacaggcctgtaccacccgtacgcgcagcagccaatgcgcggcggcgggtggtgcaagcaggagcaggaccacgcggtgatcgcggccgcgcacagcctgcaggacctccaccacctgaacctgggcgcggccggcgcgcacgactttttctcggcagggcagcaggccgccgccgctgcgatgcacggcctgggtagcatcgacagtgcgtcgctcgagcacagcaccggctccaactccgtcgtctacaacggcggggtcggcgacagcaacggcgccagcgccgtcggcggcagtggcggtggctacatgatgccgatgagcgctgccggagcaaccactacatcggcaatggtgagccacgagcaggtgcatgcacgggcctacgacgaagccaagcaggctgctcagatggggtacgagagctacctggtgaacgcggagaacaatggtggcggaaggatgtctgcatgggggactgtcgtgtctgcagccgcggcggcagcagcaagcagcaacgacaacatggccgccgacgtcgggcatggcggcgcgcagctcttcagtgtctggaacgacacttaagcgtacctagtggtacctgacatcttatagtctgcaacctctcgtgtctgaattcctatctttatcaagtgttattgcttccacgactataggacagctttcgtcgaaagcttttgctcatgtgatctcgaaggattcatctagtctgatttttcgtgacttgtatcggttttattggattcatccaacatatatcaataaaaaatgagttgtgtttcctttcttcctagttcagttaaaattatttccctcctgcgcttgtgctgtaattgtctgtgtacctgttgtttgtgactgtgttagttcccttggatatgatttcgtatttgatatgtacatggagatagcttagcttcattattggagtatgaagttagtatgacatagtcactctcctggaaaattgacactgcaaaccatatttttattctgaaccacaaatcctagtcagtccgctggcatatgccgtccgtttgctgaatccagaacgtgggtttggagatgtacggctgagatgcctctatgcgaaggggatttcgtggtgaaacgagatgggagtagagcaacgcccgtggaagatgcttcaaacttccacacttttgagcaacgatcggcagtagtaaggtagacgatttcaagatcaaagcatatgaagataaacaacatcaacaacaaaatttgttggggttctatagagagaaacagagctacatacatacactgttttgtatctaccatctgagatgatgaaaagatgaaaaactaaagaatgccccggcgccaacgccaggacacgccgcgcgcgcgtcacccgagccatctcttgacccagccggcgctgtatatttacacacgttgcagcatcgatcaccacctgttcgatcgcgtcgccgtcaccggcgcgccgcgacttattgaactagtctagggcgcggctaacaacctagcttagattgccttgtctaaacccttaggctaacgcgccactctagaaggccgatctcccccgaacgcgccagatccgatatcgatgggccctggccgaagcttggtcacccgcaccttgctagttggatattacctcttctcttcaaagtatccttgaacgctcaccggttatcaaatctctacactatagctctgtagtcttgctagatagttagttctttagctctctctagaggttcacaaactcaatacaacacacagtggagtagggtattacgctccggcggcccgaaccactctaaatccttgtgtcctcgtgtgctcttccaccattaatgactgtaattgcagggacacgaagagttgtagcgcttttgccaacaagatccgctatatgctagtagagtggaacctgcacagcaacaagcatccaataatctgagaataagaattatgtgtggtgatggttctcatctctgcaactcgccattttcgcgagagaaccaaatccaagttggtgaagatcatgatttgggctcatgggctggcatagtagctattacctttgcaattgtggttcgaatctatccgatattctccttttcagggagagctaatgcttatgcttattgggtattttggtttgacactgcttcacgcccaaaaaaaggcaactatgtctgagttggatatggcccaaaaaaaggcagctatgtctgagttggatatggaagtcttctttcgtttagggtgaagtaagaccaagctcatgagcttattatcttaggtcggaacaaattagttgataggcatggcacatttatcaaattataatgattttaacagaaaagcaacacctctttttcagcagcaccagctttgcaagctgcaattgacactccaagcatagtatttgctccaaactcagcctgcatttcgcacaatatcatatctatttccatttggataaaatatattttccagaaatatgggaacagaatcaagatacagaaaaaagttgtggtagtagtggtaagtggaaacacaagtacagtgaaaagatagcattatttctgaacagtcaaattaaccgaaataagtagtatcacatactgcccctaaattgactacacccaatgtaaagaattgcttgagcatattgagccatcagttgtttgtttgtgtaacggatttgacaatgcagagttcaggagcaaaaaaccgcaaaggagagaaagagggaaaggatctcctagtatcccaccttgtggcgcgccctgtcaagtgcatgatggcctggtcgatctgcgtctgctgctgcggttccatcccaacgagtgcctccgacaccttgtcgttgatcacccgcaccgcgtaggcgacccccctggcgaggaacttccgcctctcggaggccccggccgcgtcggcggcggcgccctcgagcgcgcccacgctagccgtagatgctcggtgcacggccttgttggtgtgcaactcgacctcaacggccggtgcgctacgcccgtcaaggatctggcgcgcccgcaccctcgtgatcacggtgggcgcctcccgcctcatgtggccgacgatgaaaagcgccgggttaggggccttggcgcgcaccgccgtattcagggcctcctcgctcttgcgcgagagcaggtgcttccccaggtactcctgcactgacaaggctgccacagcggtggaatttgtcctcacgacttcgccacgtcgtcctcacctccctggcttcccacgactccgccgtatcgaggtgctcggtgggtcgtcttaatccgaagtccgaactaggaagacgagacagagaggtctgaggaatgggcctcgtttgatgttgagctgaattatttttccagcataagcccaggtcttggtccatgaacaaaattactagaaacccagcccagtactacgatctaaaagagggactgccactggatagctctctctagcattctccacgctccaatacagcggcgtcgtgtctatccgggtctatccgcgaacacgtgagaactctccagaaactgctttctcctccacttcatctctctcgctttccctctataaaaagaccccttctaggaattgagggagacagcaagcaccaagcagcgatccgaagctcaatcaattcactcaaacctcttccccaaatcttcgattagatcttcgttgacaagaagactagaaccgaacctgacatgtccaacctgctcacggttcaccagaaccttccggctcttccagtggacgcgacgtccgatgaagtcaggaagaacctcatggacatgttccgcgacaggcaagcgttcagcgagcacacctggaagatgctgctctccgtctgccgctcctgggctgcatggtgcaagctgaacaacaggaagtggttccccgctgagcccgaggacgtgagggattaccttctgtacctgcaagcgcgaggtttgtttctgcttctacctttgatatatatataataattatcattaattagtagtaatataatatttcaaatatttttttcaaaataaaagaatgtagtatatagcaattgcttttctgtagtttataagtgtgtatattttaatttataacttttctaatatatgaccaaaacatggtgatgcctaggtctggcagtgaagaccatccagcaacaccttggacaactgaacatgcttcacaggcgctccggcctcccgcgccccagcgactcgaacgccgtgagcctcgtcatgcgccgcatcaggaaggaaaacgtcgatgccggcgaaagggcaaagcaggccctcgcgttcgagaggaccgatttcgaccaggtccgcagcctgatggagaacagcgacaggtgccaggacattaggaacctggcgttcctcggaattgcatacaacacgctcctcaggatcgcggaaattgcccgcattcgcgtgaaggacattagccgcaccgacggcggcaggatgcttatccacattggcaggaccaagacgctcgtttccaccgcaggcgtcgaaaaggccctcagcctcggagtgaccaagctcgtcgaacgctggatctccgtgtccggcgtcgcggacgacccaaacaactacctcttctgccgcgtccgcaagaacggggtggctgcccctagcgccaccagccaactcagcacgagggccttggaaggtattttcgaggccacccaccgcctgatctacggcgcgaaggatgacagcggtcaacgctacctcgcatggtccgggcactccgcccgcgttggagctgctagggacatggcccgcgccggtgtttccatccccgaaatcatgcaggcgggtggatggacgaacgtgaacattgtcatgaactacattcgcaaccttgacagcgagacgggcgcaatggttcgcctcctggaagatggtgactgaggtacccaacctagacttgtccatcttctggattggccaacttaattaatgtatgaaataaaaggatgcacacatagtgacatgctaatcactataatgtgggcatcaaagttgtgtgttatgtgtaattactagttatctgaataaaagagaaagagatcatccatatttcttatcctaaatgaatgtcacgtgtctttataattctttgatgaaccagatgcatttcattaaccaaatccatatacatataaatattaatcatatataattaatatcaattgggttagcaaaacaaatctagtctaggtgtgttttgcgatccgatatcgacgtctaaaaacggcccctaactaacgcttagttgcccgctagattagtcccccgttagtgcctagttagacacacgacgaactaggggctagtgccaccttgctagttggatattacctcttctcttcaaagtatccttgaacgctcaccggttatcaaatctctacactatagctctgtagtcttgctagatagttagttctttagctctcgcacgataacttcgtatagcatacattatacgaagttataacagcggaccgggttaccgaattcctgcccttaaggccaattgttcaagattcattcaacaattgaaacatctcccatgattaaatcagtataaggttgctatggtcttgcttgacaaagtttttttttgagggaatttcaactaaatttttgagtgaaactatcaaatactgattttaaaaaatttttataaaaggaagcgcagagataaaaggccatctatgctacaaaagtacccaaaaatgtaatcctaaagtatgaattgcattttttttttgtttggacgaaaggaaaggagtattaccacaagaatgatatcatcttcatatttagatcttttttgggtaaagcttgagattctctaaatatagagaaatcagaagaaaaaaaaaccgtgttttggtggttttgatttctagcctccacaataactttgacggcgtcgacaagtctaacggacaccaagcagcgaaccaccagcgccgagccaagcgaagcagacggccgagacgttgacaccttcggcgcggcatctctcgagagttccgctccggcgctccacctccaccgctggcggtttcttattccgttccgttccgcctcctgctctgctcctctccacaccacacggcacgaaaccgttacggcaccggcagcacccagcacgggagaggggattcctttcccaccgttccttccctttccgccccgccgctataaatagccagccccatccccagcttttttccccaatctcatctcctctctcctgttgttcggagcacacgcacaatccgatcgatccccaaatccccttcgtctctcctcgcgagcctcgtggatcccagcttcaaggtacggcgatcgatcatcccccctccttctctctaccttcttttctctagactacatcggatggcgatccatggttagggcctgctagtttcccttcctgttttgtcgatggctgcgaggcacaatagatctgatggcgttatgacggctaacttgtcatgttgttgcgatttatagtccctttaggagatcagtttaatttctcggatggttcgagatcggtggtccatggttagtaccctaagatccgcgctgttagggttcgtagatggaggcgacctgttctgattgttaacttgtcagtacctgggaaatcctgggatggttctagctcgtccgcagatgagatcgatttcatgatcctctgtatcttgtttcgttgcctaggttccgtctaatctatccgtggtatgatgtagatgttttgatcgtgctaactacgtcttgtaaagttaattgtcaggtcataatttttagcatgcctttttttttgtttggttttgtctaattgggctgtcgttctagatcagagtagaagactgttccaaactacctgctggatttattgaacttggatctgtatgtgtgtcacatatcttcataaattcatgattaagatggattgaaatatcttttatctttttggtatggatagttctatatgttggtgtggctttgttagatgtatacatgcttagatacatgaagcaacgtgctgctactgtttagtaattgctgttcatttgtctaataaacagataaggatatgtatttatgttgctgttggttttgctggtactttgttggatacaaatgcttcaatacagaaaacagcatgctgctacgatttaccatttatctaatcttatcatatgtctaatctaataaacaaacatgcttttaaattatcttcatatgcttggatgatggcatacacagcggctatgtgtggttttttaaatacccagcatcatgggcatgcatgacactgctttaatatgctttttatttgcttgagactgtttcttttgtttatactgaccctttagttcggtgactcttctgcaggtcgactttaacttagcctaggatccatggcccagtccaagcacggcctgaccaaggagatgaccatgaagtaccgcatggagggctgcgtggacggccacaagttcgtgatcaccggcgagggcatcggctaccccttcaagggcaagcaggccatcaacctgtgcgtggtggagggcggccccttgcccttcgccgaggacatcttgtccgccgccttcatgtacggcaaccgcgtgttcaccgagtacccccaggacatcgtcgactacttcaagaactcctgccccgccggctacacctgggaccgctccttcctgttcgaggacggcgccgtgtgcatctgcaacgccgacatcaccgtgagcgtggaggagaactgcatgtaccacgagtccaagttctacggcgtgaacttccccgccgacggccccgtgatgaagaagatgaccgacaactgggagccctcctgcgagaagatcatccccgtgcccaagcagggcatcttgaagggcgacgtgagcatgtacctgctgctgaaggacggtggccgcttgcgctgccagttcgacaccgtgtacaaggccaagtccgtgccccgcaagatgcccgactggcacttcatccagcacaagctgacccgcgaggaccgcagcgacgccaagaaccagaagtggcacctgaccgagcacgccatcgcctccggctccgccttgccctccggactcagatctcgatagggtaccaatggccagttaacagatccagctgctgctgttctagggttcacaagtctgcctatttgtcttccccaatggagctatggttgtctggtctggtccttggtcgtgtcccgtttcattgtgtactatttacctgtaatgtgtatccttaagtctggtttgatggtgtctgaaacgttttgctgtggtagagcagcatggaagaactataatgaataagtgatccctaatcattgtgtccaaattttgcttctgctatacccttttgtgctgtttcttatgttttgcttaaaaatttgatctgacaaacaaatttgtctaaattatgctcttgttctgactgtgtactgtacacatttgtattgctaccggtttggcacatagttttctctttgattgcagatcaaacccttctgattgcagattgcttggctatggctgatgtgctcactgttcttctttagcttgtatattgctgatggtggcttggctacggctgaaaaagttgctgctgcgccgacttggcaactgttgctccagtaatgctttgtcctctcttcctagccgccgacttggcacttggcagctgttgctcctgtaatgcgttgttatctcttatctcttgagatgtactatgattttgaggctgtttgacttgtgccagattgccagtgctgatgctatattatctcaggtttttatgctagtatatgttttactgtgtgctgcctgtgtcgagttacgtaatctattgaaccgctatgcgtgttgatgccctgttgttgcttgccagattgatgcccctgttgcttgcagcttgcaagctgtagtgaaatcctaaaattcgaaaccaaatctattctgaacttttgaagatctgtgatgtccggaagaaaagattcaaacagataaacgggactctccagaatctataaaataaatgatcgacaaacgctttgctttggtaggcttcctagttagttagcggaccgaagcttcggtccgggcctgcggccgcagatatcagaacctgcgtctggacgcacaagtcatagcattatcggctaaaatttcttaatttctaaattagtcatatcggctaagaaagtggggagcactatcatttcgtagaacaagaacaaggtatcatatatatatatatatataatatttaaactttgttaagtggaatcaaagtgctagtattaatggagtttcatgtgcattaaattttatgtcacatcagcaattttgttgacttggcaaggtcatttagggtgtgtttggaagacaggggctattaggagtattaaacatagtctaattacaaaactaattgcacaaccgctaagctgaatcgcgagatggatctattaagcttaattagtccatgatttgacaatgtggtgctacaataaccatttgctaatgatggattacttaggtttaatagattcgtctcgtgatttagcctatgggttctgctattaattttgtaattagctcatatttagttcttataattagtatccgaacatccaatgtgacatgctaaagtttaaccctggtatccaaatgaagtcttatgagagtttcatcactccggtggtatatgtacttaggctccgttttcttccaccgacttatttttagcacccgtcacattgaatgtttagatactaattagaagtattaaacgtagactatttacaaaatccattacataagacgaatctaaacggcgagacgaatctattaaacctaattagtccatgatttgacaatgtgttgctacagtaaacatttgctaatgatggattaattaggcttaatagattcgtctcgccgtttagcctccacttatgtaatgggttttctaaacaatctacgtttaatactcctaattagtatctaaatattcaatgtgacacgtgctaaaaataagtcagtggaaggaagagaacgtccccttagttttccatcttattaattgtacgatgaaactgtgcagccagatgattgacaatcgcaatacttcaactagtgggccatgcacatcagcgacgtgtaacgtcgtgagttgctgttcccgtagagaaatatcaactggtgggccacgcacatcagcgtcgtgtaacgtggacggaggagccccgtgacggcgtcgacatcgaacggccaccaaccacggaaccacccgtccccacctctcggaagctccgctccacggcgtcgacatctaacggctaccagcaggcgtacgggttggagtggactccttgcctctttgcgctggcggcttccggaaattgcgtggcggagacgaggcgggctcgtctcacacggcacggaagacgtcacgggttccttccccacctctcctcttccccaccgccataaatagccgaccccctcgcctttctccccaatctcatctcgtctcgtgttgttcggagcacaccacccgccccaaatcgttcttcccgcaagcctcggcgatccttcacccgcttcaaggtacggcgatcgtcttcctcctctagatcggcgtgatctgcaagtagttgatttggtagatggttaggatctgtgcactgaagaaatcatgttagatccgcgatgtttctgttcgtagatggctgggaggtggaatttttgtgtagatctgatatgttctcctgtttatcttgtcacgctcctgcgatttgtggggattttaggtcgttgatctgggaatcgtggggttgcttctaggctgttcgtagatgaggtcgttctcacggtttactggatcattgcctagtagatcagctcgggctttcgtctttgtatatggtgcccatacttgcatctatgatctggttccgtggtgttacctaggtttctgcgcctgattcgtccgatcgattttgttagcatgtggtaaacgtttggtcatggtctgatttagattagagtcgaataggatgatctcgatctagctcttgggattaatatgcatgtgtcaccaatctgttccgtggttaagatgatgaatctatgcttagttaatgggtgtagatatatatgctgctgttcctcaatgatgccgtagcttttacctgagcagcatggatcgtcctgttacttaggtagatgcacatgcttatagatcaagatatgtactgctactgttggaattctttagtatacctgatgatcatccatgctcttgttacttgttttggtatacttggatgatggcatgctgctgctttttgttgatttgagcccatccatatctgcatatgtcacatgattaagatgattacgctgtttctgtatgatgccatagcttttatgtgagcaacatgcatcctcctggttatatgcattaatagatggaagatatctattgctacaatttgatgattattttgtacatacgatgatcaagcatgctcttcatactttgttgatatacttggataatgaaatgctgctgcacgttcattctatagcactaatgatgtgatgaacacgcacgacctgtttgtggcatctgtttgaatgtgttgttgctgttcactagagactgttttattaacctactgctagatacttacccttctgtctgtttattcttttgcagccagaatagcggatccgcccatggtcgaacaggacggcctgcatgcaggatcaccagcggcctgggtcgaaagactcttcggctacgactgggcacaacagaccatcgggtgtagcgacgcagctgttttcaggctgtccgcacagggcagacccgttttgttcgtcaaaacagacctgtctggcgcgctcaacgaactgcaagacgaggccgcaagactgagctggcttgctaccacaggcgttccttgtgctgcagtcctcgacgtcgttactgaggctggaagagactggctgctcctgggtgaagtcccaggacaggaccttttgtccagccatctggcacctgccgaaaaggtcagcatcatggcagacgccatgagaaggctgcacacactcgaccctgcaacatgccccttcgatcaccaggcaaaacacaggatcgagcgcgcaagaacgcgcatggaggctggtttggtcgaccaagatgacctcgacgaggaacaccaaggactggctcctgctgaactcttcgccagactcaaggcgagaatgccagacggtgacgacctggtcgtcacacacggcgacgcttgtctcccaaacataatggtcgagaacggacgcttcagcggtttcatcgactgcggtagactcggagtcgctgacagataccaggacatcgccctggcaacacgcgacatcgcagaggaactcggaggcgaatgggctgacaggtttctcgtgctctacggtatcgctgctccagacagccagaggatcgcattctacaggctcctcgacgagttcttttagttcgaacggtacccggggatcctctagtgccgtgggtcgtttaagctgccgctgtacctgtgtcgtctggtgccttctggtgtacctgggaggttgtcgtctatcaagtatctgtggttggtgtcatgagtcagtgagtcccaatactgttcgtgtcctgtgtgcattatacccaaaactgttatgggcaaatcatgaataagcttgatgttcgaacttaaaagtctctgctcaatatggtattatggttgtttttgttcgtctcctaatatttgcctgggatcaaattttattggctggtgttcatttgacctccatgttcttgctaggctccattttttactctacagccataatatgtttgattgtttggtttgttctttgttgtacacctggttctgtcgagcttagttttcgacactggcttacagcttaacatgttgctattttattgggttctgattgctattttattgggttctgattgctagtttttgctgaatccaaaaaccatgttatttatttaagcgatccaggttattattatgatggtggctaagtttttttttttccaagggtaaattttctggattctccagtgtttctgtggccgaattcaatcactagagtcgacctgcatgattccgatgacttcgtaggttcctagctcaagccgctcgtgtccaagcgtcacttacgattagctaatgattacggcatctaggaccgactagctagctagctaagagctcggtaccgagctcgaattcattccgattaatcgtggcctcttgctcttcaggatgaagagctatgtttaaacgtgcaagcgctactagacaattcagtacattaaaaacgtccgcaatgtgttattaagttgtctaagcgtcaatttgtttacaccacaatatatcctgcca

SEQ ID NO: 78 - DNA, 20983 bp, Artificial sequence
  PHP97335
gtttacccgccaatatatcctgtcaaacactgcggccgcacttgaccgcggatggagccggagctgtggtgaggccatcgacgggaggtgggggagaacacagtctcagtgttctttgtgagtccgcaaggtttttagcttttctgtattaattaaggttgctgttggctgtagaatacggtcgtggaagagctgtatcggtagctactacgtaagctattatatactggaagtctggagctcgtcgatctccggtcgtcttcctccatttctcctcgtcttgctttgactgctgctaccatttgcttctgttttctgatgaagcatgccatgtcggccaccagtgtttgtgtggtttttgcagggaatggctttcaagtgctgtgattgaatggccctcgtcgtcctcggctgagctcacatggacgcgtcatgtgagtgagatatatgatcatatgatgagtggggttcgggtgagtgcgtacttgaagtaggatcccgctttcactcattcattcattggcctttaaaccgggaaattttcgcgaggagatggagggaagcaagcagggtgacgagtgcagagtgccgcgagcgctttgtcaaaaggcaccgccgtaggcaaaaaaatcaatggccctgactgactcgatggtagtactactgtagagactagagagggttgctccccatatcttcgtgtgacttttactccagcattgcatttccgtcattgagacgttaattaatagcagctttcgggacagatgactgtggccatgtttcgtcacggccgcttcgtgccagctgggggtactatagtactgtgattttgttagtaaaaactttcattaggccaccattgacgaccgggccttcgcttttgctgcgctaattaaccatttcccggcgaccgaagggaacatgaacatgccccgacacatgagggcatgaggactagtgttctccctgtcgttcgttgacttgactagtgatagtttaaacgctcttcaactggaagagcggttactaccggttcactagctagctgctaatcgagctagttaccctatgaggtgacatgaagcgctcacggttactatgacggttagcttcacgactgttggtggcagtagcgtacgacttagctatagttccggacttacctagctaataacttcgtatagcatacattatacgaagttatggttaccgcggccgcagatatcagaacctgcgtctggacgcacaagtcatagcattatcggctaaaatttcttaatttctaaattagtcatatcggctaagaaagtggggagcactatcatttcgtagaacaagaacaaggtatcatatatatatatatatataatatttaaactttgttaagtggaatcaaagtgctagtattaatggagtttcatgtgcattaaattttatgtcacatcagcaattttgttgacttggcaaggtcatttagggtgtgtttggaagacaggggctattaggagtattaaacatagtctaattacaaaactaattgcacaaccgctaagctgaatcgcgagatggatctattaagcttaattagtccatgatttgacaatgtggtgctacaataaccatttgctaatgatggattacttaggtttaatagattcgtctcgtgatttagcctatgggttctgctattaattttgtaattagctcatatttagttcttataattagtatccgaacatccaatgtgacatgctaaagtttaaccctggtatccaaatgaagtcttatgagagtttcatcactccggtggtatatgtacttaggctccgttttcttccaccgacttatttttagcacccgtcacattgaatgtttagatactaattagaagtattaaacgtagactatttacaaaatccattacataagacgaatctaaacggcgagacgaatctattaaacctaattagtccatgatttgacaatgtgttgctacagtaaacatttgctaatgatggattaattaggcttaatagattcgtctcgccgtttagcctccacttatgtaatgggttttctaaacaatctacgtttaatactcctaattagtatctaaatattcaatgtgacacgtgctaaaaataagtcagtggaaggaagagaacgtccccttagttttccatcttattaattgtacgatgaaactgtgcagccagatgattgacaatcgcaatacttcaactagtgggccatgcacatcagcgacgtgtaacgtcgtgagttgctgttcccgtagagaaatatcaactggtgggccacgcacatcagcgtcgtgtaacgtggacggaggagccccgtgacggcgtcgacatcgaacggccaccaaccacggaaccacccgtccccacctctcggaagctccgctccacggcgtcgacatctaacggctaccagcaggcgtacgggttggagtggactccttgcctctttgcgctggcggcttccggaaattgcgtggcggagacgaggcgggctcgtctcacacggcacggaagacgtcacgggttccttccccacctctcctcttccccaccgccataaatagccgaccccctcgcctttctccccaatctcatctcgtctcgtgttgttcggagcacaccacccgccccaaatcgttcttcccgcaagcctcggcgatccttcacccgcttcaaggtacggcgatcgtcttcctcctctagatcggcgtgatctgcaagtagttgatttggtagatggttaggatctgtgcactgaagaaatcatgttagatccgcgatgtttctgttcgtagatggctgggaggtggaatttttgtgtagatctgatatgttctcctgtttatcttgtcacgctcctgcgatttgtggggattttaggtcgttgatctgggaatcgtggggttgcttctaggctgttcgtagatgaggtcgttctcacggtttactggatcattgcctagtagatcagctcgggctttcgtctttgtatatggtgcccatacttgcatctatgatctggttccgtggtgttacctaggtttctgcgcctgattcgtccgatcgattttgttagcatgtggtaaacgtttggtcatggtctgatttagattagagtcgaataggatgatctcgatctagctcttgggattaatatgcatgtgtcaccaatctgttccgtggttaagatgatgaatctatgcttagttaatgggtgtagatatatatgctgctgttcctcaatgatgccgtagcttttacctgagcagcatggatcgtcctgttacttaggtagatgcacatgcttatagatcaagatatgtactgctactgttggaattctttagtatacctgatgatcatccatgctcttgttacttgttttggtatacttggatgatggcatgctgctgctttttgttgatttgagcccatccatatctgcatatgtcacatgattaagatgattacgctgtttctgtatgatgccatagcttttatgtgagcaacatgcatcctcctggttatatgcattaatagatggaagatatctattgctacaatttgatgattattttgtacatacgatgatcaagcatgctcttcatactttgttgatatacttggataatgaaatgctgctgcacgttcattctatagcactaatgatgtgatgaacacgcacgacctgtttgtggcatctgtttgaatgtgttgttgctgttcactagagactgttttattaacctactgctagatacttacccttctgtctgtttattcttttgcagccagaatagcggatccgcccatggtcgaacaggacggcctgcatgcaggatcaccagcggcctgggtcgaaagactcttcggctacgactgggcacaacagaccatcgggtgtagcgacgcagctgttttcaggctgtccgcacagggcagacccgttttgttcgtcaaaacagacctgtctggcgcgctcaacgaactgcaagacgaggccgcaagactgagctggcttgctaccacaggcgttccttgtgctgcagtcctcgacgtcgttactgaggctggaagagactggctgctcctgggtgaagtcccaggacaggaccttttgtccagccatctggcacctgccgaaaaggtcagcatcatggcagacgccatgagaaggctgcacacactcgaccctgcaacatgccccttcgatcaccaggcaaaacacaggatcgagcgcgcaagaacgcgcatggaggctggtttggtcgaccaagatgacctcgacgaggaacaccaaggactggctcctgctgaactcttcgccagactcaaggcgagaatgccagacggtgacgacctggtcgtcacacacggcgacgcttgtctcccaaacataatggtcgagaacggacgcttcagcggtttcatcgactgcggtagactcggagtcgctgacagataccaggacatcgccctggcaacacgcgacatcgcagaggaactcggaggcgaatgggctgacaggtttctcgtgctctacggtatcgctgctccagacagccagaggatcgcattctacaggctcctcgacgagttcttttagttcgaacggtacccggggatcctctagtgccgtgggtcgtttaagctgccgctgtacctgtgtcgtctggtgccttctggtgtacctgggaggttgtcgtctatcaagtatctgtggttggtgtcatgagtcagtgagtcccaatactgttcgtgtcctgtgtgcattatacccaaaactgttatgggcaaatcatgaataagcttgatgttcgaacttaaaagtctctgctcaatatggtattatggttgtttttgttcgtctcctaatatttgcctgggatcaaattttattggctggtgttcatttgacctccatgttcttgctaggctccattttttactctacagccataatatgtttgattgtttggtttgttctttgttgtacacctggttctgtcgagcttagttttcgacactggcttacagcttaacatgttgctattttattgggttctgattgctattttattgggttctgattgctagtttttgctgaatccaaaaaccatgttatttatttaagcgatccaggttattattatgatggtggctaagtttttttttttccaagggtaaattttctggattctccagtgtttctgtggccgaattcaatcactagagtcgacctgcaggcatagttaccaagcggccgcacactgatagtttaaactgaaggcgggaaacgacaatctgatcatgagcggagaattaagggagtcacgttatgacccccgccgatgacgcgggacaagccgttttacgtttggaactgacagaaccgcaacgattgaaggagccactcagccgcgggtttctggagtttaatgagctaagcacatacgtcagaaaccattattgcgcgttcaaaagtcgcctaaggtcactatcagctagcaaatatttcttgtcaaaaatgctccactgacgttccataaattcccctcggtatccaattagagtctcatattcactcccatggcggccaatgcgggcggcggtggagcgggaggaggcagcggcagcggcagcgtggctgcgccggcggtgtgccgccccagcggctcgcggtggacgccgacgccggagcagatcaggatgctgaaggagctctactacggctgcggcatccggtcgcccagctcggagcagatccagcgcatcaccgccatgctgcggcagcacggcaagatcgagggcaagaacgtcttctactggttccagaaccacaaggcccgcgagcgccagaagcgccgcctcaccagcctcgacgtcaacgtgcccgccgccggcgcggccgacgccaccaccagccaactcggcgtcctctcgctgtcgtcgccgccgccttcaggcgcggcgcctccctcgcccaccctcggcttctacgccgccggcaatggcggcggatcggctgtgctgctggacacgagttccgactggggcagcagcggcgctgctatggccaccgagacatgcttcctgcaggactacatgggcgtgacggacacgggcagctcgtcgcagtggccacgcttctcgtcgtcggacacgataatggcggcggccgcggcgcgggcggcgacgacgcgggcgcccgagacgctccctctcttcccgacctgcggcgacgacggcggcagcggtagcagcagctacttgccgttctggggtgccgcgtccacaactgccggcgccacttcttccgttgcgatccaacagcaacaccagctgcaggagcagtacagcttttacagcaacagcaacagcacccagctggccggcaccggcaaccaagacgtatcggcaacagcagcagcagccgccgccctggagctgagcctcagctcatggtgctccccttaccctgctgcagggagtatgtgagagcaacgcgagctgccactgctcttcactgatgtctctggaatggaaggaggaggaagtgagaacagatcattcgacaaagcagcattagtccgttgatcggtggaagaccactcgtcagtgttgagttgaatgtttgatcaataaaatacggcaatgctgtaagggttgttttttatgccattgataatacactgtactgttcagttgttgaactctatttcttagccatgccaagtgcttttcttattttgaataacattacagcaaaaagttgaaagacaaaaaaaaaaacccccgaacagagtgctttgggtcccaagcttctttagactgtgttcggcgttccccctaaatttctccccctatatctcactcacttgtcacatcagcgttctctttccccctatatctccacgctctacagcagttccacctatatcaaacctctataccccaccacaacaatattatatactttcatcttcaactaactcatgtaccttccaatttttttctactaataattatttacgtgcacagaaacttagcaaggagagagagagcgggaatttaaatgctcggcgttaggcttttagtccgctaggtggctagaccgaggttaggacgctagttcactaggggcctagtggtgttttaagacgtcacggtcactacgaatcgaccgaagcttgcatgggccgcatcgagcagctggcttgtggggaccagacaaaaaaggaatggtgcagaattgttaggcgcacctaccaaaagcatctttgcctttattgcaaagataaagcagattcctctagtacaagtggggaacaaaataacgtggaaaagagctgtcctgacagcccactcactaatgcgtatgacgaacgcagtgacgaccacaaaactcgagcaacgagatcatgagccaatcaaagaggagtgatgtagacctaaagcaataatggagccatgacgtaagggcttacgcccatacgaaataattaaaggctgatgtgacctgtcggtctctcagaacctttactttttatgtttggcgtgtatttttaaatttccacggcaatgacgatgtgaccgtcgacccactaaaacattgctttgtcaaaagctaaaaaagatgatgcccgacagccacttgtgtgaagcatgagaagccggtccctccactaagaaaattagtgaagcatcttccagtggtccctccactcacagctcaatcagtgagcaacaggacgaaggaaatgacgtaagccatgacgtctaatcccagggccagcttgcatgcctgcagtgcagcgtgacccggtcgtgcccctctctagagataatgagcattgcatgtctaagttataaaaaattaccacatattttttttgtcacacttgtttgaagtgcagtttatctatctttatacatatatttaaactttactctacgaataatataatctatagtactacaataatatcagtgttttagagaatcatataaatgaacagttagacatggtctaaaggacaattgagtattttgacaacaggactctacagttttatctttttagtgtgcatgtgttctcctttttttttgcaaatagcttcacctatataatacttcatccattttattagtacatccatttagggtttagggttaatggtttttatagactaatttttttagtacatctattttattctattttagcctctaaattaagaaaactaaaactctattttagtttttttatttaataatttagatataaaatagaataaaataaagtgactaaaaattaaacaaataccctttaagaaattaaaaaaactaaggaaacatttttcttgtttcgagtagataatgccagcctgttaaacgccgtcgacgagtctaacggacaccaaccagcgaaccagcagcgtcgcgtcgggccaagcgaagcagacggcacggcatctctgtcgctgcctctggacccctctcgagagttccgctccaccgttggacttgctccgctgtcggcatccagaaattgcgtggcggagcggcagacgtgagccggcacggcaggcggcctcctcctcctctcacggcaccggcagctacgggggattcctttcccaccgctccttcgctttcccttcctcgcccgccgtaataaatagacaccccctccacaccctctttccccaacctcgtgttgttcggagcgcacacacacacaaccagatctcccccaaatccacccgtcggcacctccgcttcaaggtacgccgctcgtcctcccccccccccctctctaccttctctagatcggcgttccggtccatgcatggttagggcccggtagttctacttctgttcatgtttgtgttagatccgtgtttgtgttagatccgtgctgctagcgttcgtacacggatgcgacctgtacgtcagacacgttctgattgctaacttgccagtgtttctctttggggaatcctgggatggctctagccgttccgcagacgggatcgatttcatgattttttttgtttcgttgcatagggtttggtttgcccttttcctttatttcaatatatgccgtgcacttgtttgtcgggtcatcttttcatgcttttttttgtcttggttgtgatgatgtggtctggttgggcggtcgttctagatcggagtagaattctgtttcaaactacctggtggatttattaattttggatctgtatgtgtgtgccatacatattcatagttacgaattgaagatgatggatggaaatatcgatctaggataggtatacatgttgatgcgggttttactgatgcatatacagagatgctttttgttcgcttggttgtgatgatgtggtgtggttgggcggtcgttcattcgttctagatcggagtagaatactgtttcaaactacctggtgtatttattaattttggaactgtatgtgtgtgtcatacatcttcatagttacgagtttaagatggatggaaatatcgatctaggataggtatacatgttgatgtgggttttactgatgcatatacatgatggcatatgcagcatctattcatatgctctaaccttgagtacctatctattataataaacaagtatgttttataattattttgatcttgatatacttggatgatggcatatgcagcagctatatgtggatttttttagccctgccttcatacgctatttatttgcttggtactgtttcttttgtcgatgctcaccctgttgtttggtgttacttctgcaggtcgactttaacttagcctaggatccatggccactgtgaacaactggctcgctttctccctctccccgcaggagctgccgccctcccagacgacggactccacactcatctcggccgccaccgccgaccatgtctccggcgatgtctgcttcaacatcccccaagattggagcatgaggggatcagagctttcggcgctcgtcgcggagccgaagctggaggacttcctcggcggcatctccttctccgagcagcatcacaaggccaactgcaacatgatacccagcactagcagcacagtttgctacgcgagctcaggtgctagcaccggctaccatcaccagctgtaccaccagcccaccagctcagcgctccacttcgcggactccgtaatggtggcttcctcggccggtgtccacgacggcggtgccatgctcagcgcggccgccgctaacggtgtcgctggcgctgccagtgccaacggcggcggcatcgggctgtccatgattaagaactggctgcggagccaaccggcgcccatgcagccgagggtggcggcggctgagggcgcgcaggggctctctttgtccatgaacatggcggggacgacccaaggcgctgctggcatgccacttctcgctggagagcgcgcacgggcgcccgagagtgtatcgacgtcagcacagggtggagccgtcgtcgtcacggcgccgaaggaggatagcggtggcagcggtgttgccggcgctctagtagccgtgagcacggacacgggtggcagcggcggcgcgtcggctgacaacacggcaaggaagacggtggacacgttcgggcagcgcacgtcgatttaccgtggcgtgacaaggcatagatggactgggagatatgaggcacatctttgggataacagttgcagaagggaagggcaaactcgtaagggtcgtcaagtctatttaggtggctatgataaagaggagaaagctgctagggcttatgatcttgctgctctgaagtactggggtgccacaacaacaacaaattttccagtgagtaactacgaaaaggagctcgaggacatgaagcacatgacaaggcaggagtttgtagcgtctctgagaaggaagagcagtggtttctccagaggtgcatccatttacaggggagtgactaggcatcaccaacatggaagatggcaagcacggattggacgagttgcagggaacaaggatctttacttgggcaccttcagcacccaggaggaggcagcggaggcgtacgacatcgcggcgatcaagttccgcggcctcaacgccgtcaccaacttcgacatgagccgctacgacgtgaagagcatcctggacagcagcgccctccccatcggcagcgccgccaagcgcctcaaggaggccgaggccgcagcgtccgcgcagcaccaccacgccggcgtggtgagctacgacgtcggccgcatcgcctcgcagctcggcgacggcggagccctggcggcggcgtacggcgcgcactaccacggcgccgcctggccgaccatcgcgttccagccgggcgccgccagcacaggcctgtaccacccgtacgcgcagcagccaatgcgcggcggcgggtggtgcaagcaggagcaggaccacgcggtgatcgcggccgcgcacagcctgcaggacctccaccacctgaacctgggcgcggccggcgcgcacgactttttctcggcagggcagcaggccgccgccgctgcgatgcacggcctgggtagcatcgacagtgcgtcgctcgagcacagcaccggctccaactccgtcgtctacaacggcggggtcggcgacagcaacggcgccagcgccgtcggcggcagtggcggtggctacatgatgccgatgagcgctgccggagcaaccactacatcggcaatggtgagccacgagcaggtgcatgcacgggcctacgacgaagccaagcaggctgctcagatggggtacgagagctacctggtgaacgcggagaacaatggtggcggaaggatgtctgcatgggggactgtcgtgtctgcagccgcggcggcagcagcaagcagcaacgacaacatggccgccgacgtcgggcatggcggcgcgcagctcttcagtgtctggaacgacacttaagcgtacctagtggtacctgacatcttatagtctgcaacctctcgtgtctgaattcctatctttatcaagtgttattgcttccacgactataggacagctttcgtcgaaagcttttgctcatgtgatctcgaaggattcatctagtctgatttttcgtgacttgtatcggttttattggattcatccaacatatatcaataaaaaatgagttgtgtttcctttcttcctagttcagttaaaattatttccctcctgcgcttgtgctgtaattgtctgtgtacctgttgtttgtgactgtgttagttcccttggatatgatttcgtatttgatatgtacatggagatagcttagcttcattattggagtatgaagttagtatgacatagtcactctcctggaaaattgacactgcaaaccatatttttattctgaaccacaaatcctagtcagtccgctggcatatgccgtccgtttgctgaatccagaacgtgggtttggagatgtacggctgagatgcctctatgcgaaggggatttcgtggtgaaacgagatgggagtagagcaacgcccgtggaagatgcttcaaacttccacacttttgagcaacgatcggcagtagtaaggtagacgatttcaagatcaaagcatatgaagataaacaacatcaacaacaaaatttgttggggttctatagagagaaacagagctacatacatacactgttttgtatctaccatctgagatgatgaaaagatgaaaaactaaagaatgccccggcgccaacgccaggacacgccgcgcgcgcgtcacccgagccatctcttgacccagccggcgctgtatatttacacacgttgcagcatcgatcaccacctgttcgatcgcgtcgccgtcaccggcgcgccgcgacttattgaactagtctagggcgcggctaacaacctagcttagattgccttgtctaaacccttaggctaacgcgccactctagaaggccgatctcccccgaacgcgccagatccgatatcgatgggccctggccgaagcttggtcacccgcaccttgctagttggatattacctcttctcttcaaagtatccttgaacgctcaccggttatcaaatctctacactatagctctgtagtcttgctagatagttagttctttagctctctctagaggttcacaaactcaatacaacacacagtggagtagggtattacgctccggcggcccgaaccactctaaatccttgtgtcctcgtgtgctcttccaccattaatgactgtaattgcagggacacgaagagttgtagcgcttttgccaacaagatccgctatatgctagtagagtggaacctgcacagcaacaagcatccaataatctgagaataagaattatgtgtggtgatggttctcatctctgcaactcgccattttcgcgagagaaccaaatccaagttggtgaagatcatgatttgggctcatgggctggcatagtagctattacctttgcaattgtggttcgaatctatccgatattctccttttcagggagagctaatgcttatgcttattgggtattttggtttgacactgcttcacgcccaaaaaaaggcaactatgtctgagttggatatggcccaaaaaaaggcagctatgtctgagttggatatggaagtcttctttcgtttagggtgaagtaagaccaagctcatgagcttattatcttaggtcggaacaaattagttgataggcatggcacatttatcaaattataatgattttaacagaaaagcaacacctctttttcagcagcaccagctttgcaagctgcaattgacactccaagcatagtatttgctccaaactcagcctgcatttcgcacaatatcatatctatttccatttggataaaatatattttccagaaatatgggaacagaatcaagatacagaaaaaagttgtggtagtagtggtaagtggaaacacaagtacagtgaaaagatagcattatttctgaacagtcaaattaaccgaaataagtagtatcacatactgcccctaaattgactacacccaatgtaaagaattgcttgagcatattgagccatcagttgtttgtttgtgtaacggatttgacaatgcagagttcaggagcaaaaaaccgcaaaggagagaaagagggaaaggatctcctagtatcccaccttgtggcgcgccctgtcaagtgcatgatggcctggtcgatctgcgtctgctgctgcggttccatcccaacgagtgcctccgacaccttgtcgttgatcacccgcaccgcgtaggcgacccccctggcgaggaacttccgcctctcggaggccccggccgcgtcggcggcggcgccctcgagcgcgcccacgctagccgtagatgctcggtgcacggccttgttggtgtgcaactcgacctcaacggccggtgcgctacgcccgtcaaggatctggcgcgcccgcaccctcgtgatcacggtgggcgcctcccgcctcatgtggccgacgatgaaaagcgccgggttaggggccttggcgcgcaccgccgtattcagggcctcctcgctcttgcgcgagagcaggtgcttccccaggtactcctgcactgacaaggctgccacagcggtggaatttgtcctcacgacttcgccacgtcgtcctcacctccctggcttcccacgactccgccgtatcgaggtgctcggtgggtcgtcttaatccgaagtccgaactaggaagacgagacagagaggtctgaggaatgggcctcgtttgatgttgagctgaattatttttccagcataagcccaggtcttggtccatgaacaaaattactagaaacccagcccagtactacgatctaaaagagggactgccactggatagctctctctagcattctccacgctccaatacagcggcgtcgtgtctatccgggtctatccgcgaacacgtgagaactctccagaaactgctttctcctccacttcatctctctcgctttccctctataaaaagaccccttctaggaattgagggagacagcaagcaccaagcagcgatccgaagctcaatcaattcactcaaacctcttccccaaatcttcgattagatcttcgttgacaagaagactagaaccgaacctgacatgtccaacctgctcacggttcaccagaaccttccggctcttccagtggacgcgacgtccgatgaagtcaggaagaacctcatggacatgttccgcgacaggcaagcgttcagcgagcacacctggaagatgctgctctccgtctgccgctcctgggctgcatggtgcaagctgaacaacaggaagtggttccccgctgagcccgaggacgtgagggattaccttctgtacctgcaagcgcgaggtttgtttctgcttctacctttgatatatatataataattatcattaattagtagtaatataatatttcaaatatttttttcaaaataaaagaatgtagtatatagcaattgcttttctgtagtttataagtgtgtatattttaatttataacttttctaatatatgaccaaaacatggtgatgcctaggtctggcagtgaagaccatccagcaacaccttggacaactgaacatgcttcacaggcgctccggcctcccgcgccccagcgactcgaacgccgtgagcctcgtcatgcgccgcatcaggaaggaaaacgtcgatgccggcgaaagggcaaagcaggccctcgcgttcgagaggaccgatttcgaccaggtccgcagcctgatggagaacagcgacaggtgccaggacattaggaacctggcgttcctcggaattgcatacaacacgctcctcaggatcgcggaaattgcccgcattcgcgtgaaggacattagccgcaccgacggcggcaggatgcttatccacattggcaggaccaagacgctcgtttccaccgcaggcgtcgaaaaggccctcagcctcggagtgaccaagctcgtcgaacgctggatctccgtgtccggcgtcgcggacgacccaaacaactacctcttctgccgcgtccgcaagaacggggtggctgcccctagcgccaccagccaactcagcacgagggccttggaaggtattttcgaggccacccaccgcctgatctacggcgcgaaggatgacagcggtcaacgctacctcgcatggtccgggcactccgcccgcgttggagctgctagggacatggcccgcgccggtgtttccatccccgaaatcatgcaggcgggtggatggacgaacgtgaacattgtcatgaactacattcgcaaccttgacagcgagacgggcgcaatggttcgcctcctggaagatggtgactgaggtacccaacctagacttgtccatcttctggattggccaacttaattaatgtatgaaataaaaggatgcacacatagtgacatgctaatcactataatgtgggcatcaaagttgtgtgttatgtgtaattactagttatctgaataaaagagaaagagatcatccatatttcttatcctaaatgaatgtcacgtgtctttataattctttgatgaaccagatgcatttcattaaccaaatccatatacatataaatattaatcatatataattaatatcaattgggttagcaaaacaaatctagtctaggtgtgttttgcgatccgatatcgacgtctaaaaacggcccctaactaacgcttagttgcccgctagattagtcccccgttagtgcctagttagacacacgacgaactaggggctagtgccaccttgctagttggatattacctcttctcttcaaagtatccttgaacgctcaccggttatcaaatctctacactatagctctgtagtcttgctagatagttagttctttagctctcgcacgataacttcgtatagcatacattatacgaagttataacagcggaccgggttaccgaattcctgcccttaaggccaattgttcaagattcattcaacaattgaaacatctcccatgattaaatcagtataaggttgctatggtcttgcttgacaaagtttttttttgagggaatttcaactaaatttttgagtgaaactatcaaatactgattttaaaaaatttttataaaaggaagcgcagagataaaaggccatctatgctacaaaagtacccaaaaatgtaatcctaaagtatgaattgcattttttttttgtttggacgaaaggaaaggagtattaccacaagaatgatatcatcttcatatttagatcttttttgggtaaagcttgagattctctaaatatagagaaatcagaagaaaaaaaaaccgtgttttggtggttttgatttctagcctccacaataactttgacggcgtcgacaagtctaacggacaccaagcagcgaaccaccagcgccgagccaagcgaagcagacggccgagacgttgacaccttcggcgcggcatctctcgagagttccgctccggcgctccacctccaccgctggcggtttcttattccgttccgttccgcctcctgctctgctcctctccacaccacacggcacgaaaccgttacggcaccggcagcacccagcacgggagaggggattcctttcccaccgttccttccctttccgccccgccgctataaatagccagccccatccccagcttttttccccaatctcatctcctctctcctgttgttcggagcacacgcacaatccgatcgatccccaaatccccttcgtctctcctcgcgagcctcgtggatcccagcttcaaggtacggcgatcgatcatcccccctccttctctctaccttcttttctctagactacatcggatggcgatccatggttagggcctgctagtttcccttcctgttttgtcgatggctgcgaggcacaatagatctgatggcgttatgacggctaacttgtcatgttgttgcgatttatagtccctttaggagatcagtttaatttctcggatggttcgagatcggtggtccatggttagtaccctaagatccgcgctgttagggttcgtagatggaggcgacctgttctgattgttaacttgtcagtacctgggaaatcctgggatggttctagctcgtccgcagatgagatcgatttcatgatcctctgtatcttgtttcgttgcctaggttccgtctaatctatccgtggtatgatgtagatgttttgatcgtgctaactacgtcttgtaaagttaattgtcaggtcataatttttagcatgcctttttttttgtttggttttgtctaattgggctgtcgttctagatcagagtagaagactgttccaaactacctgctggatttattgaacttggatctgtatgtgtgtcacatatcttcataaattcatgattaagatggattgaaatatcttttatctttttggtatggatagttctatatgttggtgtggctttgttagatgtatacatgcttagatacatgaagcaacgtgctgctactgtttagtaattgctgttcatttgtctaataaacagataaggatatgtatttatgttgctgttggttttgctggtactttgttggatacaaatgcttcaatacagaaaacagcatgctgctacgatttaccatttatctaatcttatcatatgtctaatctaataaacaaacatgcttttaaattatcttcatatgcttggatgatggcatacacagcggctatgtgtggttttttaaatacccagcatcatgggcatgcatgacactgctttaatatgctttttatttgcttgagactgtttcttttgtttatactgaccctttagttcggtgactcttctgcaggtcgactttaacttagcctaggatccatggcccagtccaagcacggcctgaccaaggagatgaccatgaagtaccgcatggagggctgcgtggacggccacaagttcgtgatcaccggcgagggcatcggctaccccttcaagggcaagcaggccatcaacctgtgcgtggtggagggcggccccttgcccttcgccgaggacatcttgtccgccgccttcatgtacggcaaccgcgtgttcaccgagtacccccaggacatcgtcgactacttcaagaactcctgccccgccggctacacctgggaccgctccttcctgttcgaggacggcgccgtgtgcatctgcaacgccgacatcaccgtgagcgtggaggagaactgcatgtaccacgagtccaagttctacggcgtgaacttccccgccgacggccccgtgatgaagaagatgaccgacaactgggagccctcctgcgagaagatcatccccgtgcccaagcagggcatcttgaagggcgacgtgagcatgtacctgctgctgaaggacggtggccgcttgcgctgccagttcgacaccgtgtacaaggccaagtccgtgccccgcaagatgcccgactggcacttcatccagcacaagctgacccgcgaggaccgcagcgacgccaagaaccagaagtggcacctgaccgagcacgccatcgcctccggctccgccttgccctccggactcagatctcgatagggtaccaatggccagttaacagatccagctgctgctgttctagggttcacaagtctgcctatttgtcttccccaatggagctatggttgtctggtctggtccttggtcgtgtcccgtttcattgtgtactatttacctgtaatgtgtatccttaagtctggtttgatggtgtctgaaacgttttgctgtggtagagcagcatggaagaactataatgaataagtgatccctaatcattgtgtccaaattttgcttctgctatacccttttgtgctgtttcttatgttttgcttaaaaatttgatctgacaaacaaatttgtctaaattatgctcttgttctgactgtgtactgtacacatttgtattgctaccggtttggcacatagttttctctttgattgcagatcaaacccttctgattgcagattgcttggctatggctgatgtgctcactgttcttctttagcttgtatattgctgatggtggcttggctacggctgaaaaagttgctgctgcgccgacttggcaactgttgctccagtaatgctttgtcctctcttcctagccgccgacttggcacttggcagctgttgctcctgtaatgcgttgttatctcttatctcttgagatgtactatgattttgaggctgtttgacttgtgccagattgccagtgctgatgctatattatctcaggtttttatgctagtatatgttttactgtgtgctgcctgtgtcgagttacgtaatctattgaaccgctatgcgtgttgatgccctgttgttgcttgccagattgatgcccctgttgcttgcagcttgcaagctgtagtgaaatcctaaaattcgaaaccaaatctattctgaacttttgaagatctgtgatgtccggaagaaaagattcaaacagataaacgggactctccagaatctataaaataaatgatcgacaaacgctttgctttggtaggcttcctagttagttagcggaccgaagcttcggttgtttctgtggccgaattcaatcactagagtcgacctgcatgattccgatgacttcgtaggttcctagctcaagccgctcgtgtccaagcgtcacttacgattagctaatgattacggcatctaggaccgactagctagctagctaagagctcggtaccgagctcgaattcattccgattaatcgtggcctcttgctcttcaggatgaagagctatgtttaaacgtgcaagcgctactagacaattcagtacattaaaaacgtccgcaatgtgttattaagttgtctaagcgtcaatttgtttacaccacaatatatcctgcca

SEQ ID NO: 79 - DNA, 21848 bp, Artificial sequence
  PHP97417
gtttacccgccaatatatcctgtcaaacactgcggccgcacttgaccgcggatggagccggagctgtggtgaggccatcgacgggaggtgggggagaacacagtctcagtgttctttgtgagtccgcaaggtttttagcttttctgtattaattaaggttgctgttggctgtagaatacggtcgtggaagagctgtatcggtagctactacgtaagctattatatactggaagtctggagctcgtcgatctccggtcgtcttcctccatttctcctcgtcttgctttgactgctgctaccatttgcttctgttttctgatgaagcatgccatgtcggccaccagtgtttgtgtggtttttgcagggaatggctttcaagtgctgtgattgaatggccctcgtcgtcctcggctgagctcacatggacgcgtcatgtgagtgagatatatgatcatatgatgagtggggttcgggtgagtgcgtacttgaagtaggatcccgctttcactcattcattcattggcctttaaaccgggaaattttcgcgaggagatggagggaagcaagcagggtgacgagtgcagagtgccgcgagcgctttgtcaaaaggcaccgccgtaggcaaaaaaatcaatggccctgactgactcgatggtagtactactgtagagactagagagggttgctccccatatcttcgtgtgacttttactccagcattgcatttccgtcattgagacgttaattaatagcagctttcgggacagatgactgtggccatgtttcgtcacggccgcttcgtgccagctgggggtactatagtactgtgattttgttagtaaaaactttcattaggccaccattgacgaccgggccttcgcttttgctgcgctaattaaccatttcccggcgaccgaagggaacatgaacatgccccgacacatgagggcatgaggactagtgttctccctgtcgttcgttgacttgactagtgatagtttaaacgctcttcaactggaagagcggttactaccggttcactagctagctgctaatcgagctagttaccctatgaggtgacatgaagcgctcacggttactatgacggttagcttcacgactgttggtggcagtagcgtacgacttagctatagttccggacttacccttaagataacttcgtatagcatacattatacgaagttatgggcccacgcgtgaagagcggttaccagagctggtcacctttgtccaccaagatggaactgtcttcggccagaatggccatctggattcagcaggcctagaaggccatttatcgctatcaactttgtatagaaaagttgggccgaattcgagctcggtacggccagaatggcccggaccgggttacccggaccgaagcttgcatgcctgcagtgcagcgtgacccggtcgtgcccctctctagagataatgagcattgcatgtctaagttataaaaaattaccacatattttttttgtcacacttgtttgaagtgcagtttatctatctttatacatatatttaaactttactctacgaataatataatctatagtactacaataatatcagtgttttagagaatcatataaatgaacagttagacatggtctaaaggacaattgagtattttgacaacaggactctacagttttatctttttagtgtgcatgtgttctcctttttttttgcaaatagcttcacctatataatacttcatccattttattagtacatccatttagggtttagggttaatggtttttatagactaatttttttagtacatctattttattctattttagcctctaaattaagaaaactaaaactctattttagtttttttatttaataatttagatataaaatagaataaaataaagtgactaaaaattaaacaaataccctttaagaaattaaaaaaactaaggaaacatttttcttgtttcgagtagataatgccagcctgttaaacgccgtcgacgagtctaacggacaccaaccagcgaaccagcagcgtcgcgtcgggccaagcgaagcagacggcacggcatctctgtcgctgcctctggacccctctcgagagttccgctccaccgttggacttgctccgctgtcggcatccagaaattgcgtggcggagcggcagacgtgagccggcacggcaggcggcctcctcctcctctcacggcaccggcagctacgggggattcctttcccaccgctccttcgctttcccttcctcgcccgccgtaataaatagacaccccctccacaccctctttccccaacctcgtgttgttcggagcgcacacacacacaaccagatctcccccaaatccacccgtcggcacctccgcttcaaggtacgccgctcgtcctcccccccccccctctctaccttctctagatcggcgttccggtccatgcatggttagggcccggtagttctacttctgttcatgtttgtgttagatccgtgtttgtgttagatccgtgctgctagcgttcgtacacggatgcgacctgtacgtcagacacgttctgattgctaacttgccagtgtttctctttggggaatcctgggatggctctagccgttccgcagacgggatcgatttcatgattttttttgtttcgttgcatagggtttggtttgcccttttcctttatttcaatatatgccgtgcacttgtttgtcgggtcatcttttcatgcttttttttgtcttggttgtgatgatgtggtctggttgggcggtcgttctagatcggagtagaattctgtttcaaactacctggtggatttattaattttggatctgtatgtgtgtgccatacatattcatagttacgaattgaagatgatggatggaaatatcgatctaggataggtatacatgttgatgcgggttttactgatgcatatacagagatgctttttgttcgcttggttgtgatgatgtggtgtggttgggcggtcgttcattcgttctagatcggagtagaatactgtttcaaactacctggtgtatttattaattttggaactgtatgtgtgtgtcatacatcttcatagttacgagtttaagatggatggaaatatcgatctaggataggtatacatgttgatgtgggttttactgatgcatatacatgatggcatatgcagcatctattcatatgctctaaccttgagtacctatctattataataaacaagtatgttttataattattttgatcttgatatacttggatgatggcatatgcagcagctatatgtggatttttttagccctgccttcatacgctatttatttgcttggtactgtttcttttgtcgatgctcaccctgttgtttggtgttacttctgcaggtcgactttaacttagcctaggatccatggcggccaatgcgggcggcggtggagcgggaggaggcagcggcagcggcagcgtggctgcgccggcggtgtgccgccccagcggctcgcggtggacgccgacgccggagcagatcaggatgctgaaggagctctactacggctgcggcatccggtcgcccagctcggagcagatccagcgcatcaccgccatgctgcggcagcacggcaagatcgagggcaagaacgtcttctactggttccagaaccacaaggcccgcgagcgccagaagcgccgcctcaccagcctcgacgtcaacgtgcccgccgccggcgcggccgacgccaccaccagccaactcggcgtcctctcgctgtcgtcgccgccgccttcaggcgcggcgcctccctcgcccaccctcggcttctacgccgccggcaatggcggcggatcggctgtgctgctggacacgagttccgactggggcagcagcggcgctgctatggccaccgagacatgcttcctgcaggactacatgggcgtgacggacacgggcagctcgtcgcagtggccacgcttctcgtcgtcggacacgataatggcggcggccgcggcgcgggcggcgacgacgcgggcgcccgagacgctccctctcttcccgacctgcggcgacgacggcggcagcggtagcagcagctacttgccgttctggggtgccgcgtccacaactgccggcgccacttcttccgttgcgatccaacagcaacaccagctgcaggagcagtacagcttttacagcaacagcaacagcacccagctggccggcaccggcaaccaagacgtatcggcaacagcagcagcagccgccgccctggagctgagcctcagctcatggtgctccccttaccctgctgcagggagtatgtgagagcaacgcgagctgccactgctcttcactgatgtctctggaatggaaggaggaggaagtgagaacagatcattcgacaaagcagcattagtccgttgatcggtggaagaccactcgtcagtgttgagttgaatgtttgatcaataaaatacggcaatgctgtaagggttgttttttatgccattgataatacactgtactgttcagttgttgaactctatttcttagccatgccaagtgcttttcttattttgaataacattacagcaaaaagttgaaagacaaaaaaaaaaacccccgaacagagtgctttgggtcccaagcttctttagactgtgttcggcgttccccctaaatttctccccctatatctcactcacttgtcacatcagcgttctctttccccctatatctccacgctctacagcagttccacctatatcaaacctctataccccaccacaacaatattatatactttcatcttcaactaactcatgtaccttccaatttttttctactaataattatttacgtgcacagaaacttagcaaggagagagagagcgggaatttaaatgctcggcgttaggcttttagtccgctaggtggctagaccgaggttaggacgctagttcactaggggcctagtggtgttttaagacgtcacggtcaccgcggccgcatcgagcagctggcttgtggggaccagacaaaaaaggaatggtgcagaattgttaggcgcacctaccaaaagcatctttgcctttattgcaaagataaagcagattcctctagtacaagtggggaacaaaataacgtggaaaagagctgtcctgacagcccactcactaatgcgtatgacgaacgcagtgacgaccacaaaactcgagcaacgagatcatgagccaatcaaagaggagtgatgtagacctaaagcaataatggagccatgacgtaagggcttacgcccatacgaaataattaaaggctgatgtgacctgtcggtctctcagaacctttactttttatgtttggcgtgtatttttaaatttccacggcaatgacgatgtgaccgtcgacccactaaaacattgctttgtcaaaagctaaaaaagatgatgcccgacagccacttgtgtgaagcatgagaagccggtccctccactaagaaaattagtgaagcatcttccagtggtccctccactcacagctcaatcagtgagcaacaggacgaaggaaatgacgtaagccatgacgtctaatcccattcgaaacgcgtggaccgaagcttgcatgcctgcagtgcagcgtgacccggtcgtgcccctctctagagataatgagcattgcatgtctaagttataaaaaattaccacatattttttttgtcacacttgtttgaagtgcagtttatctatctttatacatatatttaaactttactctacgaataatataatctatagtactacaataatatcagtgttttagagaatcatataaatgaacagttagacatggtctaaaggacaattgagtattttgacaacaggactctacagttttatctttttagtgtgcatgtgttctcctttttttttgcaaatagcttcacctatataatacttcatccattttattagtacatccatttagggtttagggttaatggtttttatagactaatttttttagtacatctattttattctattttagcctctaaattaagaaaactaaaactctattttagtttttttatttaataatttagatataaaatagaataaaataaagtgactaaaaattaaacaaataccctttaagaaattaaaaaaactaaggaaacatttttcttgtttcgagtagataatgccagcctgttaaacgccgtcgacgagtctaacggacaccaaccagcgaaccagcagcgtcgcgtcgggccaagcgaagcagacggcacggcatctctgtcgctgcctctggacccctctcgagagttccgctccaccgttggacttgctccgctgtcggcatccagaaattgcgtggcggagcggcagacgtgagccggcacggcaggcggcctcctcctcctctcacggcaccggcagctacgggggattcctttcccaccgctccttcgctttcccttcctcgcccgccgtaataaatagacaccccctccacaccctctttccccaacctcgtgttgttcggagcgcacacacacacaaccagatctcccccaaatccacccgtcggcacctccgcttcaaggtacgccgctcgtcctcccccccccccctctctaccttctctagatcggcgttccggtccatgcatggttagggcccggtagttctacttctgttcatgtttgtgttagatccgtgtttgtgttagatccgtgctgctagcgttcgtacacggatgcgacctgtacgtcagacacgttctgattgctaacttgccagtgtttctctttggggaatcctgggatggctctagccgttccgcagacgggatcgatttcatgattttttttgtttcgttgcatagggtttggtttgcccttttcctttatttcaatatatgccgtgcacttgtttgtcgggtcatcttttcatgcttttttttgtcttggttgtgatgatgtggtctggttgggcggtcgttctagatcggagtagaattctgtttcaaactacctggtggatttattaattttggatctgtatgtgtgtgccatacatattcatagttacgaattgaagatgatggatggaaatatcgatctaggataggtatacatgttgatgcgggttttactgatgcatatacagagatgctttttgttcgcttggttgtgatgatgtggtgtggttgggcggtcgttcattcgttctagatcggagtagaatactgtttcaaactacctggtgtatttattaattttggaactgtatgtgtgtgtcatacatcttcatagttacgagtttaagatggatggaaatatcgatctaggataggtatacatgttgatgtgggttttactgatgcatatacatgatggcatatgcagcatctattcatatgctctaaccttgagtacctatctattataataaacaagtatgttttataattattttgatcttgatatacttggatgatggcatatgcagcagctatatgtggatttttttagccctgccttcatacgctatttatttgcttggtactgtttcttttgtcgatgctcaccctgttgtttggtgttacttctgcaggtcgactttaacttagcctaggatccatggccactgtgaacaactggctcgctttctccctctccccgcaggagctgccgccctcccagacgacggactccacactcatctcggccgccaccgccgaccatgtctccggcgatgtctgcttcaacatcccccaagattggagcatgaggggatcagagctttcggcgctcgtcgcggagccgaagctggaggacttcctcggcggcatctccttctccgagcagcatcacaaggccaactgcaacatgatacccagcactagcagcacagtttgctacgcgagctcaggtgctagcaccggctaccatcaccagctgtaccaccagcccaccagctcagcgctccacttcgcggactccgtaatggtggcttcctcggccggtgtccacgacggcggtgccatgctcagcgcggccgccgctaacggtgtcgctggcgctgccagtgccaacggcggcggcatcgggctgtccatgattaagaactggctgcggagccaaccggcgcccatgcagccgagggtggcggcggctgagggcgcgcaggggctctctttgtccatgaacatggcggggacgacccaaggcgctgctggcatgccacttctcgctggagagcgcgcacgggcgcccgagagtgtatcgacgtcagcacagggtggagccgtcgtcgtcacggcgccgaaggaggatagcggtggcagcggtgttgccggcgctctagtagccgtgagcacggacacgggtggcagcggcggcgcgtcggctgacaacacggcaaggaagacggtggacacgttcgggcagcgcacgtcgatttaccgtggcgtgacaaggcatagatggactgggagatatgaggcacatctttgggataacagttgcagaagggaagggcaaactcgtaagggtcgtcaagtctatttaggtggctatgataaagaggagaaagctgctagggcttatgatcttgctgctctgaagtactggggtgccacaacaacaacaaattttccagtgagtaactacgaaaaggagctcgaggacatgaagcacatgacaaggcaggagtttgtagcgtctctgagaaggaagagcagtggtttctccagaggtgcatccatttacaggggagtgactaggcatcaccaacatggaagatggcaagcacggattggacgagttgcagggaacaaggatctttacttgggcaccttcagcacccaggaggaggcagcggaggcgtacgacatcgcggcgatcaagttccgcggcctcaacgccgtcaccaacttcgacatgagccgctacgacgtgaagagcatcctggacagcagcgccctccccatcggcagcgccgccaagcgcctcaaggaggccgaggccgcagcgtccgcgcagcaccaccacgccggcgtggtgagctacgacgtcggccgcatcgcctcgcagctcggcgacggcggagccctggcggcggcgtacggcgcgcactaccacggcgccgcctggccgaccatcgcgttccagccgggcgccgccagcacaggcctgtaccacccgtacgcgcagcagccaatgcgcggcggcgggtggtgcaagcaggagcaggaccacgcggtgatcgcggccgcgcacagcctgcaggacctccaccacctgaacctgggcgcggccggcgcgcacgactttttctcggcagggcagcaggccgccgccgctgcgatgcacggcctgggtagcatcgacagtgcgtcgctcgagcacagcaccggctccaactccgtcgtctacaacggcggggtcggcgacagcaacggcgccagcgccgtcggcggcagtggcggtggctacatgatgccgatgagcgctgccggagcaaccactacatcggcaatggtgagccacgagcaggtgcatgcacgggcctacgacgaagccaagcaggctgctcagatggggtacgagagctacctggtgaacgcggagaacaatggtggcggaaggatgtctgcatgggggactgtcgtgtctgcagccgcggcggcagcagcaagcagcaacgacaacatggccgccgacgtcgggcatggcggcgcgcagctcttcagtgtctggaacgacacttaagcgtacctagtggtacctgacatcttatagtctgcaacctctcgtgtctgaattcctatctttatcaagtgttattgcttccacgactataggacagctttcgtcgaaagcttttgctcatgtgatctcgaaggattcatctagtctgatttttcgtgacttgtatcggttttattggattcatccaacatatatcaataaaaaatgagttgtgtttcctttcttcctagttcagttaaaattatttccctcctgcgcttgtgctgtaattgtctgtgtacctgttgtttgtgactgtgttagttcccttggatatgatttcgtatttgatatgtacatggagatagcttagcttcattattggagtatgaagttagtatgacatagtcactctcctggaaaattgacactgcaaaccatatttttattctgaaccacaaatcctagtcagtccgctggcatatgccgtccgtttgctgaatccagaacgtgggtttggagatgtacggctgagatgcctctatgcgaaggggatttcgtggtgaaacgagatgggagtagagcaacgcccgtggaagatgcttcaaacttccacacttttgagcaacgatcggcagtagtaaggtagacgatttcaagatcaaagcatatgaagataaacaacatcaacaacaaaatttgttggggttctatagagagaaacagagctacatacatacactgttttgtatctaccatctgagatgatgaaaagatgaaaaactaaagaatgccccggcgccaacgccaggacacgccgcgcgcgcgtcacccgagccatctcttgacccagccggcgctgtatatttacacacgttgcagcatcgatcaccacctgttcgatcgcgtcgccgtcaccggcgcgccgcgacttattgaactagtctagggcgcggctaacaacctagcttagattgccttgtctaaacccttaggctaacgcgccactctagacaccttgctagttggatattacctcttctcttcaaagtatccttgaacgctcaccggttatcaaatctctacactatagctctgtagtcttgctagatagttagttctttagctctcgaattcgagctcggtaccctggttcacaaactcaatacaacacacagtggagtagggtattacgctccggcggcccgaaccactctaaatccttgtgtcctcgtgtgctcttccaccattaatgactgtaattgcagggacacgaagagttgtagcgcttttgccaacaagatccgctatatgctagtagagtggaacctgcacagcaacaagcatccaataatctgagaataagaattatgtgtggtgatggttctcatctctgcaactcgccattttcgcgagagaaccaaatccaagttggtgaagatcatgatttgggctcatgggctggcatagtagctattacctttgcaattgtggttcgaatctatccgatattctccttttcagggagagctaatgcttatgcttattgggtattttggtttgacactgcttcacgcccaaaaaaaggcaactatgtctgagttggatatggcccaaaaaaaggcagctatgtctgagttggatatggaagtcttctttcgtttagggtgaagtaagaccaagctcatgagcttattatcttaggtcggaacaaattagttgataggcatggcacatttatcaaattataatgattttaacagaaaagcaacacctctttttcagcagcaccagctttgcaagctgcaattgacactccaagcatagtatttgctccaaactcagcctgcatttcgcacaatatcatatctatttccatttggataaaatatattttccagaaatatgggaacagaatcaagatacagaaaaaagttgtggtagtagtggtaagtggaaacacaagtacagtgaaaagatagcattatttctgaacagtcaaattaaccgaaataagtagtatcacatactgcccctaaattgactacacccaatgtaaagaattgcttgagcatattgagccatcagttgtttgtttgtgtaacggatttgacaatgcagagttcaggagcaaaaaaccgcaaaggagagaaagagggaaaggatctcctagtatcccaccttgtggcgcgccctgtcaagtgcatgatggcctggtcgatctgcgtctgctgctgcggttccatcccaacgagtgcctccgacaccttgtcgttgatcacccgcaccgcgtaggcgacccccctggcgaggaacttccgcctctcggaggccccggccgcgtcggcggcggcgccctcgagcgcgcccacgctagccgtagatgctcggtgcacggccttgttggtgtgcaactcgacctcaacggccggtgcgctacgcccgtcaaggatctggcgcgcccgcaccctcgtgatcacggtgggcgcctcccgcctcatgtggccgacgatgaaaagcgccgggttaggggccttggcgcgcaccgccgtattcagggcctcctcgctcttgcgcgagagcaggtgcttccccaggtactcctgcactgacaaggctgccacagcggtggaatttgtcctcacgacttcgccacgtcgtcctcacctccctggcttcccacgactccgccgtatcgaggtgctcggtgggtcgtcttaatccgaagtccgaactaggaagacgagacagagaggtctgaggaatgggcctcgtttgatgttgagctgaattatttttccagcataagcccaggtcttggtccatgaacaaaattactagaaacccagcccagtactacgatctaaaagagggactgccactggatagctctctctagcattctccacgctccaatacagcggcgtcgtgtctatccgggtctatccgcgaacacgtgagaactctccagaaactgctttctcctccacttcatctctctcgctttccctctataaaaagaccccttctaggaattgagggagacagcaagcaccaagcagcgatccgaagctcaatcaattcactcaaacctcttccccaaatcttcgattagatcttcgttgacaagaagactagaaccgaacctgacatgtccaacctgctcacggttcaccagaaccttccggctcttccagtggacgcgacgtccgatgaagtcaggaagaacctcatggacatgttccgcgacaggcaagcgttcagcgagcacacctggaagatgctgctctccgtctgccgctcctgggctgcatggtgcaagctgaacaacaggaagtggttccccgctgagcccgaggacgtgagggattaccttctgtacctgcaagcgcgaggtttgtttctgcttctacctttgatatatatataataattatcattaattagtagtaatataatatttcaaatatttttttcaaaataaaagaatgtagtatatagcaattgcttttctgtagtttataagtgtgtatattttaatttataacttttctaatatatgaccaaaacatggtgatgcctaggtctggcagtgaagaccatccagcaacaccttggacaactgaacatgcttcacaggcgctccggcctcccgcgccccagcgactcgaacgccgtgagcctcgtcatgcgccgcatcaggaaggaaaacgtcgatgccggcgaaagggcaaagcaggccctcgcgttcgagaggaccgatttcgaccaggtccgcagcctgatggagaacagcgacaggtgccaggacattaggaacctggcgttcctcggaattgcatacaacacgctcctcaggatcgcggaaattgcccgcattcgcgtgaaggacattagccgcaccgacggcggcaggatgcttatccacattggcaggaccaagacgctcgtttccaccgcaggcgtcgaaaaggccctcagcctcggagtgaccaagctcgtcgaacgctggatctccgtgtccggcgtcgcggacgacccaaacaactacctcttctgccgcgtccgcaagaacggggtggctgcccctagcgccaccagccaactcagcacgagggccttggaaggtattttcgaggccacccaccgcctgatctacggcgcgaaggatgacagcggtcaacgctacctcgcatggtccgggcactccgcccgcgttggagctgctagggacatggcccgcgccggtgtttccatccccgaaatcatgcaggcgggtggatggacgaacgtgaacattgtcatgaactacattcgcaaccttgacagcgagacgggcgcaatggttcgcctcctggaagatggtgactgaggtacccaacctagacttgtccatcttctggattggccaacttaattaatgtatgaaataaaaggatgcacacatagtgacatgctaatcactataatgtgggcatcaaagttgtgtgttatgtgtaattactagttatctgaataaaagagaaagagatcatccatatttcttatcctaaatgaatgtcacgtgtctttataattctttgatgaaccagatgcatttcattaaccaaatccatatacatataaatattaatcatatataattaatatcaattgggttagcaaaacaaatctagtctaggtgtgttttgcgatccgatatcaggcctgacgtctaaaaacggcccctaactaacgcttagttgcccgctagattagtcccccgttagtgcctagttagacacacgacgaactaggggctagccaccttgctagttggatattacctcttctcttcaaagtatccttgaacgctcaccggttatcaaatctctacactatagctctgtagtcttgctagatagttagttctttagctctcgtgcgcacgataacttcgtatagcatacattatacgaagttataacagcggaccgggttaccgaattcctgcccttaaggccaattgttcaagattcattcaacaattgaaacatctcccatgattaaatcagtataaggttgctatggtcttgcttgacaaagtttttttttgagggaatttcaactaaatttttgagtgaaactatcaaatactgattttaaaaaatttttataaaaggaagcgcagagataaaaggccatctatgctacaaaagtacccaaaaatgtaatcctaaagtatgaattgcattttttttttgtttggacgaaaggaaaggagtattaccacaagaatgatatcatcttcatatttagatcttttttgggtaaagcttgagattctctaaatatagagaaatcagaagaaaaaaaaaccgtgttttggtggttttgatttctagcctccacaataactttgacggcgtcgacaagtctaacggacaccaagcagcgaaccaccagcgccgagccaagcgaagcagacggccgagacgttgacaccttcggcgcggcatctctcgagagttccgctccggcgctccacctccaccgctggcggtttcttattccgttccgttccgcctcctgctctgctcctctccacaccacacggcacgaaaccgttacggcaccggcagcacccagcacgggagaggggattcctttcccaccgttccttccctttccgccccgccgctataaatagccagccccatccccagcttttttccccaatctcatctcctctctcctgttgttcggagcacacgcacaatccgatcgatccccaaatccccttcgtctctcctcgcgagcctcgtggatcccagcttcaaggtacggcgatcgatcatcccccctccttctctctaccttcttttctctagactacatcggatggcgatccatggttagggcctgctagtttcccttcctgttttgtcgatggctgcgaggcacaatagatctgatggcgttatgacggctaacttgtcatgttgttgcgatttatagtccctttaggagatcagtttaatttctcggatggttcgagatcggtggtccatggttagtaccctaagatccgcgctgttagggttcgtagatggaggcgacctgttctgattgttaacttgtcagtacctgggaaatcctgggatggttctagctcgtccgcagatgagatcgatttcatgatcctctgtatcttgtttcgttgcctaggttccgtctaatctatccgtggtatgatgtagatgttttgatcgtgctaactacgtcttgtaaagttaattgtcaggtcataatttttagcatgcctttttttttgtttggttttgtctaattgggctgtcgttctagatcagagtagaagactgttccaaactacctgctggatttattgaacttggatctgtatgtgtgtcacatatcttcataaattcatgattaagatggattgaaatatcttttatctttttggtatggatagttctatatgttggtgtggctttgttagatgtatacatgcttagatacatgaagcaacgtgctgctactgtttagtaattgctgttcatttgtctaataaacagataaggatatgtatttatgttgctgttggttttgctggtactttgttggatacaaatgcttcaatacagaaaacagcatgctgctacgatttaccatttatctaatcttatcatatgtctaatctaataaacaaacatgcttttaaattatcttcatatgcttggatgatggcatacacagcggctatgtgtggttttttaaatacccagcatcatgggcatgcatgacactgctttaatatgctttttatttgcttgagactgtttcttttgtttatactgaccctttagttcggtgactcttctgcaggtcgactttaacttagcctaggatccatggcccagtccaagcacggcctgaccaaggagatgaccatgaagtaccgcatggagggctgcgtggacggccacaagttcgtgatcaccggcgagggcatcggctaccccttcaagggcaagcaggccatcaacctgtgcgtggtggagggcggccccttgcccttcgccgaggacatcttgtccgccgccttcatgtacggcaaccgcgtgttcaccgagtacccccaggacatcgtcgactacttcaagaactcctgccccgccggctacacctgggaccgctccttcctgttcgaggacggcgccgtgtgcatctgcaacgccgacatcaccgtgagcgtggaggagaactgcatgtaccacgagtccaagttctacggcgtgaacttccccgccgacggccccgtgatgaagaagatgaccgacaactgggagccctcctgcgagaagatcatccccgtgcccaagcagggcatcttgaagggcgacgtgagcatgtacctgctgctgaaggacggtggccgcttgcgctgccagttcgacaccgtgtacaaggccaagtccgtgccccgcaagatgcccgactggcacttcatccagcacaagctgacccgcgaggaccgcagcgacgccaagaaccagaagtggcacctgaccgagcacgccatcgcctccggctccgccttgccctccggactcagatctcgatagggtaccaatggccagttaacagatccagctgctgctgttctagggttcacaagtctgcctatttgtcttccccaatggagctatggttgtctggtctggtccttggtcgtgtcccgtttcattgtgtactatttacctgtaatgtgtatccttaagtctggtttgatggtgtctgaaacgttttgctgtggtagagcagcatggaagaactataatgaataagtgatccctaatcattgtgtccaaattttgcttctgctatacccttttgtgctgtttcttatgttttgcttaaaaatttgatctgacaaacaaatttgtctaaattatgctcttgttctgactgtgtactgtacacatttgtattgctaccggtttggcacatagttttctctttgattgcagatcaaacccttctgattgcagattgcttggctatggctgatgtgctcactgttcttctttagcttgtatattgctgatggtggcttggctacggctgaaaaagttgctgctgcgccgacttggcaactgttgctccagtaatgctttgtcctctcttcctagccgccgacttggcacttggcagctgttgctcctgtaatgcgttgttatctcttatctcttgagatgtactatgattttgaggctgtttgacttgtgccagattgccagtgctgatgctatattatctcaggtttttatgctagtatatgttttactgtgtgctgcctgtgtcgagttacgtaatctattgaaccgctatgcgtgttgatgccctgttgttgcttgccagattgatgcccctgttgcttgcagcttgcaagctgtagtgaaatcctaaaattcgaaaccaaatctattctgaacttttgaagatctgtgatgtccggaagaaaagattcaaacagataaacgggactctccagaatctataaaataaatgatcgacaaacgctttgctttggtaggcttcctagttagttagcggaccgggatccgacggcgtcttcaccgccccgccgccgcccgagccggacttgtcgctgccgccgccgctgctcatcttgcgcgcttgtgtccctccctcagtccctgcgttcgcggatcgcgggcgggtgcgacccgtttggactccggccggtagccttcgtgccgacctcgctcggtccaccggtttgtcggggacccacatgtcagtgaaggtacgcgtccacgtccacagaccctactaccccagacgagtccaaatcgctgttccctcacactctcgtgtaccagcgcgcggcggaaagcacctttccaacaaccgccgacacgtcggtcccacgtcggcatgctccaccggtcagtgtttggcgtgtacggctcccggcgacgaacgagtgtggcctaagctttcctactcccatcccatctgagccacacatctctctcacgccacgcgcacaaaacagccaggctcccacgcgcatcaaccggctctccctttccgtgccactcgcccccaagccccaaaccctcgccgccgcctccgagacagccgccgccacctaggccatggccaccgccgccgccgcgtctaccgcgctcactggcgccactaccgctgcgcccaaggcgaggcgccgggcgcacctcctggccacccgccgcgccctcgccgcgcccatcaggtgctcagcggcgtcacccgccatgccgatggctcccccggccaccccgctccggccgtggggccccaccgagccccgcaagggtgctgacatcctcgtcgagtccctcgagcgctgcggcgtccgcgacgtcttcgcctaccccggcggcgcgtcgatggagatccaccaggcactcacccgctcccccgtcatcgccaaccacctcttccgccacgagcaaggggaggcctttgccgcctccggctacgcgcgctcctcgggccgcgtcggcgtctgcatcgccacctccggccccggcgccaccaacctagtctccgcgctcgccgacgcgctgctcgattccgtcccgatggtcgccatcacgggacaggtggcgcgacgcatgattggcaccgacgccttccaggagacgcccatcgtcgaggtcacgcgctccatcaccaagcacaactacctggtcctcgacgtcgacgacatcccccgcgtcgtgcaggaggctttcttcctcgcctcctctggtcgaccagggccggtgcttgtcgacatccccaaggacatccagcagcagatggcggtgcctgtctgggacaagcccatgagtctgcctgggtacattgcgcgccttcccaagccccctgcgactgagttgcttgagcaggtgctgcgtcttgttggtgaatcgcggcgccctgttctttatgtgggcggtggctgcgcagcatctggtgaggagttgcgacgctttgtggagctgactggaatcccggtcacaactactcttatgggcctcggcaacttccccagcgacgacccactgtctctgcgcatgctaggtatgcatgggacggtgtatgcaaattatgcagtggataaggccgatctgttgcttgcacttggtgtgcggtttgatgatcgcgtgacagggaagattgaggcttttgcaagcagggctaagattgtgcacgttgatattgatccggctgagattggcaagaacaagcagccacatgtgtccatctgtgcagatgttaagcttgctttgcagggcatgaatgctcttcttgaaggaagcacatcaaagaagagctttgactttggctcatggaacgatgagttggatcagcagaagagggaattcccccttgggtataaaacatctaatgaggagatccagccacaatatgctattcaggttcttgatgagctgacgaaaggcgaggccatcatcggcacaggtgttgggcagcaccagatgtgggcggcacagtactacacttacaagcggccaaggcagtggttgtcttcagctggtcttggggctatgggatttggtttgccggctgctgctggtgcttctgtggcaaacccaggtgtcactgttgttgacatcgatggagatggtagctttctcatgaacgttcaggagctagctatgatccgaattgagaacctcccagtgaaggtctttgtgctaaacaaccagcacctggggatggtggtgcagttggaggacaggttctataaggccaacagagcgcacacatacttgggaaacccagagaatgaaagtgagatatatccagatttcgtgacgatcgccaaagggttcaacattccagccgtccgtgtgacaaagaagaacgaagtccgcgcagcgataaagaagatgctcgagactccagggccgtacctcttggatataatcgtcccacaccaggagcatgtgttgcctatgatccctagtggtggggctttcaaggatatgatcctggatggtgatggcaggactgtgtactgacttcgaataggtacccggggatcctctagtgccgtgggtcgtttaagctgccgctgtacctgtgtcgtctggtgccttctggtgtacctgggaggttgtcgtctatcaagtatctgtggttggtgtcatgagtcagtgagtcccaatactgttcgtgtcctgtgtgcattatacccaaaactgttatgggcaaatcatgaataagcttgatgttcgaacttaaaagtctctgctcaatatggtattatggttgtttttgttcgtctcctaatatttgcctgggatcaaattttattggctggtgttcatttgacctccatgttcttgctaggctccattttttactctacagccataatatgtttgattgtttggtttgttctttgttgtacacctggttctgtcgagcttagttttcgacactggcttacagcttaacatgttgctattttattgggttctgattgctattttattgggttctgattgctagtttttgctgaatccaaaaaccatgttatttatttaagcgatccaggttattattatgatggtggctaagtttttttttttccaagggtaaattttctggattctccagtgtttctgtggccgaattcaatcactagagtcgacctgcaaagcttcggtccgggcctagaaggcccgcgccacttacgcttgattccgatgacttcgtaggttcctagctcaagccgctcgtgtccaagcgtcacttacgattagctaatgattacggcatctaggaccgactagctagctagctaagagctcggtaccgagctcgaattcattccgattaatcgtggcctcttgctcttcaggatgaagagctatgtttaaacgtgcaagcgctactagacaattcagtacattaaaaacgtccgcaatgtgttattaagttgtctaagcgtcaatttgtttacaccacaatatatcctgcca

SEQ ID NO: 80 - DNA, 22133 bp, Artificial sequence
  PHP97453
gtttacccgccaatatatcctgtcaaacactgcggccgcacttgaccgcggatggagccggagctgtggtgaggccatcgacgggaggtgggggagaacacagtctcagtgttctttgtgagtccgcaaggtttttagcttttctgtattaattaaggttgctgttggctgtagaatacggtcgtggaagagctgtatcggtagctactacgtaagctattatatactggaagtctggagctcgtcgatctccggtcgtcttcctccatttctcctcgtcttgctttgactgctgctaccatttgcttctgttttctgatgaagcatgccatgtcggccaccagtgtttgtgtggtttttgcagggaatggctttcaagtgctgtgattgaatggccctcgtcgtcctcggctgagctcacatggacgcgtcatgtgagtgagatatatgatcatatgatgagtggggttcgggtgagtgcgtacttgaagtaggatcccgctttcactcattcattcattggcctttaaaccgggaaattttcgcgaggagatggagggaagcaagcagggtgacgagtgcagagtgccgcgagcgctttgtcaaaaggcaccgccgtaggcaaaaaaatcaatggccctgactgactcgatggtagtactactgtagagactagagagggttgctccccatatcttcgtgtgacttttactccagcattgcatttccgtcattgagacgttaattaatagcagctttcgggacagatgactgtggccatgtttcgtcacggccgcttcgtgccagctgggggtactatagtactgtgattttgttagtaaaaactttcattaggccaccattgacgaccgggccttcgcttttgctgcgctaattaaccatttcccggcgaccgaagggaacatgaacatgccccgacacatgagggcatgaggactagtgttctccctgtcgttcgttgacttgactagtgatagtttaaacgctcttcaactggaagagcggttactaccggttcactagctagctgctaatcgagctagttaccctatgaggtgacatgaagcgctcacggttactatgacggttagcttcacgactgttggtggcagtagcgtacgacttagctatagttccggacttacctagctaataacttcgtatagcatacattatacgaagttatggttaccgaattcgagctcggtaccctggcggaccgaagcttgcatgcctgcagtgcagcgtgacccggtcgtgcccctctctagagataatgagcattgcatgtctaagttataaaaaattaccacatattttttttgtcacacttgtttgaagtgcagtttatctatctttatacatatatttaaactttactctacgaataatataatctatagtactacaataatatcagtgttttagagaatcatataaatgaacagttagacatggtctaaaggacaattgagtattttgacaacaggactctacagttttatctttttagtgtgcatgtgttctcctttttttttgcaaatagcttcacctatataatacttcatccattttattagtacatccatttagggtttagggttaatggtttttatagactaatttttttagtacatctattttattctattttagcctctaaattaagaaaactaaaactctattttagtttttttatttaataatttagatataaaatagaataaaataaagtgactaaaaattaaacaaataccctttaagaaattaaaaaaactaaggaaacatttttcttgtttcgagtagataatgccagcctgttaaacgccgtcgacgagtctaacggacaccaaccagcgaaccagcagcgtcgcgtcgggccaagcgaagcagacggcacggcatctctgtcgctgcctctggacccctctcgagagttccgctccaccgttggacttgctccgctgtcggcatccagaaattgcgtggcggagcggcagacgtgagccggcacggcaggcggcctcctcctcctctcacggcaccggcagctacgggggattcctttcccaccgctccttcgctttcccttcctcgcccgccgtaataaatagacaccccctccacaccctctttccccaacctcgtgttgttcggagcgcacacacacacaaccagatctcccccaaatccacccgtcggcacctccgcttcaagaggtccgccttgtttctcctctgtctcttgatctgactaatcttggtttatgattcgttgagtaattttggggaaagcttcgtccacagttttttttcgatgaacagtgccgcagtggcgctgatcttgtatgctatcctgcaatcgtggtgaacttatttcttttatatcctttactcccatgaaaaggctagtaatctttctcgatgtaacatcgtccagcactgctattaccgtgtggtccatccgacagtctggctgaacacatcatacgatctatggagcaaaaatctatcttccctgttctttaatgaaggacgtcattttcattagtatgatctaggaatgttgcaacttgcaaggaggcgtttctttctttgaatttaactaactcgttgagtggccctgtttctcggacgtaaggcctttgctgctccacacatgtccattcgaattttaccgtgtttagcaagggcgaaaagtttgcatcttgatgatttagcttgactatgcgattgctttcctgaacccgtgcaggatccgcccatggcggccaatgcgggcggcggtggagcgggaggaggcagcggcagcggcagcgtggctgcgccggcggtgtgccgccccagcggctcgcggtggacgccgacgccggagcagatcaggatgctgaaggagctctactacggctgcggcatccggtcgcccagctcggagcagatccagcgcatcaccgccatgctgcggcagcacggcaagatcgagggcaagaacgtcttctactggttccagaaccacaaggcccgcgagcgccagaagcgccgcctcaccagcctcgacgtcaacgtgcccgccgccggcgcggccgacgccaccaccagccaactcggcgtcctctcgctgtcgtcgccgccgccttcaggcgcggcgcctccctcgcccaccctcggcttctacgccgccggcaatggcggcggatcggctgtgctgctggacacgagttccgactggggcagcagcggcgctgctatggccaccgagacatgcttcctgcaggactacatgggcgtgacggacacgggcagctcgtcgcagtggccacgcttctcgtcgtcggacacgataatggcggcggccgcggcgcgggcggcgacgacgcgggcgcccgagacgctccctctcttcccgacctgcggcgacgacggcggcagcggtagcagcagctacttgccgttctggggtgccgcgtccacaactgccggcgccacttcttccgttgcgatccaacagcaacaccagctgcaggagcagtacagcttttacagcaacagcaacagcacccagctggccggcaccggcaaccaagacgtatcggcaacagcagcagcagccgccgccctggagctgagcctcagctcatggtgctccccttaccctgctgcagggagtatgtgagagcaacgcgagctgccactgctcttcactgatgtctctggaatggaaggaggaggaagtgagaacagatcattcgacaaagcagcattagtccgttgatcggtggaagaccactcgtcagtgttgagttgaatgtttgatcaataaaatacggcaatgctgtaagggttgttttttatgccattgataatacactgtactgttcagttgttgaactctatttcttagccatgccaagtgcttttcttattttgaataacattacagcaaaaagttgaaagacaaaaaaaaaaacccccgaacagagtgctttgggtcccaagcttctttagactgtgttcggcgttccccctaaatttctccccctatatctcactcacttgtcacatcagcgttctctttccccctatatctccacgctctacagcagttccacctatatcaaacctctataccccaccacaacaatattatatactttcatcttcaactaactcatgtaccttccaatttttttctactaataattatttacgtgcacagaaacttagcaaggagagagagagcgggaatttaaatgctcggcgttaggcttttagtccgctaggtggctagaccgaggttaggacgctagttcactaggggcctagtggtgttttaagacgtcacggtcaccacgcgtggaccgaagcttgcatgcctgcagtgcagcgtgacccggtcgtgcccctctctagagataatgagcattgcatgtctaagttataaaaaattaccacatattttttttgtcacacttgtttgaagtgcagtttatctatctttatacatatatttaaactttactctacgaataatataatctatagtactacaataatatcagtgttttagagaatcatataaatgaacagttagacatggtctaaaggacaattgagtattttgacaacaggactctacagttttatctttttagtgtgcatgtgttctcctttttttttgcaaatagcttcacctatataatacttcatccattttattagtacatccatttagggtttagggttaatggtttttatagactaatttttttagtacatctattttattctattttagcctctaaattaagaaaactaaaactctattttagtttttttatttaataatttagatataaaatagaataaaataaagtgactaaaaattaaacaaataccctttaagaaattaaaaaaactaaggaaacatttttcttgtttcgagtagataatgccagcctgttaaacgccgtcgacgagtctaacggacaccaaccagcgaaccagcagcgtcgcgtcgggccaagcgaagcagacggcacggcatctctgtcgctgcctctggacccctctcgagagttccgctccaccgttggacttgctccgctgtcggcatccagaaattgcgtggcggagcggcagacgtgagccggcacggcaggcggcctcctcctcctctcacggcaccggcagctacgggggattcctttcccaccgctccttcgcacgtaagcgcttacgcaccgaacaacgtaagcgcttacgcaccgaacaacgtaagcgcttacgctttcccttcctcgcccgccgtaataaatagacaccccctccacaccctctttccccaacctcgtgttgttcggagcgcacacacacacaaccagatctcccccaaatccacccgtcggcacctccgcttcaaggtacgccgctcgtcctcccccccccccctctctaccttctctagatcggcgttccggtccatgcatggttagggcccggtagttctacttctgttcatgtttgtgttagatccgtgtttgtgttagatccgtgctgctagcgttcgtacacggatgcgacctgtacgtcagacacgttctgattgctaacttgccagtgtttctctttggggaatcctgggatggctctagccgttccgcagacgggatcgatttcatgattttttttgtttcgttgcatagggtttggtttgcccttttcctttatttcaatatatgccgtgcacttgtttgtcgggtcatcttttcatgcttttttttgtcttggttgtgatgatgtggtctggttgggcggtcgttctagatcggagtagaattctgtttcaaactacctggtggatttattaattttggatctgtatgtgtgtgccatacatattcatagttacgaattgaagatgatggatggaaatatcgatctaggataggtatacatgttgatgcgggttttactgatgcatatacagagatgctttttgttcgcttggttgtgatgatgtggtgtggttgggcggtcgttcattcgttctagatcggagtagaatactgtttcaaactacctggtgtatttattaattttggaactgtatgtgtgtgtcatacatcttcatagttacgagtttaagatggatggaaatatcgatctaggataggtatacatgttgatgtgggttttactgatgcatatacatgatggcatatgcagcatctattcatatgctctaaccttgagtacctatctattataataaacaagtatgttttataattattttgatcttgatatacttggatgatggcatatgcagcagctatatgtggatttttttagccctgccttcatacgctatttatttgcttggtactgtttcttttgtcgatgctcaccctgttgtttggtgttacttctgcaggtcgactttaacttagcctaggatccatggccactgtgaacaactggctcgctttctccctctccccgcaggagctgccgccctcccagacgacggactccacactcatctcggccgccaccgccgaccatgtctccggcgatgtctgcttcaacatcccccaagattggagcatgaggggatcagagctttcggcgctcgtcgcggagccgaagctggaggacttcctcggcggcatctccttctccgagcagcatcacaaggccaactgcaacatgatacccagcactagcagcacagtttgctacgcgagctcaggtgctagcaccggctaccatcaccagctgtaccaccagcccaccagctcagcgctccacttcgcggactccgtaatggtggcttcctcggccggtgtccacgacggcggtgccatgctcagcgcggccgccgctaacggtgtcgctggcgctgccagtgccaacggcggcggcatcgggctgtccatgattaagaactggctgcggagccaaccggcgcccatgcagccgagggtggcggcggctgagggcgcgcaggggctctctttgtccatgaacatggcggggacgacccaaggcgctgctggcatgccacttctcgctggagagcgcgcacgggcgcccgagagtgtatcgacgtcagcacagggtggagccgtcgtcgtcacggcgccgaaggaggatagcggtggcagcggtgttgccggcgctctagtagccgtgagcacggacacgggtggcagcggcggcgcgtcggctgacaacacggcaaggaagacggtggacacgttcgggcagcgcacgtcgatttaccgtggcgtgacaaggcatagatggactgggagatatgaggcacatctttgggataacagttgcagaagggaagggcaaactcgtaagggtcgtcaagtctatttaggtggctatgataaagaggagaaagctgctagggcttatgatcttgctgctctgaagtactggggtgccacaacaacaacaaattttccagtgagtaactacgaaaaggagctcgaggacatgaagcacatgacaaggcaggagtttgtagcgtctctgagaaggaagagcagtggtttctccagaggtgcatccatttacaggggagtgactaggcatcaccaacatggaagatggcaagcacggattggacgagttgcagggaacaaggatctttacttgggcaccttcagcacccaggaggaggcagcggaggcgtacgacatcgcggcgatcaagttccgcggcctcaacgccgtcaccaacttcgacatgagccgctacgacgtgaagagcatcctggacagcagcgccctccccatcggcagcgccgccaagcgcctcaaggaggccgaggccgcagcgtccgcgcagcaccaccacgccggcgtggtgagctacgacgtcggccgcatcgcctcgcagctcggcgacggcggagccctggcggcggcgtacggcgcgcactaccacggcgccgcctggccgaccatcgcgttccagccgggcgccgccagcacaggcctgtaccacccgtacgcgcagcagccaatgcgcggcggcgggtggtgcaagcaggagcaggaccacgcggtgatcgcggccgcgcacagcctgcaggacctccaccacctgaacctgggcgcggccggcgcgcacgactttttctcggcagggcagcaggccgccgccgctgcgatgcacggcctgggtagcatcgacagtgcgtcgctcgagcacagcaccggctccaactccgtcgtctacaacggcggggtcggcgacagcaacggcgccagcgccgtcggcggcagtggcggtggctacatgatgccgatgagcgctgccggagcaaccactacatcggcaatggtgagccacgagcaggtgcatgcacgggcctacgacgaagccaagcaggctgctcagatggggtacgagagctacctggtgaacgcggagaacaatggtggcggaaggatgtctgcatgggggactgtcgtgtctgcagccgcggcggcagcagcaagcagcaacgacaacatggccgccgacgtcgggcatggcggcgcgcagctcttcagtgtctggaacgacacttaagcgtacctagtggtacctgacatcttatagtctgcaacctctcgtgtctgaattcctatctttatcaagtgttattgcttccacgactataggacagctttcgtcgaaagcttttgctcatgtgatctcgaaggattcatctagtctgatttttcgtgacttgtatcggttttattggattcatccaacatatatcaataaaaaatgagttgtgtttcctttcttcctagttcagttaaaattatttccctcctgcgcttgtgctgtaattgtctgtgtacctgttgtttgtgactgtgttagttcccttggatatgatttcgtatttgatatgtacatggagatagcttagcttcattattggagtatgaagttagtatgacatagtcactctcctggaaaattgacactgcaaaccatatttttattctgaaccacaaatcctagtcagtccgctggcatatgccgtccgtttgctgaatccagaacgtgggtttggagatgtacggctgagatgcctctatgcgaaggggatttcgtggtgaaacgagatgggagtagagcaacgcccgtggaagatgcttcaaacttccacacttttgagcaacgatcggcagtagtaaggtagacgatttcaagatcaaagcatatgaagataaacaacatcaacaacaaaatttgttggggttctatagagagaaacagagctacatacatacactgttttgtatctaccatctgagatgatgaaaagatgaaaaactaaagaatgccccggcgccaacgccaggacacgccgcgcgcgcgtcacccgagccatctcttgacccagccggcgctgtatatttacacacgttgcagcatcgatcaccacctgttcgatcgcgtcgccgtcaccggcgcgccgcgacttattgaactagtctagggcgcggctaacaacctagcttagattgccttgtctaaacccttaaggctaacgcgccactctagattcttatgtgcttctagtctccaaatgtggttgatagttattttgctctaagatcaacagtaatgaagtataaatcatcgttgtggtgtgctactcggttaattgagcattaacacacacaaacatgacgaggatggtataatctccaaaaatgtgtactttgttaggtgggaccctatagccttgattaatgtgctatgttaggcatgcctggaaacgtgtgacgcatatgttttgtgaacctgttgatattatatgtgcttttatattaccatattttattaaaatactaatatttattactagtaagatataacattctatctagcttaaaaactaaccataaatattccataataactagatttaccaaactaatatactaaatatacataataaatacaaaattaacaagacaataatcaatatttatgagcttaatatatttagacattatggttggtcgacgataatcatgctaacttttcgtaattgcttgattgaaatatgcttagaataatgcctctttgttctacatggcaaatagggaccattatggtgtaacaccctgggaaccacaaacaccccgaaatgctactaaactacacaactaaccttcatatataaaatttcgacagcatctcctttgaaaatttgcatagacgtggaagcaacagagtataaacagatatcatgataagaaaacatactagacattaataatctgctagaaatgggaagaatcgagctcggtaccctggttcacaaactcaatacaacacacagtggagtagggtattacgctccggcggcccgaaccactctaaatccttgtgtcctcgtgtgctcttccaccattaatgactgtaattgcagggacacgaagagttgtagcgcttttgccaacaagatccgctatatgctagtagagtggaacctgcacagcaacaagcatccaataatctgagaataagaattatgtgtggtgatggttctcatctctgcaactcgccattttcgcgagagaaccaaatccaagttggtgaagatcatgatttgggctcatgggctggcatagtagctattacctttgcaattgtggttcgaatctatccgatattctccttttcagggagagctaatgcttatgcttattgggtattttggtttgacactgcttcacgcccaaaaaaaggcaactatgtctgagttggatatggcccaaaaaaaggcagctatgtctgagttggatatggaagtcttctttcgtttagggtgaagtaagaccaagctcatgagcttattatcttaggtcggaacaaattagttgataggcatggcacatttatcaaattataatgattttaacagaaaagcaacacctctttttcagcagcaccagctttgcaagctgcaattgacactccaagcatagtatttgctccaaactcagcctgcatttcgcacaatatcatatctatttccatttggataaaatatattttccagaaatatgggaacagaatcaagatacagaaaaaagttgtggtagtagtggtaagtggaaacacaagtacagtgaaaagatagcattatttctgaacagtcaaattaaccgaaataagtagtatcacatactgcccctaaattgactacacccaatgtaaagaattgcttgagcatattgagccatcagttgtttgtttgtgtaacggatttgacaatgcagagttcaggagcaaaaaaccgcaaaggagagaaagagggaaaggatctcctagtatcccaccttgtggcgcgccctgtcaagtgcatgatggcctggtcgatctgcgtctgctgctgcggttccatcccaacgagtgcctccgacaccttgtcgttgatcacccgcaccgcgtaggcgacccccctggcgaggaacttccgcctctcggaggccccggccgcgtcggcggcggcgccctcgagcgcgcccacgctagccgtagatgctcggtgcacggccttgttggtgtgcaactcgacctcaacggccggtgcgctacgcccgtcaaggatctggcgcgcccgcaccctcgtgatcacggtgggcgcctcccgcctcatgtggccgacgatgaaaagcgccgggttaggggccttggcgcgcaccgccgtattcagggcctcctcgctcttgcgcgagagcaggtgcttccccaggtactcctgcactgacaaggctgccacagcggtggaatttgtcctcacgacttcgccacgtcgtcctcacctccctggcttcccacgactccgccgtatcgaggtgctcggtgggtcgtcttaatccgaagtccgaactaggaagacgagacagagaggtctgaggaatgggcctcgtttgatgttgagctgaattatttttccagcataagcccaggtcttggtccatgaacaaaattactagaaacccagcccagtactacgatctaaaagagggactgccactggatagctctctctagcattctccacgctccaatacagcggcgtcgtgtctatccgggtctatccgcgaacacgtgagaactctccagaaactgctttctcctccacttcatctctctcgctttccctctataaaaagaccccttctaggaattgagggagacagcaagcaccaagcagcgatccgaagctcaatcaattcactcaaacctcttccccaaatcttcgattagatcttcgttgacaagaagactagaaccgaacctgacatgtccaacctgctcacggttcaccagaaccttccggctcttccagtggacgcgacgtccgatgaagtcaggaagaacctcatggacatgttccgcgacaggcaagcgttcagcgagcacacctggaagatgctgctctccgtctgccgctcctgggctgcatggtgcaagctgaacaacaggaagtggttccccgctgagcccgaggacgtgagggattaccttctgtacctgcaagcgcgaggtttgtttctgcttctacctttgatatatatataataattatcattaattagtagtaatataatatttcaaatatttttttcaaaataaaagaatgtagtatatagcaattgcttttctgtagtttataagtgtgtatattttaatttataacttttctaatatatgaccaaaacatggtgatgcctaggtctggcagtgaagaccatccagcaacaccttggacaactgaacatgcttcacaggcgctccggcctcccgcgccccagcgactcgaacgccgtgagcctcgtcatgcgccgcatcaggaaggaaaacgtcgatgccggcgaaagggcaaagcaggccctcgcgttcgagaggaccgatttcgaccaggtccgcagcctgatggagaacagcgacaggtgccaggacattaggaacctggcgttcctcggaattgcatacaacacgctcctcaggatcgcggaaattgcccgcattcgcgtgaaggacattagccgcaccgacggcggcaggatgcttatccacattggcaggaccaagacgctcgtttccaccgcaggcgtcgaaaaggccctcagcctcggagtgaccaagctcgtcgaacgctggatctccgtgtccggcgtcgcggacgacccaaacaactacctcttctgccgcgtccgcaagaacggggtggctgcccctagcgccaccagccaactcagcacgagggccttggaaggtattttcgaggccacccaccgcctgatctacggcgcgaaggatgacagcggtcaacgctacctcgcatggtccgggcactccgcccgcgttggagctgctagggacatggcccgcgccggtgtttccatccccgaaatcatgcaggcgggtggatggacgaacgtgaacattgtcatgaactacattcgcaaccttgacagcgagacgggcgcaatggttcgcctcctggaagatggtgactgaggtacccaacctagacttgtccatcttctggattggccaacttaattaatgtatgaaataaaaggatgcacacatagtgacatgctaatcactataatgtgggcatcaaagttgtgtgttatgtgtaattactagttatctgaataaaagagaaagagatcatccatatttcttatcctaaatgaatgtcacgtgtctttataattctttgatgaaccagatgcatttcattaaccaaatccatatacatataaatattaatcatatataattaatatcaattgggttagcaaaacaaatctagtctaggtgtgttttgcgatccgatatcgacgtctaaaaacggcccctaactaacgcttagttgcccgctagattagtcccccgttagtgcctagttagacacacgacgaactaggggctagccccgggataacttcgtatagcatacattatacgaagttatgaattccggaccgggttaccgaattcctgcccttaaggccaattgttcaagattcattcaacaattgaaacatctcccatgattaaatcagtataaggttgctatggtcttgcttgacaaagtttttttttgagggaatttcaactaaatttttgagtgaaactatcaaatactgattttaaaaaatttttataaaaggaagcgcagagataaaaggccatctatgctacaaaagtacccaaaaatgtaatcctaaagtatgaattgcattttttttttgtttggacgaaaggaaaggagtattaccacaagaatgatatcatcttcatatttagatcttttttgggtaaagcttgagattctctaaatatagagaaatcagaagaaaaaaaaaccgtgttttggtggttttgatttctagcctccacaataactttgacggcgtcgacaagtctaacggacaccaagcagcgaaccaccagcgccgagccaagcgaagcagacggccgagacgttgacaccttcggcgcggcatctctcgagagttccgctccggcgctccacctccaccgctggcggtttcttattccgttccgttccgcctcctgctctgctcctctccacaccacacggcacgaaaccgttacggcaccggcagcacccagcacgggagaggggattcctttcccaccgttccttccctttccgccccgccgctataaatagccagccccatccccagcttttttccccaatctcatctcctctctcctgttgttcggagcacacgcacaatccgatcgatccccaaatccccttcgtctctcctcgcgagcctcgtggatcccagcttcaaggtacggcgatcgatcatcccccctccttctctctaccttcttttctctagactacatcggatggcgatccatggttagggcctgctagtttcccttcctgttttgtcgatggctgcgaggcacaatagatctgatggcgttatgacggctaacttgtcatgttgttgcgatttatagtccctttaggagatcagtttaatttctcggatggttcgagatcggtggtccatggttagtaccctaagatccgcgctgttagggttcgtagatggaggcgacctgttctgattgttaacttgtcagtacctgggaaatcctgggatggttctagctcgtccgcagatgagatcgatttcatgatcctctgtatcttgtttcgttgcctaggttccgtctaatctatccgtggtatgatgtagatgttttgatcgtgctaactacgtcttgtaaagttaattgtcaggtcataatttttagcatgcctttttttttgtttggttttgtctaattgggctgtcgttctagatcagagtagaagactgttccaaactacctgctggatttattgaacttggatctgtatgtgtgtcacatatcttcataaattcatgattaagatggattgaaatatcttttatctttttggtatggatagttctatatgttggtgtggctttgttagatgtatacatgcttagatacatgaagcaacgtgctgctactgtttagtaattgctgttcatttgtctaataaacagataaggatatgtatttatgttgctgttggttttgctggtactttgttggatacaaatgcttcaatacagaaaacagcatgctgctacgatttaccatttatctaatcttatcatatgtctaatctaataaacaaacatgcttttaaattatcttcatatgcttggatgatggcatacacagcggctatgtgtggttttttaaatacccagcatcatgggcatgcatgacactgctttaatatgctttttatttgcttgagactgtttcttttgtttatactgaccctttagttcggtgactcttctgcaggtcgactttaacttagcctaggatccatggcccagtccaagcacggcctgaccaaggagatgaccatgaagtaccgcatggagggctgcgtggacggccacaagttcgtgatcaccggcgagggcatcggctaccccttcaagggcaagcaggccatcaacctgtgcgtggtggagggcggccccttgcccttcgccgaggacatcttgtccgccgccttcatgtacggcaaccgcgtgttcaccgagtacccccaggacatcgtcgactacttcaagaactcctgccccgccggctacacctgggaccgctccttcctgttcgaggacggcgccgtgtgcatctgcaacgccgacatcaccgtgagcgtggaggagaactgcatgtaccacgagtccaagttctacggcgtgaacttccccgccgacggccccgtgatgaagaagatgaccgacaactgggagccctcctgcgagaagatcatccccgtgcccaagcagggcatcttgaagggcgacgtgagcatgtacctgctgctgaaggacggtggccgcttgcgctgccagttcgacaccgtgtacaaggccaagtccgtgccccgcaagatgcccgactggcacttcatccagcacaagctgacccgcgaggaccgcagcgacgccaagaaccagaagtggcacctgaccgagcacgccatcgcctccggctccgccttgccctccggactcagatctcgatagggtaccaatggccagttaacagatccagctgctgctgttctagggttcacaagtctgcctatttgtcttccccaatggagctatggttgtctggtctggtccttggtcgtgtcccgtttcattgtgtactatttacctgtaatgtgtatccttaagtctggtttgatggtgtctgaaacgttttgctgtggtagagcagcatggaagaactataatgaataagtgatccctaatcattgtgtccaaattttgcttctgctatacccttttgtgctgtttcttatgttttgcttaaaaatttgatctgacaaacaaatttgtctaaattatgctcttgttctgactgtgtactgtacacatttgtattgctaccggtttggcacatagttttctctttgattgcagatcaaacccttctgattgcagattgcttggctatggctgatgtgctcactgttcttctttagcttgtatattgctgatggtggcttggctacggctgaaaaagttgctgctgcgccgacttggcaactgttgctccagtaatgctttgtcctctcttcctagccgccgacttggcacttggcagctgttgctcctgtaatgcgttgttatctcttatctcttgagatgtactatgattttgaggctgtttgacttgtgccagattgccagtgctgatgctatattatctcaggtttttatgctagtatatgttttactgtgtgctgcctgtgtcgagttacgtaatctattgaaccgctatgcgtgttgatgccctgttgttgcttgccagattgatgcccctgttgcttgcagcttgcaagctgtagtgaaatcctaaaattcgaaaccaaatctattctgaacttttgaagatctgtgatgtccggaagaaaagattcaaacagataaacgggactctccagaatctataaaataaatgatcgacaaacgctttgctttggtaggcttcctagttagttagcggaccgaagcttcggtccgggcctagaaggccagcttcggccgcccctcggtaccctgggatctgcccttactttaacgcctctaaccaacacccctttatctttataaggaacaataaacagaatttgccccactgttctaaatcacctaataatatccccagctaaaaacaataaaggtttcctagaattaagacaagcatgactgttcctccaggagggtttggaacattgttgcagtcttgcagatacgggcgaagggtgagaaacagagcggagggctggaggtgacctcggtagtcgacgccggagttgagcttgacaacgacggggcggcccctgatggacttgaggaagtccgatggcgtcttcaccgtcccgccggcgcccgaggcgggcctgtcgctgccgccgccgccgctgctcatcttgcgcgctgtgcccccggcggtgtccctgtgttgcggatcgcgggtgggccaggtggatgcgagggcgacccgtttggactccggccggagccgccggatccctggtcggtgtcagtgccgtttactctgggccccacgtgtcagtaccgtctgtagatgacaacaacccgtcgtccacagtcatgtccaaaatatcctttcttcttttttttcgattcggatatctatcttccttttttttttccaaaaatcttcttgacgcaccagcgcgcacgtttgtggtaaacgccgacacgtcggtcccacgtcgatagaccccacccaccagtgagtagcgtgtacgtattcgggggtgacggacgtgtcgccgtcgtcttgctagtcccattcccatctgagccacacatctctgaacaaaaaaaaggagggaggcctccacgcacatccccctccgtgccacccgccccaaaccctcgcgccgcctccgagacagccgccgcaaccatggccaccgccgccgccgcgtctaccgcgctcactggcgccactaccgctgcgcccaaggcgaggcgccgggcgcacctcctggccacccgccgcgccctcgccgcgcccatcaggtgctcagcggcgtcacccgccatgccgatggctcccccggccaccccgctccggccgtggggccccaccgagccccgcaagggtgctgacatcctcgtcgagtccctcgagcgctgcggcgtccgcgacgtcttcgcctaccccggcggcgcgtccatggagatccaccaggcactcacccgctcccccgtcatcgccaaccacctcttccgccacgagcaaggggaggcctttgccgcctccggctacgcgcgctcctcgggccgcgtcggcgtctgcatcgccacctccggccccggcgccaccaacctagtctccgcgctcgccgacgcgctgctcgattccgtccccatggtcgccatcacgggacaggtggcgcgacgcatgattggcaccgacgccttccaggagacgcccatcgtcgaggtcacccgctccatcaccaagcacaactacctggtcctcgacgtcgacgacatcccccgcgtcgtgcaggaggctttcttcctcgcctcctctggtcgaccagggccggtgcttgtcgacatccccaaggacatccagcagcagatggcggtgcctgtctgggacaagcccatgagtctgcctgggtacattgcgcgccttcccaagccccctgcgactgagttgcttgagcaggtgctgcgtcttgttggtgaatcgcggcgccctgttctttatgtgggcggtggctgcgcagcatctggtgaggagttgcgacgctttgtggagctgactggaatcccggtcacaactactcttatgggcctcggcaacttccccagcgacgacccactgtctctgcgcatgctaggtatgcatgggacggtgtatgcaaattatgcagtggataaggccgatctgttgcttgcacttggtgtgcggtttgatgatcgcgtgacagggaagattgaggcttttgcaagcagggctaagattgtgcacgttgatattgatccggctgagattggcaagaacaagcagccacatgtgtccatctgtgcagatgttaagcttgctttgcagggcatgaatgctcttcttgaaggaagcacatcaaagaagagctttgactttggctcatggaacgatgagttggatcagcagaagagggaattcccccttgggtataaaacatctaatgaggagatccagccacaatatgctattcaggttcttgatgagctgacgaaaggcgaggccatcatcggcacaggtgttgggcagcaccagatgtgggcggcacagtactacacttacaagcggccaaggcagtggttgtcttcagctggtcttggggctatgggatttggtttgccggctgctgctggtgcttctgtggcaaacccaggtgtcactgttgttgacatcgatggagatggtagctttctcatgaacgttcaggagctagctatgatccgaattgagaacctcccagtgaaggtctttgtgctaaacaaccagcacctggggatggtggtgcagttggaggacaggttctataaggccaacagagcgcacacatacttgggaaacccagagaatgaaagtgagatatatccagatttcgtgacgatcgccaaagggttcaacattccagcggtccgtgtgacaaagaagaacgaagtccgcgcagcgataaagaagatgctcgagactccagggccgtacctcttggatataatcgtcccacaccaggagcatgtgttgcctatgatccctagtggtggggctttcaaggatatgatcctggatggtgatggcaggactgtgtactgactagctagtcagttaacagatcctctagtgccgtgggtcgtttaagctgccgctgtacctgtgtcgtctggtgccttctggtgtacctgggaggttgtcgtctatcaagtatctgtggttggtgtcatgagtcagtgagtcccaatactgttcgtgtcctgtgtgcattatacccaaaactgttatgggcaaatcatgaataagcttgatgttcgaacttaaaagtctctgctcaatatggtattatggttgtttttgttcgtctcctaatatttgcctgggatcaaattttattggctggtgttcatttgacctccatgttcttgctaggctccattttttactctacagccataatatgtttgattgtttggtttgttctttgttgtacacctggttctgtcgagcttagttttcgacactggcttacagcttaacatgttgctattttattgggttctgattgctattttattgggttctgattgctagtttttgctgaatccaaaaaccatgttatttatttaagcgatccaggttattattatgatggtggctaagtttttttttttccaagggtaaattttctggattctccagtgtttctgtggccgaattcaatcactagagtcgacctgcaggccggtccgggcctagaaggcccgcgccacttacgcttgattccgatgacttcgtaggttcctagctcaagccgctcgtgtccaagcgtcacttacgattagctaatgattacggcatctaggaccgactagttcttatgtgcttctagtctccaaatgtggttgatagttattttgctctaagatcaacagtaatgaagtataaatcatcgttgtggtgtgctactcggttaattgagcattaacacacacaaacatgacgaggatggtataatctccaaaaatgtgtactttgttaggtgggaccctatagccttgattaatgtgctatgttaggcatgcctggaaacgtgtgacgcatatgttttgtgaacctgttgatattatatgtgcttttatattaccatattttattaaaatactaatatttattactagtaagatataacattctatctagcttaaaaactaaccataaatattccataataactagatttaccaaactaatatactaaatatacataataaatacaaaattaacaagacaataatcaatatttatgagcttaatatatttagacattatggttggtcgacgataatcatgctaacttttcgtaattgcttgattgaaatatgcttagaataatgcctctttgttctacatggcaaatagggaccattatggtgtaacaccctgggaaccacaaacaccccgaaatgctactaaactacacaactaaccttcatatataaaatttcgacagcatctcctttgaaaatttgcatagacgtggaagcaacagagtataaacagatctgcgtttaaacgtgcaagcgctactagacaattcagtacattaaaaacgtccgcaatgtgttattaagttgtctaagcgtcaatttgtttacaccacaatatatcctgcca

SEQ ID NO: 81 - DNA, 23834 bp, Artificial sequence
  PHP97458
gtttacccgccaatatatcctgtcaaacactgatagtttaaactgaaggcgggaaacgacaatctgatcatgagcggagaattaagggagtcacgttatgacccccgccgatgacgcgggacaagccgttttacgtttggaactgacagaaccgcaacgttgaaggagccactcagcaagctggtacgattgtaatacgactcactatagggcgaattgagcgctgtttaaacgctcttcaactggaagagcggttacgctgtttaaacgctcttcaactggaagagcggttactaccggttcactagctagctgctaatcgagctagttaccctatgaggtgacatgaagcgctcacggttactatgacggttagcttcacgactgttggtggcagtagcgtacgacttagctatagttccggacttacccttaagcgatttaaatctgcggttaccgaattcgagctcggtacctagtacccttgtacttttggtttcacctgcatagagaaaacccacaagaatatgacagtctgatttgtcagtctcattctcaagcaacatttctctatccgttactttcatggtgaataacacaatccatcatcaatactttgtgttactcagaaactgaaagttattccgagtcttgcatatctttggacctactcgtttttctaccattattgctgattgttaagctctcgctacttgaatcggcattgttggagtgggaaggttcaaaaaattggagttatgactagttgtctctttctatgtacgatggagaaaatgaataaacaactgagaaaatggctcttgtttagttgatgatgctcttaagctttccactggttgccatatatgatttgggcatttcactttgatcttaatgggccttgtaaagcccaagactcatgattatctttagttgatgctcttaattaggtgtgggcaaataattcaaactgtatgtacccgaccaaaaccaaagcaaaaataatcgaaccaaaccgaaaatttaaaaataaccgaatgaaaactaaatcctataactgaaagaactgaaaccgaatcaaaatatttaatgtaaccaaaaatatccgaaatataattatattgtcaaaaatattaataatttctagattaaataattaaaaatacttaaaaatttatataaaatagtaaaaatactcgaaaataaccacaaatattcaaaaacaaccgaaatatcccaaaatattcaaagcaaaataaccgaatggataccaaattttaaaaccgaaaaaactggaacaaaaccaaaatcgaaccaaaatttcaaaaatcgaataaatactaaactttagaacaaaaaaaaacgataaccgaatgtatacgaaccaaagccgaattagataaccgaacgtccaggactactcttaatctttccgccacttatgatttgggctattactttgtttataatgagccttttcaagctcaagttcatgattgtccgtgagatgagaaactgacttgttggattcgaaaccctagctagtattggttaatacttaatacataaatgacctgcattgacatcatcatccaagaaaataaaaattgtatgcttgagatatttagttttcctagctaggttttctttattttagtaccgaatctttaggtgtgccacgttaatttagacccattttttcatacttaccaactgagtctagtttaatcatgactataatcgtataaaatgattcagtcgacgtcattgcgaacgtatataaaatcatccaaattgacgtcattccaaagaggtaagcatgcttatctaagagtccgagcatactaaacaagacgacattttatttgcactccaaatcaaattttgtattgcctaaagaaaaacaatcaaactcaagtttcttaaaattaatttcattcaaactaatcactttcaatatctcacatattattcatgccatttctatttgtctaaacatgatttaaaaaaaaaagtaaaatacaaagattactatgcaaaaactctataaaaaaaaattcaaatttcttatttatttgtgacatcaaattttcaaaataatttttttaattatcggttgatccggtcagtcgataaaaacataaactttcagcgaccgttaaaactttcctactaccgatttagagaaaatcttagcttgaaacgtaattgtaacctgccttcatgcaagtcgcaagatatgtcatcctaagttgtatatgttttctcaaaagatgtatttacttgagaaaatacgtttcaacgttgatggacaaccaattaagaatcaagcacctttcgtaatcaatttaggcttatcgtctaaggtatactgatttacgacagttgactagacttataaggaacaaaataatagaatagtttctaaacacttcacctaatcatagagactaagatggtaattcgtaaacgacaaagcctagtgacactgtccattgtaaaattccacatcatattagtattaaacatatacatgtagtttcctgaacacatgtagtatcaaacacacttcgtggcttcttcctcgaaacctgcggccgcgctatagttccggacttacccttaagataacttcgtatagcatacattatacgaagttatgggcccacgcgtgaagagcggttaccagagctggtcacctttgtccaccaagatggaactgtcttcggccagaatggccatctggattcagcaggcctagaaggccatttatcgctatcaactttgtatagaaaagttgggccgaattcgagctcggtacggccagaatggcccggaccgaagcttgtgaatttatgagagctgtacttactcactaaaacaaacaaacactgatagtttaaactgaaggcgggaaacgacaatctgatcatgagcggagaattaagggagtcacgttatgacccccgccgatgacgcgggacaagccgttttacgtttggaactgacagaaccgcaacgattgaaggagccactcagccgcgggtttctggagtttaatgagctaagcacatacgtcagaaaccattattgcgcgttcaaaagtcgcctaaggtcactatcagctagcaaatatttcttgtcaaaaatgctccactgacgttccataaattcccctcggtatccaattagagtctcatattcactccccgggggatctcgactctagaggatcgctcaggaaggccgctgagatagaggcatggcggccaatgcgggcggcggtggagcgggaggaggcagcggcagcggcagcgtggctgcgccggcggtgtgccgccccagcggctcgcggtggacgccgacgccggagcagatcaggatgctgaaggagctctactacggctgcggcatccggtcgcccagctcggagcagatccagcgcatcaccgccatgctgcggcagcacggcaagatcgagggcaagaacgtcttctactggttccagaaccacaaggcccgcgagcgccagaagcgccgcctcaccagcctcgacgtcaacgtgcccgccgccggcgcggccgacgccaccaccagccaactcggcgtcctctcgctgtcgtcgccgccgccttcaggcgcggcgcctccctcgcccaccctcggcttctacgccgccggcaatggcggcggatcggctgtgctgctggacacgagttccgactggggcagcagcggcgctgccatggccaccgagacatgcttcctgcaggactacatgggcgtgacggacacgggcagctcgtcgcagtggccacgcttctcgtcgtcggacacgataatggcggcggccgcggcgcgggcggcgacgacgcgggcgcccgagacgctccctctcttcccgacctgcggcgacgacggcggcagcggtagcagcagctacttgccgttctggggtgccgcgtccacaactgccggcgccacttcttccgttgcgatccagcagcaacaccagctgcaggagcagtacagcttttacagcaacagcaacagcacccagctggccggcaccggcaaccaagacgtatcggcaacagcagcagcagccgccgccctggagctgagcctcagctcatggtgctccccttaccctgctgcagggagtatgtgagagcaacgcgagctgccactgctcttcactgatgtctctggaatggaaggaggaggaagtgagcatagcgttggtgcgttgctgtcaagggcgaattcacatggttaacctagacttgtccatcttctggattggccaacttaattaatgtatgaaataaaaggatgcacacatagtgacatgctaatcactataatgtgggcatcaaagttgtgtgttatgtgtaattactagttatctgaataaaagagaaagagatcatccatatttcttatcctaaatgaatgtcacgtgtctttataattctttgatgaaccagatgcatttcattaaccaaatccatatacatataaatattaatcatatataattaatatcaattgggttagcaaaacaaatctagtctaggtgtgttttgcgaatgcggccgccaccggtcaccacgcgtggaccgaagcttgcatgcctgcagtgcagcgtgacccggtcgtgcccctctctagagataatgagcattgcatgtctaagttataaaaaattaccacatattttttttgtcacacttgtttgaagtgcagtttatctatctttatacatatatttaaactttactctacgaataatataatctatagtactacaataatatcagtgttttagagaatcatataaatgaacagttagacatggtctaaaggacaattgagtattttgacaacaggactctacagttttatctttttagtgtgcatgtgttctcctttttttttgcaaatagcttcacctatataatacttcatccattttattagtacatccatttagggtttagggttaatggtttttatagactaatttttttagtacatctattttattctattttagcctctaaattaagaaaactaaaactctattttagtttttttatttaataatttagatataaaatagaataaaataaagtgactaaaaattaaacaaataccctttaagaaattaaaaaaactaaggaaacatttttcttgtttcgagtagataatgccagcctgttaaacgccgtcgacgagtctaacggacaccaaccagcgaaccagcagcgtcgcgtcgggccaagcgaagcagacggcacggcatctctgtcgctgcctctggacccctctcgagagttccgctccaccgttggacttgctccgctgtcggcatccagaaattgcgtggcggagcggcagacgtgagccggcacggcaggcggcctcctcctcctctcacggcaccggcagctacgggggattcctttcccaccgctccttcgcacgtaagcgcttacgcaccgaacaacgtaagcgcttacgcaccgaacaacgtaagcgcttacgctttcccttcctcgcccgccgtaataaatagacaccccctccacaccctctttccccaacctcgtgttgttcggagcgcacacacacacaaccagatctcccccaaatccacccgtcggcacctccgcttcaaggtacgccgctcgtcctcccccccccccctctctaccttctctagatcggcgttccggtccatgcatggttagggcccggtagttctacttctgttcatgtttgtgttagatccgtgtttgtgttagatccgtgctgctagcgttcgtacacggatgcgacctgtacgtcagacacgttctgattgctaacttgccagtgtttctctttggggaatcctgggatggctctagccgttccgcagacgggatcgatttcatgattttttttgtttcgttgcatagggtttggtttgcccttttcctttatttcaatatatgccgtgcacttgtttgtcgggtcatcttttcatgcttttttttgtcttggttgtgatgatgtggtctggttgggcggtcgttctagatcggagtagaattctgtttcaaactacctggtggatttattaattttggatctgtatgtgtgtgccatacatattcatagttacgaattgaagatgatggatggaaatatcgatctaggataggtatacatgttgatgcgggttttactgatgcatatacagagatgctttttgttcgcttggttgtgatgatgtggtgtggttgggcggtcgttcattcgttctagatcggagtagaatactgtttcaaactacctggtgtatttattaattttggaactgtatgtgtgtgtcatacatcttcatagttacgagtttaagatggatggaaatatcgatctaggataggtatacatgttgatgtgggttttactgatgcatatacatgatggcatatgcagcatctattcatatgctctaaccttgagtacctatctattataataaacaagtatgttttataattattttgatcttgatatacttggatgatggcatatgcagcagctatatgtggatttttttagccctgccttcatacgctatttatttgcttggtactgtttcttttgtcgatgctcaccctgttgtttggtgttacttctgcaggtcgactttaacttagcctaggatccatggccactgtgaacaactggctcgctttctccctctccccgcaggagctgccgccctcccagacgacggactccacactcatctcggccgccaccgccgaccatgtctccggcgatgtctgcttcaacatcccccaagattggagcatgaggggatcagagctttcggcgctcgtcgcggagccgaagctggaggacttcctcggcggcatctccttctccgagcagcatcacaaggccaactgcaacatgatacccagcactagcagcacagtttgctacgcgagctcaggtgctagcaccggctaccatcaccagctgtaccaccagcccaccagctcagcgctccacttcgcggactccgtaatggtggcttcctcggccggtgtccacgacggcggtgccatgctcagcgcggccgccgctaacggtgtcgctggcgctgccagtgccaacggcggcggcatcgggctgtccatgattaagaactggctgcggagccaaccggcgcccatgcagccgagggtggcggcggctgagggcgcgcaggggctctctttgtccatgaacatggcggggacgacccaaggcgctgctggcatgccacttctcgctggagagcgcgcacgggcgcccgagagtgtatcgacgtcagcacagggtggagccgtcgtcgtcacggcgccgaaggaggatagcggtggcagcggtgttgccggcgctctagtagccgtgagcacggacacgggtggcagcggcggcgcgtcggctgacaacacggcaaggaagacggtggacacgttcgggcagcgcacgtcgatttaccgtggcgtgacaaggcatagatggactgggagatatgaggcacatctttgggataacagttgcagaagggaagggcaaactcgtaagggtcgtcaagtctatttaggtggctatgataaagaggagaaagctgctagggcttatgatcttgctgctctgaagtactggggtgccacaacaacaacaaattttccagtgagtaactacgaaaaggagctcgaggacatgaagcacatgacaaggcaggagtttgtagcgtctctgagaaggaagagcagtggtttctccagaggtgcatccatttacaggggagtgactaggcatcaccaacatggaagatggcaagcacggattggacgagttgcagggaacaaggatctttacttgggcaccttcagcacccaggaggaggcagcggaggcgtacgacatcgcggcgatcaagttccgcggcctcaacgccgtcaccaacttcgacatgagccgctacgacgtgaagagcatcctggacagcagcgccctccccatcggcagcgccgccaagcgcctcaaggaggccgaggccgcagcgtccgcgcagcaccaccacgccggcgtggtgagctacgacgtcggccgcatcgcctcgcagctcggcgacggcggagccctggcggcggcgtacggcgcgcactaccacggcgccgcctggccgaccatcgcgttccagccgggcgccgccagcacaggcctgtaccacccgtacgcgcagcagccaatgcgcggcggcgggtggtgcaagcaggagcaggaccacgcggtgatcgcggccgcgcacagcctgcaggacctccaccacctgaacctgggcgcggccggcgcgcacgactttttctcggcagggcagcaggccgccgccgctgcgatgcacggcctgggtagcatcgacagtgcgtcgctcgagcacagcaccggctccaactccgtcgtctacaacggcggggtcggcgacagcaacggcgccagcgccgtcggcggcagtggcggtggctacatgatgccgatgagcgctgccggagcaaccactacatcggcaatggtgagccacgagcaggtgcatgcacgggcctacgacgaagccaagcaggctgctcagatggggtacgagagctacctggtgaacgcggagaacaatggtggcggaaggatgtctgcatgggggactgtcgtgtctgcagccgcggcggcagcagcaagcagcaacgacaacatggccgccgacgtcgggcatggcggcgcgcagctcttcagtgtctggaacgacacttaagcgtacctagtggtacctgacatcttatagtctgcaacctctcgtgtctgaattcctatctttatcaagtgttattgcttccacgactataggacagctttcgtcgaaagcttttgctcatgtgatctcgaaggattcatctagtctgatttttcgtgacttgtatcggttttattggattcatccaacatatatcaataaaaaatgagttgtgtttcctttcttcctagttcagttaaaattatttccctcctgcgcttgtgctgtaattgtctgtgtacctgttgtttgtgactgtgttagttcccttggatatgatttcgtatttgatatgtacatggagatagcttagcttcattattggagtatgaagttagtatgacatagtcactctcctggaaaattgacactgcaaaccatatttttattctgaaccacaaatcctagtcagtccgctggcatatgccgtccgtttgctgaatccagaacgtgggtttggagatgtacggctgagatgcctctatgcgaaggggatttcgtggtgaaacgagatgggagtagagcaacgcccgtggaagatgcttcaaacttccacacttttgagcaacgatcggcagtagtaaggtagacgatttcaagatcaaagcatatgaagataaacaacatcaacaacaaaatttgttggggttctatagagagaaacagagctacatacatacactgttttgtatctaccatctgagatgatgaaaagatgaaaaactaaagaatgccccggcgccaacgccaggacacgccgcgcgcgcgtcacccgagccatctcttgacccagccggcgctgtatatttacacacgttgcagcatcgatcaccacctgttcgatcgcgtcgccgtcaccggcgcgccgcgacttattgaactagtctagggcgcggctaacaacctagcttagattgccttgtctaaacccttaggctaacgcgccactctagaaggccgatctcccccgaacgcgccagatcttgaagaaactatgtgctgtagtatagccgctgcccgctggctagctagctagttgagtcatttagcggcgatgattgagtaataatgtgtcacgcatcaccatgcatgggtggcagtgtcagtgtgagcaatgacctgaatgaacaattgaaatgaaaagaaaaaagtattgttccaaattaaacgttttaaccttttaataggtttatacaataattgatatatgttttctgtatatgtctaatttgttatcatccatttagatatagacaaaaaaaatctaagaactaaaacaaatgctaatttgaaatgaagggagtatatattgggataatgtcgatgagatccctcgtaatatcaccgacatcacacgtgtccagttaatgtatcagtgatacgtgtattcacatttgttgcgcgtaggcgtacccaacaattttgatcgactatcagaaagtcaacggaagcgagtcgacctcgagggggggccccggccgaagcttcggccggggcccatcgataacgagtatcggtccccattgacacatctactcctaacgctaacaacattcttcacttctagtgtatggcatcgacaattggtactttaatcttgggtcttcacttttacaactaaacaacccaaatataaatattatttgagtgggtttggtgttcatcagaacattcccatctttggtaatgctacctagcataaaagtgagctatcacgttgggcagcccattccatgcaatttttaccttcctcaaaaaaaatctttgatatatttatggtataataatttaaacttcacattgatcataattttttcagcaaataagttccataatttggtgtttgcaatatcgaaattgttactcatagggtccagttgatttaatgacattagtgttgttaagttcacatgcttcaaagaattctacatgtctacaatgctgcatttgtctgtaaaatttgggttcttgtaaaaaatacatgtgttgaatatttaccaaaaaaatataatgcgatatgactttgtgtgagcatgtttggacacagttacaagtttacttctaaacttatattatgttttgcttcgtgcaagtacaagtgatttgaatatccaaggccaaagcatgtgtccatcactatatcaaatcaacataccatatatgtatatactcaacaaaaagcacaaataatcacatctatgttataaacacacccccacacaaccaaacattaacattcaataggttgtgctaggacatcattgggatgatgaagtaatattgtattatctatgtattgaccaagcatgagtttaaaattacgatttgatgttttcagttatttatatgatgaacatagttcagaaatatatcgagataaatctcaatcaatatattgattatttctaggaaacacatgccggtatgagggcaccattgtcgagtacatcttaagtgagttaacggatcctctagagtcgacctgcaggcatgcccgcggatatcgatgggccccggccgaagcttcaagtttgtacaaaaaagcaggctccggccagaatggcccggaccgggttaccgaattcgagctcggtaccctgggatccgatatcgatgggccctggccgaagcttggtcacccggtccgggcctagaaggccgatctcccgggcacccagctttcttgtacaaagtggccgttaacggatcggccagaatggcccggaccgggttaccgaattcgagctcggtaccctggttcacaaactcaatacaacacacagtggagtagggtattacgctccggcggcccgaaccactctaaatccttgtgtcctcgtgtgctcttccaccattaatgactgtaattgcagggacacgaagagttgtagcgcttttgccaacaagatccgctatatgctagtagagtggaacctgcacagcaacaagcatccaataatctgagaataagaattatgtgtggtgatggttctcatctctgcaactcgccattttcgcgagagaaccaaatccaagttggtgaagatcatgatttgggctcatgggctggcatagtagctattacctttgcaattgtggttcgaatctatccgatattctccttttcagggagagctaatgcttatgcttattgggtattttggtttgacactgcttcacgcccaaaaaaaggcaactatgtctgagttggatatggcccaaaaaaaggcagctatgtctgagttggatatggaagtcttctttcgtttagggtgaagtaagaccaagctcatgagcttattatcttaggtcggaacaaattagttgataggcatggcacatttatcaaattataatgattttaacagaaaagcaacacctctttttcagcagcaccagctttgcaagctgcaattgacactccaagcatagtatttgctccaaactcagcctgcatttcgcacaatatcatatctatttccatttggataaaatatattttccagaaatatgggaacagaatcaagatacagaaaaaagttgtggtagtagtggtaagtggaaacacaagtacagtgaaaagatagcattatttctgaacagtcaaattaaccgaaataagtagtatcacatactgcccctaaattgactacacccaatgtaaagaattgcttgagcatattgagccatcagttgtttgtttgtgtaacggatttgacaatgcagagttcaggagcaaaaaaccgcaaaggagagaaagagggaaaggatctcctagtatcccaccttgtggcgcgccctgtcaagtgcatgatggcctggtcgatctgcgtctgctgctgcggttccatcccaacgagtgcctccgacaccttgtcgttgatcacccgcaccgcgtaggcgacccccctggcgaggaacttccgcctctcggaggccccggccgcgtcggcggcggcgccctcgagcgcgcccacgctagccgtagatgctcggtgcacggccttgttggtgtgcaactcgacctcaacggccggtgcgctacgcccgtcaaggatctggcgcgcccgcaccctcgtgatcacggtgggcgcctcccgcctcatgtggccgacgatgaaaagcgccgggttaggggccttggcgcgcaccgccgtattcagggcctcctcgctcttgcgcgagagcaggtgcttccccaggtactcctgcactgacaaggctgccacagcggtggaatttgtcctcacgacttcgccacgtcgtcctcacctccctggcttcccacgactccgccgtatcgaggtgctcggtgggtcgtcttaatccgaagtccgaactaggaagacgagacagagaggtctgaggaatgggcctcgtttgatgttgagctgaattatttttccagcataagcccaggtcttggtccatgaacaaaattactagaaacccagcccagtactacgatctaaaagagggactgccactggatagctctctctagcattctccacgctccaatacagcggcgtcgtgtctatccgggtctatccgcgaacacgtgagaactctccagaaactgctttctcctccacttcatctctctcgctttccctctataaaaagaccccttctaggaattgagggagacagcaagcaccaagcagcgatccgaagctcaatcaattcactcaaacctcttccccaaatcttcgattagatcttcgttgacaagaagactagaaccgaacctgacatgtccaacctgctcacggttcaccagaaccttccggctcttccagtggacgcgacgtccgatgaagtcaggaagaacctcatggacatgttccgcgacaggcaagcgttcagcgagcacacctggaagatgctgctctccgtctgccgctcctgggctgcatggtgcaagctgaacaacaggaagtggttccccgctgagcccgaggacgtgagggattaccttctgtacctgcaagcgcgaggtttgtttctgcttctacctttgatatatatataataattatcattaattagtagtaatataatatttcaaatatttttttcaaaataaaagaatgtagtatatagcaattgcttttctgtagtttataagtgtgtatattttaatttataacttttctaatatatgaccaaaacatggtgatgcctaggtctggcagtgaagaccatccagcaacaccttggacaactgaacatgcttcacaggcgctccggcctcccgcgccccagcgactcgaacgccgtgagcctcgtcatgcgccgcatcaggaaggaaaacgtcgatgccggcgaaagggcaaagcaggccctcgcgttcgagaggaccgatttcgaccaggtccgcagcctgatggagaacagcgacaggtgccaggacattaggaacctggcgttcctcggaattgcatacaacacgctcctcaggatcgcggaaattgcccgcattcgcgtgaaggacattagccgcaccgacggcggcaggatgcttatccacattggcaggaccaagacgctcgtttccaccgcaggcgtcgaaaaggccctcagcctcggagtgaccaagctcgtcgaacgctggatctccgtgtccggcgtcgcggacgacccaaacaactacctcttctgccgcgtccgcaagaacggggtggctgcccctagcgccaccagccaactcagcacgagggccttggaaggtattttcgaggccacccaccgcctgatctacggcgcgaaggatgacagcggtcaacgctacctcgcatggtccgggcactccgcccgcgttggagctgctagggacatggcccgcgccggtgtttccatccccgaaatcatgcaggcgggtggatggacgaacgtgaacattgtcatgaactacattcgcaaccttgacagcgagacgggcgcaatggttcgcctcctggaagatggtgactgaggtacccaacctagacttgtccatcttctggattggccaacttaattaatgtatgaaataaaaggatgcacacatagtgacatgctaatcactataatgtgggcatcaaagttgtgtgttatgtgtaattactagttatctgaataaaagagaaagagatcatccatatttcttatcctaaatgaatgtcacgtgtctttataattctttgatgaaccagatgcatttcattaaccaaatccatatacatataaatattaatcatatataattaatatcaattgggttagcaaaacaaatctagtctaggtgtgttttgcgatccgatatcgaattggccacggtaccagctgctgctgttctagggttcacaagtctgcctatttgtcttccccaatggagctatggttgtctggtctggtccttggtcgtgtcccgtttcattgtgtactatttacctgtaatgtgtatccttaagtctggtttgatggtgtctgaaacgttttgctgtggtagagcagcatggaagaactataatgaataagtgatccctaatcattgtgtccaaattttgcttctgctatacccttttgtgctgtttcttatgttttgcttaaaaatttgatctgacaaacaaatttgtctaaattatgctcttgttctgactgtgtactgtacacatttgtattgctaccggtttggcacatagttttctctttgattgcagatcaaacccttctgattgcagattgcttggctatggctgatgtgctcactgttcttctttagcttgtatattgctgatggtggcttggctacggctgaaaaagttgctgctgcgccgacttggcaactgttgctccagtaatgctttgtcctctcttcctagccgccgacttggcacttggcagctgttgctcctgtaatgcgttgttatctcttatctcttgagatgtactatgattttgaggctgtttgacttgtgccagattgccagtgctgatgctatattatctcaggtttttatgctagtatatgttttactgtgtgctgcctgtgtcgagttacgtaatctattgaaccgctatgcgtgttgatgccctgttgttgcttgccagattgatgcccctgttgcttgcagcttgcaagctgtagtgaaatcctaaaattccaaaccaaatctattctgaacttttgaagatctgtgatgtccggaagaaaagattcaaacagataaacgggactctccagaatctataaaataaatgatcgacaaacgctttgctttggtaggcttcaagcttggtcacccggtccgggcctagaaggccagcttcggccgccccgggcaactttattatacaaagttgatagataaatcagatatctggttcctaaggacccggcggaccgattaaactgattcggtccgacgcgttacctaataacttcgtatagcatacattatacgaagttattagctaactaactagtaagcttaagccatgggtcgacggatccgttaactagcgtggcatttggcaccgccgcacactatgcgagctaggagtgctagtttacagatgaaactatgaaaccaagaaaacacaattgtccgtagctagcgcgtggcgtcgtgtcaagcttcacacagtatcttcgttcttcactataaatcgcgcctgttgttcgtgagacccaccaccgtggataacagtcccctaataataagcgatcaacagcactgctgatggctgaacaccgaggcgccgccgcgcgtaaccatccgccggagcagcccgtcgtgccggcgaacgacgccttccccgaccgcgcccagcagctctgcctcgacgccgggcgcgcgctcgcgatgtgcggcgtgctcgtcgccgtccctcccgcattttacgcgtcgacgtcgcggacgacaccgcacttgccttcgtcggcttcgtcctctggatcatcggtgcgtggctgtgcctcctggcgctcacgcccttggctccacgggcggtgagggcgggcggggccgccgccagcaccttgctgatcaggtgcctgtccctttcatgaactactagcgcccgcgcccgcggccgccgggcacaagagaacacatcgatgttcgctgcgtacgtcagcaataaggcactctttgtcagtagtcgagtgcatatgttgggtgtttgccctgggagatttcaagtgttgtggccattatcccgcaggataaaaaatcggcggcttttggattgatacggaaaataacgatgtttcatgctcgtgttgtgtgtgtgacatcttgtcagccaagtttttaaccgttgctactccccctctgtgggctcagtgtgtggaccggaatacgtcgtacataggccgtagcctaagcccaatatgccgtttttcaggttggcctgtgtgacgacaagcgggtctcaaaagcccatcacgcaactggcctgcaattattggaggagagcgcgtcgagttggttccagaggctgcgtggtggggccggactctgcgacgacctctcgttcgcgtccgatttggttgccgtgagccgtgacgtaacgcctccttccgttcctccctatataagttccacccccgggtccggtttccccaagccccagtgacccccgatcccgatcgcgaaatctccgcacccgccggcaagggaccgaagcaagcctctctcccgaccgtcgcatcaaggtacgcgtccgctcgatctgtcctcttccttctcgatttgacttgctgtggtgcccgatcacgggatcagaatcgcaccagtgtagatttcgcatgttctaagatgtgttagtttccaggctaatccagttctcttgacgcccgatccgatcgagctccgtgtttatttcagcctaatcgtagtattcccctaaaatttcctcattagggggttcgcaagattgttggtcgacaggttcacttatgctcgatcgcttacttttagtcgattcatgctgcgtactattgttgccccccgtggttttatcttttctcgtgtgaaatccagtagatatagtagatatcgtagcattaggttttaattcaatcgattgattattgtatcatcaaaattgagaagttcgaatcatgcctatcatgctgcctcaaccgaaatcctgtatattgaagtttcaattcaattgattgatcattcattagattcaaccaaaatctagaaggttagatgacgcatgtcatgctgcctgcgtagtttacctttgatctgtttatgattaccttatcagtaggatatttgtgattttgggaagtagcactaactgattcatgctgacatgatgttccctttcagattatactgttgagtcctatctaattgatgctttgtatgctatatgaatacgtcatggtaaattagcagttaattagcatattagcaattgggcgtacctcatcaggattgctcttgtagatgtgtgtggtgatgtttcttgttcaattcatgttctgctttaaaagtatgtgttctctgtttgttaattaagattcatggttataatgatttggacctaattaatcagggttgcccttttagatgcgtggttacttgttgagttcatttttttcctgctatagttgtatgcgtttgttcattcatggttagatttgatttgtttcttctctattccatgccttccatatacttcaattgtagcttaacatgagatttctgtatatgcaggtcgaccgccggggatccacacgacaccatggcccagtccaagcacggcctgaccaaggagatgaccatgaagtaccgcatggagggctgcgtggacggccacaagttcgtgatcaccggcgagggcatcggctaccccttcaagggcaagcaggccatcaacctgtgcgtggtggagggcggccccttgcccttcgccgaggacatcttgtccgccgccttcatgtacggcaaccgcgtgttcaccgagtacccccaggacatcgtcgactacttcaagaactcctgccccgccggctacacctgggaccgctccttcctgttcgaggacggcgccgtgtgcatctgcaacgccgacatcaccgtgagcgtggaggagaactgcatgtaccacgagtccaagttctacggcgtgaacttccccgccgacggccccgtgatgaagaagatgaccgacaactgggagccctcctgcgagaagatcatccccgtgcccaagcagggcatcttgaagggcgacgtgagcatgtacctgctgctgaaggacggtggccgcttgcgctgccagttcgacaccgtgtacaaggccaagtccgtgccccgcaagatgcccgactggcacttcatccagcacaagctgacccgcgaggaccgcagcgacgccaagaaccagaagtggcacctgaccgagcacgccatcgcctccggctccgccttgccctccggactcagatctcgatagagtcaacctagacttgtccatcttctggattggccaacttaattaatgtatgaaataaaaggatgcacacatagtgacatgctaatcactataatgtgggcatcaaagttgtgtgttatgtgtaattactagttatctgaataaaagagaaagagatcatccatatttcttatcctaaatgaatgtcacgtgtctttataattctttgatgaaccagatgcatttcattaaccaaatccatatacatataaatattaatcatatataattaatatcaattgggttagcaaaacaaatctagtctaggtgtgttttgcgaattgcggcgcccttactttaacgcctctaaccaacacccctttatctttataaggaacaataaacagaatttgccccactgttctaaatcacctaataatatccccagctaaaaacaataaaggtttcctagaattaagacaagcatgactgttcctccaggagggtttggaacattgttgcagtcttgcagatacgggcgaagggtgagaaacagagcggagggctggaggtgacctcggtagtcgacgccggagttgagcttgacaacgacggggcggcccctgatggacttgaggaagtccgatggcgtcttcaccgtcccgccggcgcccgaggcgggcctgtcgctgccgccgccgccgctgctcatcttgcgcgctgtgcccccggcggtgtccctgtgttgcggatcgcgggtgggccaggtggatgcgagggcgacccgtttggactccggccggagccgccggatccctggtcggtgtcagtgccgtttactctgggccccacgtgtcagtaccgtctgtagatgacaacaacccgtcgtccacagtcatgtccaaaatatcctttcttcttttttttcgattcggatatctatcttccttttttttttccaaaaatcttcttgacgcaccagcgcgcacgtttgtggtaaacgccgacacgtcggtcccacgtcgatagaccccacccaccagtgagtagcgtgtacgtattcgggggtgacggacgtgtcgccgtcgtcttgctagtcccattcccatctgagccacacatctctgaacaaaaaaaaggagggaggcctccacgcacatccccctccgtgccacccgccccaaaccctcgcgccgcctccgagacagccgccgcaaccatggccaccgccgccgccgcgtctaccgcgctcactggcgccactaccgctgcgcccaaggcgaggcgccgggcgcacctcctggccacccgccgcgccctcgccgcgcccatcaggtgctcagcggcgtcacccgccatgccgatggctcccccggccaccccgctccggccgtggggccccaccgagccccgcaagggtgctgacatcctcgtcgagtccctcgagcgctgcggcgtccgcgacgtcttcgcctaccccggcggcgcgtccatggagatccaccaggcactcacccgctcccccgtcatcgccaaccacctcttccgccacgagcaaggggaggcctttgccgcctccggctacgcgcgctcctcgggccgcgtcggcgtctgcatcgccacctccggccccggcgccaccaacctagtctccgcgctcgccgacgcgctgctcgattccgtccccatggtcgccatcacgggacaggtggcgcgacgcatgattggcaccgacgccttccaggagacgcccatcgtcgaggtcacccgctccatcaccaagcacaactacctggtcctcgacgtcgacgacatcccccgcgtcgtgcaggaggctttcttcctcgcctcctctggtcgaccagggccggtgcttgtcgacatccccaaggacatccagcagcagatggcggtgcctgtctgggacaagcccatgagtctgcctgggtacattgcgcgccttcccaagccccctgcgactgagttgcttgagcaggtgctgcgtcttgttggtgaatcgcggcgccctgttctttatgtgggcggtggctgcgcagcatctggtgaggagttgcgacgctttgtggagctgactggaatcccggtcacaactactcttatgggcctcggcaacttccccagcgacgacccactgtctctgcgcatgctaggtatgcatgggacggtgtatgcaaattatgcagtggataaggccgatctgttgcttgcacttggtgtgcggtttgatgatcgcgtgacagggaagattgaggcttttgcaagcagggctaagattgtgcacgttgatattgatccggctgagattggcaagaacaagcagccacatgtgtccatctgtgcagatgttaagcttgctttgcagggcatgaatgctcttcttgaaggaagcacatcaaagaagagctttgactttggctcatggaacgatgagttggatcagcagaagagggaattcccccttgggtataaaacatctaatgaggagatccagccacaatatgctattcaggttcttgatgagctgacgaaaggcgaggccatcatcggcacaggtgttgggcagcaccagatgtgggcggcacagtactacacttacaagcggccaaggcagtggttgtcttcagctggtcttggggctatgggatttggtttgccggctgctgctggtgcttctgtggcaaacccaggtgtcactgttgttgacatcgatggagatggtagctttctcatgaacgttcaggagctagctatgatccgaattgagaacctcccagtgaaggtctttgtgctaaacaaccagcacctggggatggtggtgcagttggaggacaggttctataaggccaacagagcgcacacatacttgggaaacccagagaatgaaagtgagatatatccagatttcgtgacgatcgccaaagggttcaacattccagcggtccgtgtgacaaagaagaacgaagtccgcgcagcgataaagaagatgctcgagactccagggccgtacctcttggatataatcgtcccacaccaggagcatgtgttgcctatgatccctagtggtggggctttcaaggatatgatcctggatggtgatggcaggactgtgtactgactagctagtcagttaacagatctgccagatcctcggtgtacaaataacccgtcttatcctatgagacgggccggcgtcagtgtgttctggaggaatttttatgtcagagcctttttctttgtgtgcttgatgtagatgccaagggaagcttattggctgttgaagcttgatgcaaaataaattatggaactctgttttttgtttatctaataataactagcaaatatgcttccattgcattgaaactaacagccttttgtgtttccaagttttattttgtgacaatgtcatctatttcaattagttgtggaatcggaaacttgcaggactaacttggaaactccaatccctcagcatcctggactttttcctggtgtaatccatgtagatattattttaatcatcattttagttctggaggtttttccatctccggttttgctcccctttcttcaaaaaaaaaaaaaaaatgccgtaggcgccgcaacgcccacctgttgttcaaactcatgggcacgagtggctcgaagattttatacaacaattgctgtagtttcaccgttgctggtgaagaagcatttttttaaaaaaatatagtggtattcattttaattagtttagttgtgcagcgagcaaaatttggacatgctctgctcggaatctgatcgacctagacacagattagcagcagtagctttgtcatctgttccaagagttgcgatctgatagaagaaaaaaaaaccttcccttcaatgtaaaaccgaaactaacaagaaagaagcacagtgccgtttaggcaagtatggagtacgtattaagcatgtagaaggccatgcatgaaccactaacaagaaagaagcgcagtgccattcaggcaagcataagcatgtagattggcatgcatgaacaactaacagtagatcgtctctggtctgattagaagttttttgggaagccaagaaatcatgtacaactggttccatctcaaattccgtggcaaaaagaggcctaagcaacatacctcgagtagatcacattcaagcttggtcacccggtccgtcaatattctgattccgatgacttcgtaggttcctagctcaagccgctcgtgtccaagcgtcacttacgattagctaatgattacggcatctaggaccgactagtggcgcgccgactagctagctaaggtaccgagctcgaattcattccgattaatcgtggcctcttgctcttcaggatgaagagctatgtttaaacgtgcaagcgctactagacaattcagtacattaaaaacgtccgcaatgtgttattaagttgtctaagcgtcaatttgtttacaccacaatatatcctgcca

SEQ ID NO: 82 - DNA, 20809 bp, Artificial sequence
  PHP97725
gtttacccgccaatatatcctgtcaaacactgcggccgcacttgaccgcggatggagccggagctgtggtgaggccatcgacgggaggtgggggagaacacagtctcagtgttctttgtgagtccgcaaggtttttagcttttctgtattaattaaggttgctgttggctgtagaatacggtcgtggaagagctgtatcggtagctactacgtaagctattatatactggaagtctggagctcgtcgatctccggtcgtcttcctccatttctcctcgtcttgctttgactgctgctaccatttgcttctgttttctgatgaagcatgccatgtcggccaccagtgtttgtgtggtttttgcagggaatggctttcaagtgctgtgattgaatggccctcgtcgtcctcggctgagctcacatggacgcgtcatgtgagtgagatatatgatcatatgatgagtggggttcgggtgagtgcgtacttgaagtaggatcccgctttcactcattcattcattggcctttaaaccgggaaattttcgcgaggagatggagggaagcaagcagggtgacgagtgcagagtgccgcgagcgctttgtcaaaaggcaccgccgtaggcaaaaaaatcaatggccctgactgactcgatggtagtactactgtagagactagagagggttgctccccatatcttcgtgtgacttttactccagcattgcatttccgtcattgagacgttaattaatagcagctttcgggacagatgactgtggccatgtttcgtcacggccgcttcgtgccagctgggggtactatagtactgtgattttgttagtaaaaactttcattaggccaccattgacgaccgggccttcgcttttgctgcgctaattaaccatttcccggcgaccgaagggaacatgaacatgccccgacacatgagggcatgaggactagtgttctccctgtcgttcgttgacttgactagtgatagtttaaacgctcttcaactggaagagcggttactaccggttcactagctagctgctaatcgagctagttaccctatgaggtgacatgaagcgctcacggttactatgacggttagcttcacgactgttggtggcagtagcgtacgacttagctatagttccggacttacctagctaataacttcgtatagcatacattatacgaagttatggttaccgagctccaccttgctagttggatattacctcttctcttcaaagtatccttgaacgctcaccggttatcaaatctctacactatagctctgtagtcttgctagatagttagttctttagctctctctagaggttcacaaactcaatacaacacacagtggagtagggtattacgctccggcggcccgaaccactctaaatccttgtgtcctcgtgtgctcttccaccattaatgactgtaattgcagggacacgaagagttgtagcgcttttgccaacaagatccgctatatgctagtagagtggaacctgcacagcaacaagcatccaataatctgagaataagaattatgtgtggtgatggttctcatctctgcaactcgccattttcgcgagagaaccaaatccaagttggtgaagatcatgatttgggctcatgggctggcatagtagctattacctttgcaattgtggttcgaatctatccgatattctccttttcagggagagctaatgcttatgcttattgggtattttggtttgacactgcttcacgcccaaaaaaaggcaactatgtctgagttggatatggcccaaaaaaaggcagctatgtctgagttggatatggaagtcttctttcgtttagggtgaagtaagaccaagctcatgagcttattatcttaggtcggaacaaattagttgataggcatggcacatttatcaaattataatgattttaacagaaaagcaacacctctttttcagcagcaccagctttgcaagctgcaattgacactccaagcatagtatttgctccaaactcagcctgcatttcgcacaatatcatatctatttccatttggataaaatatattttccagaaatatgggaacagaatcaagatacagaaaaaagttgtggtagtagtggtaagtggaaacacaagtacagtgaaaagatagcattatttctgaacagtcaaattaaccgaaataagtagtatcacatactgcccctaaattgactacacccaatgtaaagaattgcttgagcatattgagccatcagttgtttgtttgtgtaacggatttgacaatgcagagttcaggagcaaaaaaccgcaaaggagagaaagagggaaaggatctcctagtatcccaccttgtggcgcgccctgtcaagtgcatgatggcctggtcgatctgcgtctgctgctgcggttccatcccaacgagtgcctccgacaccttgtcgttgatcacccgcaccgcgtaggcgacccccctggcgaggaacttccgcctctcggaggccccggccgcgtcggcggcggcgccctcgagcgcgcccacgctagccgtagatgctcggtgcacggccttgttggtgtgcaactcgacctcaacggccggtgcgctacgcccgtcaaggatctggcgcgcccgcaccctcgtgatcacggtgggcgcctcccgcctcatgtggccgacgatgaaaagcgccgggttaggggccttggcgcgcaccgccgtattcagggcctcctcgctcttgcgcgagagcaggtgcttccccaggtactcctgcactgacaaggctgccacagcggtggaatttgtcctcacgacttcgccacgtcgtcctcacctccctggcttcccacgactccgccgtatcgaggtgctcggtgggtcgtcttaatccgaagtccgaactaggaagacgagacagagaggtctgaggaatgggcctcgtttgatgttgagctgaattatttttccagcataagcccaggtcttggtccatgaacaaaattactagaaacccagcccagtactacgatctaaaagagggactgccactggatagctctctctagcattctccacgctccaatacagcggcgtcgtgtctatccgggtctatccgcgaacacgtgagaactctccagaaactgctttctcctccacttcatctctctcgctttccctctataaaaagaccccttctaggaattgagggagacagcaagcaccaagcagcgatccgaagctcaatcaattcactcaaacctcttccccaaatcttcgattagatcttcgttgacaagaagactagaaccgaacctgacatgtccaacctgctcacggttcaccagaaccttccggctcttccagtggacgcgacgtccgatgaagtcaggaagaacctcatggacatgttccgcgacaggcaagcgttcagcgagcacacctggaagatgctgctctccgtctgccgctcctgggctgcatggtgcaagctgaacaacaggaagtggttccccgctgagcccgaggacgtgagggattaccttctgtacctgcaagcgcgaggtttgtttctgcttctacctttgatatatatataataattatcattaattagtagtaatataatatttcaaatatttttttcaaaataaaagaatgtagtatatagcaattgcttttctgtagtttataagtgtgtatattttaatttataacttttctaatatatgaccaaaacatggtgatgcctaggtctggcagtgaagaccatccagcaacaccttggacaactgaacatgcttcacaggcgctccggcctcccgcgccccagcgactcgaacgccgtgagcctcgtcatgcgccgcatcaggaaggaaaacgtcgatgccggcgaaagggcaaagcaggccctcgcgttcgagaggaccgatttcgaccaggtccgcagcctgatggagaacagcgacaggtgccaggacattaggaacctggcgttcctcggaattgcatacaacacgctcctcaggatcgcggaaattgcccgcattcgcgtgaaggacattagccgcaccgacggcggcaggatgcttatccacattggcaggaccaagacgctcgtttccaccgcaggcgtcgaaaaggccctcagcctcggagtgaccaagctcgtcgaacgctggatctccgtgtccggcgtcgcggacgacccaaacaactacctcttctgccgcgtccgcaagaacggggtggctgcccctagcgccaccagccaactcagcacgagggccttggaaggtattttcgaggccacccaccgcctgatctacggcgcgaaggatgacagcggtcaacgctacctcgcatggtccgggcactccgcccgcgttggagctgctagggacatggcccgcgccggtgtttccatccccgaaatcatgcaggcgggtggatggacgaacgtgaacattgtcatgaactacattcgcaaccttgacagcgagacgggcgcaatggttcgcctcctggaagatggtgactgaggtacccaacctagacttgtccatcttctggattggccaacttaattaatgtatgaaataaaaggatgcacacatagtgacatgctaatcactataatgtgggcatcaaagttgtgtgttatgtgtaattactagttatctgaataaaagagaaagagatcatccatatttcttatcctaaatgaatgtcacgtgtctttataattctttgatgaaccagatgcatttcattaaccaaatccatatacatataaatattaatcatatataattaatatcaattgggttagcaaaacaaatctagtctaggtgtgttttgcgatccggtctaaaaacggcccctaactaacgcttagttgcccgctagattagtcccccgttagtgcctagttagacacacgacgaactaggggctaatatcgatcaccttgctagttggatattacctcttctcttcaaagtatccttgaacgctcaccggttatcaaatctctacactatagctctgtagtcttgctagatagttagttctttagctctcggttaccaagcggccgcacactgatagtttaaactgaaggcgggaaacgacaatctgatcatgagcggagaattaagggagtcacgttatgacccccgccgatgacgcgggacaagccgttttacgtttggaactgacagaaccgcaacgattgaaggagccactcagccgcgggtttctggagtttaatgagctaagcacatacgtcagaaaccattattgcgcgttcaaaagtcgcctaaggtcactatcagctagcaaatatttcttgtcaaaaatgctccactgacgttccataaattcccctcggtatccaattagagtctcatattcactcccatggcggccaatgcgggcggcggtggagcgggaggaggcagcggcagcggcagcgtggctgcgccggcggtgtgccgccccagcggctcgcggtggacgccgacgccggagcagatcaggatgctgaaggagctctactacggctgcggcatccggtcgcccagctcggagcagatccagcgcatcaccgccatgctgcggcagcacggcaagatcgagggcaagaacgtcttctactggttccagaaccacaaggcccgcgagcgccagaagcgccgcctcaccagcctcgacgtcaacgtgcccgccgccggcgcggccgacgccaccaccagccaactcggcgtcctctcgctgtcgtcgccgccgccttcaggcgcggcgcctccctcgcccaccctcggcttctacgccgccggcaatggcggcggatcggctgtgctgctggacacgagttccgactggggcagcagcggcgctgctatggccaccgagacatgcttcctgcaggactacatgggcgtgacggacacgggcagctcgtcgcagtggccacgcttctcgtcgtcggacacgataatggcggcggccgcggcgcgggcggcgacgacgcgggcgcccgagacgctccctctcttcccgacctgcggcgacgacggcggcagcggtagcagcagctacttgccgttctggggtgccgcgtccacaactgccggcgccacttcttccgttgcgatccaacagcaacaccagctgcaggagcagtacagcttttacagcaacagcaacagcacccagctggccggcaccggcaaccaagacgtatcggcaacagcagcagcagccgccgccctggagctgagcctcagctcatggtgctccccttaccctgctgcagggagtatgtgagagcaacgcgagctgccactgctcttcactgatgtctctggaatggaaggaggaggaagtgagaacagatcattcgacaaagcagcattagtccgttgatcggtggaagaccactcgtcagtgttgagttgaatgtttgatcaataaaatacggcaatgctgtaagggttgttttttatgccattgataatacactgtactgttcagttgttgaactctatttcttagccatgccaagtgcttttcttattttgaataacattacagcaaaaagttgaaagacaaaaaaaaaaacccccgaacagagtgctttgggtcccaagcttctttagactgtgttcggcgttccccctaaatttctccccctatatctcactcacttgtcacatcagcgttctctttccccctatatctccacgctctacagcagttccacctatatcaaacctctataccccaccacaacaatattatatactttcatcttcaactaactcatgtaccttccaatttttttctactaataattatttacgtgcacagaaacttagcaaggagagagagagcgggaatttaaatgctcggcgttaggcttttagtccgctaggtggctagaccgaggttaggacgctagttcactaggggcctagtggtgttttaagacgtcacggtcaccaccttgctagttggatattacctcttctcttcaaagtatccttgaacgctcaccggttatcaaatctctacactatagctctgtagtcttgctagatagttagttctttagctctccgcgaccgaagcttgcatgggccgcatcgagcagctggcttgtggggaccagacaaaaaaggaatggtgcagaattgttaggcgcacctaccaaaagcatctttgcctttattgcaaagataaagcagattcctctagtacaagtggggaacaaaataacgtggaaaagagctgtcctgacagcccactcactaatgcgtatgacgaacgcagtgacgaccacaaaactcgagcaacgagatcatgagccaatcaaagaggagtgatgtagacctaaagcaataatggagccatgacgtaagggcttacgcccatacgaaataattaaaggctgatgtgacctgtcggtctctcagaacctttactttttatgtttggcgtgtatttttaaatttccacggcaatgacgatgtgaccgtcgacccactaaaacattgctttgtcaaaagctaaaaaagatgatgcccgacagccacttgtgtgaagcatgagaagccggtccctccactaagaaaattagtgaagcatcttccagtggtccctccactcacagctcaatcagtgagcaacaggacgaaggaaatgacgtaagccatgacgtctaatcccagggccagcttgcatgcctgcagtgcagcgtgacccggtcgtgcccctctctagagataatgagcattgcatgtctaagttataaaaaattaccacatattttttttgtcacacttgtttgaagtgcagtttatctatctttatacatatatttaaactttactctacgaataatataatctatagtactacaataatatcagtgttttagagaatcatataaatgaacagttagacatggtctaaaggacaattgagtattttgacaacaggactctacagttttatctttttagtgtgcatgtgttctcctttttttttgcaaatagcttcacctatataatacttcatccattttattagtacatccatttagggtttagggttaatggtttttatagactaatttttttagtacatctattttattctattttagcctctaaattaagaaaactaaaactctattttagtttttttatttaataatttagatataaaatagaataaaataaagtgactaaaaattaaacaaataccctttaagaaattaaaaaaactaaggaaacatttttcttgtttcgagtagataatgccagcctgttaaacgccgtcgacgagtctaacggacaccaaccagcgaaccagcagcgtcgcgtcgggccaagcgaagcagacggcacggcatctctgtcgctgcctctggacccctctcgagagttccgctccaccgttggacttgctccgctgtcggcatccagaaattgcgtggcggagcggcagacgtgagccggcacggcaggcggcctcctcctcctctcacggcaccggcagctacgggggattcctttcccaccgctccttcgctttcccttcctcgcccgccgtaataaatagacaccccctccacaccctctttccccaacctcgtgttgttcggagcgcacacacacacaaccagatctcccccaaatccacccgtcggcacctccgcttcaaggtacgccgctcgtcctcccccccccccctctctaccttctctagatcggcgttccggtccatgcatggttagggcccggtagttctacttctgttcatgtttgtgttagatccgtgtttgtgttagatccgtgctgctagcgttcgtacacggatgcgacctgtacgtcagacacgttctgattgctaacttgccagtgtttctctttggggaatcctgggatggctctagccgttccgcagacgggatcgatttcatgattttttttgtttcgttgcatagggtttggtttgcccttttcctttatttcaatatatgccgtgcacttgtttgtcgggtcatcttttcatgcttttttttgtcttggttgtgatgatgtggtctggttgggcggtcgttctagatcggagtagaattctgtttcaaactacctggtggatttattaattttggatctgtatgtgtgtgccatacatattcatagttacgaattgaagatgatggatggaaatatcgatctaggataggtatacatgttgatgcgggttttactgatgcatatacagagatgctttttgttcgcttggttgtgatgatgtggtgtggttgggcggtcgttcattcgttctagatcggagtagaatactgtttcaaactacctggtgtatttattaattttggaactgtatgtgtgtgtcatacatcttcatagttacgagtttaagatggatggaaatatcgatctaggataggtatacatgttgatgtgggttttactgatgcatatacatgatggcatatgcagcatctattcatatgctctaaccttgagtacctatctattataataaacaagtatgttttataattattttgatcttgatatacttggatgatggcatatgcagcagctatatgtggatttttttagccctgccttcatacgctatttatttgcttggtactgtttcttttgtcgatgctcaccctgttgtttggtgttacttctgcaggtcgactttaacttagcctaggatccatggccactgtgaacaactggctcgctttctccctctccccgcaggagctgccgccctcccagacgacggactccacactcatctcggccgccaccgccgaccatgtctccggcgatgtctgcttcaacatcccccaagattggagcatgaggggatcagagctttcggcgctcgtcgcggagccgaagctggaggacttcctcggcggcatctccttctccgagcagcatcacaaggccaactgcaacatgatacccagcactagcagcacagtttgctacgcgagctcaggtgctagcaccggctaccatcaccagctgtaccaccagcccaccagctcagcgctccacttcgcggactccgtaatggtggcttcctcggccggtgtccacgacggcggtgccatgctcagcgcggccgccgctaacggtgtcgctggcgctgccagtgccaacggcggcggcatcgggctgtccatgattaagaactggctgcggagccaaccggcgcccatgcagccgagggtggcggcggctgagggcgcgcaggggctctctttgtccatgaacatggcggggacgacccaaggcgctgctggcatgccacttctcgctggagagcgcgcacgggcgcccgagagtgtatcgacgtcagcacagggtggagccgtcgtcgtcacggcgccgaaggaggatagcggtggcagcggtgttgccggcgctctagtagccgtgagcacggacacgggtggcagcggcggcgcgtcggctgacaacacggcaaggaagacggtggacacgttcgggcagcgcacgtcgatttaccgtggcgtgacaaggcatagatggactgggagatatgaggcacatctttgggataacagttgcagaagggaagggcaaactcgtaagggtcgtcaagtctatttaggtggctatgataaagaggagaaagctgctagggcttatgatcttgctgctctgaagtactggggtgccacaacaacaacaaattttccagtgagtaactacgaaaaggagctcgaggacatgaagcacatgacaaggcaggagtttgtagcgtctctgagaaggaagagcagtggtttctccagaggtgcatccatttacaggggagtgactaggcatcaccaacatggaagatggcaagcacggattggacgagttgcagggaacaaggatctttacttgggcaccttcagcacccaggaggaggcagcggaggcgtacgacatcgcggcgatcaagttccgcggcctcaacgccgtcaccaacttcgacatgagccgctacgacgtgaagagcatcctggacagcagcgccctccccatcggcagcgccgccaagcgcctcaaggaggccgaggccgcagcgtccgcgcagcaccaccacgccggcgtggtgagctacgacgtcggccgcatcgcctcgcagctcggcgacggcggagccctggcggcggcgtacggcgcgcactaccacggcgccgcctggccgaccatcgcgttccagccgggcgccgccagcacaggcctgtaccacccgtacgcgcagcagccaatgcgcggcggcgggtggtgcaagcaggagcaggaccacgcggtgatcgcggccgcgcacagcctgcaggacctccaccacctgaacctgggcgcggccggcgcgcacgactttttctcggcagggcagcaggccgccgccgctgcgatgcacggcctgggtagcatcgacagtgcgtcgctcgagcacagcaccggctccaactccgtcgtctacaacggcggggtcggcgacagcaacggcgccagcgccgtcggcggcagtggcggtggctacatgatgccgatgagcgctgccggagcaaccactacatcggcaatggtgagccacgagcaggtgcatgcacgggcctacgacgaagccaagcaggctgctcagatggggtacgagagctacctggtgaacgcggagaacaatggtggcggaaggatgtctgcatgggggactgtcgtgtctgcagccgcggcggcagcagcaagcagcaacgacaacatggccgccgacgtcgggcatggcggcgcgcagctcttcagtgtctggaacgacacttaagcgtacctagtggtacctgacatcttatagtctgcaacctctcgtgtctgaattcctatctttatcaagtgttattgcttccacgactataggacagctttcgtcgaaagcttttgctcatgtgatctcgaaggattcatctagtctgatttttcgtgacttgtatcggttttattggattcatccaacatatatcaataaaaaatgagttgtgtttcctttcttcctagttcagttaaaattatttccctcctgcgcttgtgctgtaattgtctgtgtacctgttgtttgtgactgtgttagttcccttggatatgatttcgtatttgatatgtacatggagatagcttagcttcattattggagtatgaagttagtatgacatagtcactctcctggaaaattgacactgcaaaccatatttttattctgaaccacaaatcctagtcagtccgctggcatatgccgtccgtttgctgaatccagaacgtgggtttggagatgtacggctgagatgcctctatgcgaaggggatttcgtggtgaaacgagatgggagtagagcaacgcccgtggaagatgcttcaaacttccacacttttgagcaacgatcggcagtagtaaggtagacgatttcaagatcaaagcatatgaagataaacaacatcaacaacaaaatttgttggggttctatagagagaaacagagctacatacatacactgttttgtatctaccatctgagatgatgaaaagatgaaaaactaaagaatgccccggcgccaacgccaggacacgccgcgcgcgcgtcacccgagccatctcttgacccagccggcgctgtatatttacacacgttgcagcatcgatcaccacctgttcgatcgcgtcgccgtcaccggcgcgccgcgacttattgaactagtctagggcgcggctaacaacctagcttagattgccttgtctaaacccttaggctaacgcgccactctagaaggccgatctcccccgaacgcgccagatccgatatcgatgggccctggccgaagcttggtcacccgctagacgtgcgcacgataacttcgtatagcatacattatacgaagttataacagcggaccgggttaccgaattcctgcccttaaggccaattgttcaagattcattcaacaattgaaacatctcccatgattaaatcagtataaggttgctatggtcttgcttgacaaagtttttttttgagggaatttcaactaaatttttgagtgaaactatcaaatactgattttaaaaaatttttataaaaggaagcgcagagataaaaggccatctatgctacaaaagtacccaaaaatgtaatcctaaagtatgaattgcattttttttttgtttggacgaaaggaaaggagtattaccacaagaatgatatcatcttcatatttagatcttttttgggtaaagcttgagattctctaaatatagagaaatcagaagaaaaaaaaaccgtgttttggtggttttgatttctagcctccacaataactttgacggcgtcgacaagtctaacggacaccaagcagcgaaccaccagcgccgagccaagcgaagcagacggccgagacgttgacaccttcggcgcggcatctctcgagagttccgctccggcgctccacctccaccgctggcggtttcttattccgttccgttccgcctcctgctctgctcctctccacaccacacggcacgaaaccgttacggcaccggcagcacccagcacgggagaggggattcctttcccaccgttccttccctttccgccccgccgctataaatagccagccccatccccagcttttttccccaatctcatctcctctctcctgttgttcggagcacacgcacaatccgatcgatccccaaatccccttcgtctctcctcgcgagcctcgtggatcccagcttcaaggtacggcgatcgatcatcccccctccttctctctaccttcttttctctagactacatcggatggcgatccatggttagggcctgctagtttcccttcctgttttgtcgatggctgcgaggcacaatagatctgatggcgttatgacggctaacttgtcatgttgttgcgatttatagtccctttaggagatcagtttaatttctcggatggttcgagatcggtggtccatggttagtaccctaagatccgcgctgttagggttcgtagatggaggcgacctgttctgattgttaacttgtcagtacctgggaaatcctgggatggttctagctcgtccgcagatgagatcgatttcatgatcctctgtatcttgtttcgttgcctaggttccgtctaatctatccgtggtatgatgtagatgttttgatcgtgctaactacgtcttgtaaagttaattgtcaggtcataatttttagcatgcctttttttttgtttggttttgtctaattgggctgtcgttctagatcagagtagaagactgttccaaactacctgctggatttattgaacttggatctgtatgtgtgtcacatatcttcataaattcatgattaagatggattgaaatatcttttatctttttggtatggatagttctatatgttggtgtggctttgttagatgtatacatgcttagatacatgaagcaacgtgctgctactgtttagtaattgctgttcatttgtctaataaacagataaggatatgtatttatgttgctgttggttttgctggtactttgttggatacaaatgcttcaatacagaaaacagcatgctgctacgatttaccatttatctaatcttatcatatgtctaatctaataaacaaacatgcttttaaattatcttcatatgcttggatgatggcatacacagcggctatgtgtggttttttaaatacccagcatcatgggcatgcatgacactgctttaatatgctttttatttgcttgagactgtttcttttgtttatactgaccctttagttcggtgactcttctgcaggtcgactttaacttagcctaggatccatggcccagtccaagcacggcctgaccaaggagatgaccatgaagtaccgcatggagggctgcgtggacggccacaagttcgtgatcaccggcgagggcatcggctaccccttcaagggcaagcaggccatcaacctgtgcgtggtggagggcggccccttgcccttcgccgaggacatcttgtccgccgccttcatgtacggcaaccgcgtgttcaccgagtacccccaggacatcgtcgactacttcaagaactcctgccccgccggctacacctgggaccgctccttcctgttcgaggacggcgccgtgtgcatctgcaacgccgacatcaccgtgagcgtggaggagaactgcatgtaccacgagtccaagttctacggcgtgaacttccccgccgacggccccgtgatgaagaagatgaccgacaactgggagccctcctgcgagaagatcatccccgtgcccaagcagggcatcttgaagggcgacgtgagcatgtacctgctgctgaaggacggtggccgcttgcgctgccagttcgacaccgtgtacaaggccaagtccgtgccccgcaagatgcccgactggcacttcatccagcacaagctgacccgcgaggaccgcagcgacgccaagaaccagaagtggcacctgaccgagcacgccatcgcctccggctccgccttgccctccggactcagatctcgatagggtaccaatggccagttaacagatccagctgctgctgttctagggttcacaagtctgcctatttgtcttccccaatggagctatggttgtctggtctggtccttggtcgtgtcccgtttcattgtgtactatttacctgtaatgtgtatccttaagtctggtttgatggtgtctgaaacgttttgctgtggtagagcagcatggaagaactataatgaataagtgatccctaatcattgtgtccaaattttgcttctgctatacccttttgtgctgtttcttatgttttgcttaaaaatttgatctgacaaacaaatttgtctaaattatgctcttgttctgactgtgtactgtacacatttgtattgctaccggtttggcacatagttttctctttgattgcagatcaaacccttctgattgcagattgcttggctatggctgatgtgctcactgttcttctttagcttgtatattgctgatggtggcttggctacggctgaaaaagttgctgctgcgccgacttggcaactgttgctccagtaatgctttgtcctctcttcctagccgccgacttggcacttggcagctgttgctcctgtaatgcgttgttatctcttatctcttgagatgtactatgattttgaggctgtttgacttgtgccagattgccagtgctgatgctatattatctcaggtttttatgctagtatatgttttactgtgtgctgcctgtgtcgagttacgtaatctattgaaccgctatgcgtgttgatgccctgttgttgcttgccagattgatgcccctgttgcttgcagcttgcaagctgtagtgaaatcctaaaattcgaaaccaaatctattctgaacttttgaagatctgtgatgtccggaagaaaagattcaaacagataaacgggactctccagaatctataaaataaatgatcgacaaacgctttgctttggtaggcttcctagttagttagcggaccgaagcttcggtccgggcctagaaggccagcttcggccgcccctcggtaccctgggatcttccgacggcgtcttcaccgccccgccgccgcccgagccggacttgtcgctgccgccgccgctgctcatcttgcgcgcttgtgtccctccctcagtccctgcgttcgcggatcgcgggcgggtgcgacccgtttggactccggccggtagccttcgtgccgacctcgctcggtccaccggtttgtcggggacccacatgtcagtgaaggtacgcgtccacgtccacagaccctactaccccagacgagtccaaatcgctgttccctcacactctcgtgtaccagcgcgcggcggaaagcacctttccaacaaccgccgacacgtcggtcccacgtcggcatgctccaccggtcagtgtttggcgtgtacggctcccggcgacgaacgagtgtggcctaagctttcctactcccatcccatctgagccacacatctctctcacgccacgcgcacaaaacagccaggctcccacgcgcatcaaccggctctccctttccgtgccactcgcccccaagccccaaaccctcgccgccgcctccgagacagccgccgccacctaggccatggccaccgccgccgccgcgtctaccgcgctcactggcgccactaccgctgcgcccaaggcgaggcgccgggcgcacctcctggccacccgccgcgccctcgccgcgcccatcaggtgctcagcggcgtcacccgccatgccgatggctcccccggccaccccgctccggccgtggggccccaccgagccccgcaagggtgctgacatcctcgtcgagtccctcgagcgctgcggcgtccgcgacgtcttcgcctaccccggcggcgcgtcgatggagatccaccaggcactcacccgctcccccgtcatcgccaaccacctcttccgccacgagcaaggggaggcctttgccgcctccggctacgcgcgctcctcgggccgcgtcggcgtctgcatcgccacctccggccccggcgccaccaacctagtctccgcgctcgccgacgcgctgctcgattccgtcccgatggtcgccatcacgggacaggtggcgcgacgcatgattggcaccgacgccttccaggagacgcccatcgtcgaggtcacgcgctccatcaccaagcacaactacctggtcctcgacgtcgacgacatcccccgcgtcgtgcaggaggctttcttcctcgcctcctctggtcgaccagggccggtgcttgtcgacatccccaaggacatccagcagcagatggcggtgcctgtctgggacaagcccatgagtctgcctgggtacattgcgcgccttcccaagccccctgcgactgagttgcttgagcaggtgctgcgtcttgttggtgaatcgcggcgccctgttctttatgtgggcggtggctgcgcagcatctggtgaggagttgcgacgctttgtggagctgactggaatcccggtcacaactactcttatgggcctcggcaacttccccagcgacgacccactgtctctgcgcatgctaggtatgcatgggacggtgtatgcaaattatgcagtggataaggccgatctgttgcttgcacttggtgtgcggtttgatgatcgcgtgacagggaagattgaggcttttgcaagcagggctaagattgtgcacgttgatattgatccggctgagattggcaagaacaagcagccacatgtgtccatctgtgcagatgttaagcttgctttgcagggcatgaatgctcttcttgaaggaagcacatcaaagaagagctttgactttggctcatggaacgatgagttggatcagcagaagagggaattcccccttgggtataaaacatctaatgaggagatccagccacaatatgctattcaggttcttgatgagctgacgaaaggcgaggccatcatcggcacaggtgttgggcagcaccagatgtgggcggcacagtactacacttacaagcggccaaggcagtggttgtcttcagctggtcttggggctatgggatttggtttgccggctgctgctggtgcttctgtggcaaacccaggtgtcactgttgttgacatcgatggagatggtagctttctcatgaacgttcaggagctagctatgatccgaattgagaacctcccagtgaaggtctttgtgctaaacaaccagcacctggggatggtggtgcagttggaggacaggttctataaggccaacagagcgcacacatacttgggaaacccagagaatgaaagtgagatatatccagatttcgtgacgatcgccaaagggttcaacattccagccgtccgtgtgacaaagaagaacgaagtccgcgcagcgataaagaagatgctcgagactccagggccgtacctcttggatataatcgtcccacaccaggagcatgtgttgcctatgatccctagtggtggggctttcaaggatatgatcctggatggtgatggcaggactgtgtactgacttcgaataggtacccggggatcctctagtgccgtgggtcgtttaagctgccgctgtacctgtgtcgtctggtgccttctggtgtacctgggaggttgtcgtctatcaagtatctgtggttggtgtcatgagtcagtgagtcccaatactgttcgtgtcctgtgtgcattatacccaaaactgttatgggcaaatcatgaataagcttgatgttcgaacttaaaagtctctgctcaatatggtattatggttgtttttgttcgtctcctaatatttgcctgggatcaaattttattggctggtgttcatttgacctccatgttcttgctaggctccattttttactctacagccataatatgtttgattgtttggtttgttctttgttgtacacctggttctgtcgagcttagttttcgacactggcttacagcttaacatgttgctattttattgggttctgattgctattttattgggttctgattgctagtttttgctgaatccaaaaaccatgttatttatttaagcgatccaggttattattatgatggtggctaagtttttttttttccaagggtaaattttctggattctccagtgtttctgtggccgaattcaatcactagagtcgacctgcaaagcttcggtccgggcctagaaggcccgcgccacttacgcttgattccgatgacttcgtaggttcctagctcaagccgctcgtgtccaagcgtcacttacgattagctaatgattacggcatctaggaccgactagttcttatgtgcttctagtctccaaatgtggttgatagttattttgctctaagatcaacagtaatgaagtataaatcatcgttgtggtgtgctactcggttaattgagcattaacacacacaaacatgacgaggatggtataatctccaaaaatgtgtactttgttaggtgggaccctatagccttgattaatgtgctatgttaggcatgcctggaaacgtgtgacgcatatgttttgtgaacctgttgatattatatgtgcttttatattaccatattttattaaaatactaatatttattactagtaagatataacattctatctagcttaaaaactaaccataaatattccataataactagatttaccaaactaatatactaaatatacataataaatacaaaattaacaagacaataatcaatatttatgagcttaatatatttagacattatggttggtcgacgataatcatgctaacttttcgtaattgcttgattgaaatatgcttagaataatgcctctttgttctacatggcaaatagggaccattatggtgtaacaccctgggaaccacaaacaccccgaaatgctactaaactacacaactaaccttcatatataaaatttcgacagcatctcctttgaaaatttgcatagacgtggaagcaacagagtataaacagatctgcgtttaaacgtgcaagcgctactagacaattcagtacattaaaaacgtccgcaatgtgttattaagttgtctaagcgtcaatttgtttacaccacaatatatcctgcca

SEQ ID NO: 83 - DNA, 20692 bp, Artificial sequence
  PHP97725
gtttacccgccaatatatcctgtcaaacactgcggccgcacttgaccgcggatggagccggagctgtggtgaggccatcgacgggaggtgggggagaacacagtctcagtgttctttgtgagtccgcaaggtttttagcttttctgtattaattaaggttgctgttggctgtagaatacggtcgtggaagagctgtatcggtagctactacgtaagctattatatactggaagtctggagctcgtcgatctccggtcgtcttcctccatttctcctcgtcttgctttgactgctgctaccatttgcttctgttttctgatgaagcatgccatgtcggccaccagtgtttgtgtggtttttgcagggaatggctttcaagtgctgtgattgaatggccctcgtcgtcctcggctgagctcacatggacgcgtcatgtgagtgagatatatgatcatatgatgagtggggttcgggtgagtgcgtacttgaagtaggatcccgctttcactcattcattcattggcctttaaaccgggaaattttcgcgaggagatggagggaagcaagcagggtgacgagtgcagagtgccgcgagcgctttgtcaaaaggcaccgccgtaggcaaaaaaatcaatggccctgactgactcgatggtagtactactgtagagactagagagggttgctccccatatcttcgtgtgacttttactccagcattgcatttccgtcattgagacgttaattaatagcagctttcgggacagatgactgtggccatgtttcgtcacggccgcttcgtgccagctgggggtactatagtactgtgattttgttagtaaaaactttcattaggccaccattgacgaccgggccttcgcttttgctgcgctaattaaccatttcccggcgaccgaagggaacatgaacatgccccgacacatgagggcatgaggactagtgttctccctgtcgttcgttgacttgactagtgatagtttaaacgctcttcaactggaagagcggttactaccggttcactagctagctgctaatcgagctagttaccctatgaggtgacatgaagcgctcacggttactatgacggttagcttcacgactgttggtggcagtagcgtacgacttagctatagttccggacttacctagctaataacttcgtatagcatacattatacgaagttatggttaccgagctccaccttgctagttggatattacctcttctcttcaaagtatccttgaacgctcaccggttatcaaatctctacactatagctctgtagtcttgctagatagttagttctttagctctctctagaggttcacaaactcaatacaacacacagtggagtagggtattacgctccggcggcccgaaccactctaaatccttgtgtcctcgtgtgctcttccaccattaatgactgtaattgcagggacacgaagagttgtagcgcttttgccaacaagatccgctatatgctagtagagtggaacctgcacagcaacaagcatccaataatctgagaataagaattatgtgtggtgatggttctcatctctgcaactcgccattttcgcgagagaaccaaatccaagttggtgaagatcatgatttgggctcatgggctggcatagtagctattacctttgcaattgtggttcgaatctatccgatattctccttttcagggagagctaatgcttatgcttattgggtattttggtttgacactgcttcacgcccaaaaaaaggcaactatgtctgagttggatatggcccaaaaaaaggcagctatgtctgagttggatatggaagtcttctttcgtttagggtgaagtaagaccaagctcatgagcttattatcttaggtcggaacaaattagttgataggcatggcacatttatcaaattataatgattttaacagaaaagcaacacctctttttcagcagcaccagctttgcaagctgcaattgacactccaagcatagtatttgctccaaactcagcctgcatttcgcacaatatcatatctatttccatttggataaaatatattttccagaaatatgggaacagaatcaagatacagaaaaaagttgtggtagtagtggtaagtggaaacacaagtacagtgaaaagatagcattatttctgaacagtcaaattaaccgaaataagtagtatcacatactgcccctaaattgactacacccaatgtaaagaattgcttgagcatattgagccatcagttgtttgtttgtgtaacggatttgacaatgcagagttcaggagcaaaaaaccgcaaaggagagaaagagggaaaggatctcctagtatcccaccttgtggcgcgccctgtcaagtgcatgatggcctggtcgatctgcgtctgctgctgcggttccatcccaacgagtgcctccgacaccttgtcgttgatcacccgcaccgcgtaggcgacccccctggcgaggaacttccgcctctcggaggccccggccgcgtcggcggcggcgccctcgagcgcgcccacgctagccgtagatgctcggtgcacggccttgttggtgtgcaactcgacctcaacggccggtgcgctacgcccgtcaaggatctggcgcgcccgcaccctcgtgatcacggtgggcgcctcccgcctcatgtggccgacgatgaaaagcgccgggttaggggccttggcgcgcaccgccgtattcagggcctcctcgctcttgcgcgagagcaggtgcttccccaggtactcctgcactgacaaggctgccacagcggtggaatttgtcctcacgacttcgccacgtcgtcctcacctccctggcttcccacgactccgccgtatcgaggtgctcggtgggtcgtcttaatccgaagtccgaactaggaagacgagacagagaggtctgaggaatgggcctcgtttgatgttgagctgaattatttttccagcataagcccaggtcttggtccatgaacaaaattactagaaacccagcccagtactacgatctaaaagagggactgccactggatagctctctctagcattctccacgctccaatacagcggcgtcgtgtctatccgggtctatccgcgaacacgtgagaactctccagaaactgctttctcctccacttcatctctctcgctttccctctataaaaagaccccttctaggaattgagggagacagcaagcaccaagcagcgatccgaagctcaatcaattcactcaaacctcttccccaaatcttcgattagatcttcgttgacaagaagactagaaccgaacctgacatgtccaacctgctcacggttcaccagaaccttccggctcttccagtggacgcgacgtccgatgaagtcaggaagaacctcatggacatgttccgcgacaggcaagcgttcagcgagcacacctggaagatgctgctctccgtctgccgctcctgggctgcatggtgcaagctgaacaacaggaagtggttccccgctgagcccgaggacgtgagggattaccttctgtacctgcaagcgcgaggtttgtttctgcttctacctttgatatatatataataattatcattaattagtagtaatataatatttcaaatatttttttcaaaataaaagaatgtagtatatagcaattgcttttctgtagtttataagtgtgtatattttaatttataacttttctaatatatgaccaaaacatggtgatgcctaggtctggcagtgaagaccatccagcaacaccttggacaactgaacatgcttcacaggcgctccggcctcccgcgccccagcgactcgaacgccgtgagcctcgtcatgcgccgcatcaggaaggaaaacgtcgatgccggcgaaagggcaaagcaggccctcgcgttcgagaggaccgatttcgaccaggtccgcagcctgatggagaacagcgacaggtgccaggacattaggaacctggcgttcctcggaattgcatacaacacgctcctcaggatcgcggaaattgcccgcattcgcgtgaaggacattagccgcaccgacggcggcaggatgcttatccacattggcaggaccaagacgctcgtttccaccgcaggcgtcgaaaaggccctcagcctcggagtgaccaagctcgtcgaacgctggatctccgtgtccggcgtcgcggacgacccaaacaactacctcttctgccgcgtccgcaagaacggggtggctgcccctagcgccaccagccaactcagcacgagggccttggaaggtattttcgaggccacccaccgcctgatctacggcgcgaaggatgacagcggtcaacgctacctcgcatggtccgggcactccgcccgcgttggagctgctagggacatggcccgcgccggtgtttccatccccgaaatcatgcaggcgggtggatggacgaacgtgaacattgtcatgaactacattcgcaaccttgacagcgagacgggcgcaatggttcgcctcctggaagatggtgactgaggtacccaacctagacttgtccatcttctggattggccaacttaattaatgtatgaaataaaaggatgcacacatagtgacatgctaatcactataatgtgggcatcaaagttgtgtgttatgtgtaattactagttatctgaataaaagagaaagagatcatccatatttcttatcctaaatgaatgtcacgtgtctttataattctttgatgaaccagatgcatttcattaaccaaatccatatacatataaatattaatcatatataattaatatcaattgggttagcaaaacaaatctagtctaggtgtgttttgcgatccggtctaaaaacggcccctaactaacgcttagttgcccgctagattagtcccccgttagtgcctagttagacacacgacgaactaggggctaatatcgatggttaccaagcggccgcacactgatagtttaaactgaaggcgggaaacgacaatctgatcatgagcggagaattaagggagtcacgttatgacccccgccgatgacgcgggacaagccgttttacgtttggaactgacagaaccgcaacgattgaaggagccactcagccgcgggtttctggagtttaatgagctaagcacatacgtcagaaaccattattgcgcgttcaaaagtcgcctaaggtcactatcagctagcaaatatttcttgtcaaaaatgctccactgacgttccataaattcccctcggtatccaattagagtctcatattcactcccatggcggccaatgcgggcggcggtggagcgggaggaggcagcggcagcggcagcgtggctgcgccggcggtgtgccgccccagcggctcgcggtggacgccgacgccggagcagatcaggatgctgaaggagctctactacggctgcggcatccggtcgcccagctcggagcagatccagcgcatcaccgccatgctgcggcagcacggcaagatcgagggcaagaacgtcttctactggttccagaaccacaaggcccgcgagcgccagaagcgccgcctcaccagcctcgacgtcaacgtgcccgccgccggcgcggccgacgccaccaccagccaactcggcgtcctctcgctgtcgtcgccgccgccttcaggcgcggcgcctccctcgcccaccctcggcttctacgccgccggcaatggcggcggatcggctgtgctgctggacacgagttccgactggggcagcagcggcgctgctatggccaccgagacatgcttcctgcaggactacatgggcgtgacggacacgggcagctcgtcgcagtggccacgcttctcgtcgtcggacacgataatggcggcggccgcggcgcgggcggcgacgacgcgggcgcccgagacgctccctctcttcccgacctgcggcgacgacggcggcagcggtagcagcagctacttgccgttctggggtgccgcgtccacaactgccggcgccacttcttccgttgcgatccaacagcaacaccagctgcaggagcagtacagcttttacagcaacagcaacagcacccagctggccggcaccggcaaccaagacgtatcggcaacagcagcagcagccgccgccctggagctgagcctcagctcatggtgctccccttaccctgctgcagggagtatgtgagagcaacgcgagctgccactgctcttcactgatgtctctggaatggaaggaggaggaagtgagaacagatcattcgacaaagcagcattagtccgttgatcggtggaagaccactcgtcagtgttgagttgaatgtttgatcaataaaatacggcaatgctgtaagggttgttttttatgccattgataatacactgtactgttcagttgttgaactctatttcttagccatgccaagtgcttttcttattttgaataacattacagcaaaaagttgaaagacaaaaaaaaaaacccccgaacagagtgctttgggtcccaagcttctttagactgtgttcggcgttccccctaaatttctccccctatatctcactcacttgtcacatcagcgttctctttccccctatatctccacgctctacagcagttccacctatatcaaacctctataccccaccacaacaatattatatactttcatcttcaactaactcatgtaccttccaatttttttctactaataattatttacgtgcacagaaacttagcaaggagagagagagcgggaatttaaatgctcggcgttaggcttttagtccgctaggtggctagaccgaggttaggacgctagttcactaggggcctagtggtgttttaagacgtcacggtcaccaccttgctagttggatattacctcttctcttcaaagtatccttgaacgctcaccggttatcaaatctctacactatagctctgtagtcttgctagatagttagttctttagctctccgcgaccgaagcttgcatgggccgcatcgagcagctggcttgtggggaccagacaaaaaaggaatggtgcagaattgttaggcgcacctaccaaaagcatctttgcctttattgcaaagataaagcagattcctctagtacaagtggggaacaaaataacgtggaaaagagctgtcctgacagcccactcactaatgcgtatgacgaacgcagtgacgaccacaaaactcgagcaacgagatcatgagccaatcaaagaggagtgatgtagacctaaagcaataatggagccatgacgtaagggcttacgcccatacgaaataattaaaggctgatgtgacctgtcggtctctcagaacctttactttttatgtttggcgtgtatttttaaatttccacggcaatgacgatgtgaccgtcgacccactaaaacattgctttgtcaaaagctaaaaaagatgatgcccgacagccacttgtgtgaagcatgagaagccggtccctccactaagaaaattagtgaagcatcttccagtggtccctccactcacagctcaatcagtgagcaacaggacgaaggaaatgacgtaagccatgacgtctaatcccagggccagcttgcatgcctgcagtgcagcgtgacccggtcgtgcccctctctagagataatgagcattgcatgtctaagttataaaaaattaccacatattttttttgtcacacttgtttgaagtgcagtttatctatctttatacatatatttaaactttactctacgaataatataatctatagtactacaataatatcagtgttttagagaatcatataaatgaacagttagacatggtctaaaggacaattgagtattttgacaacaggactctacagttttatctttttagtgtgcatgtgttctcctttttttttgcaaatagcttcacctatataatacttcatccattttattagtacatccatttagggtttagggttaatggtttttatagactaatttttttagtacatctattttattctattttagcctctaaattaagaaaactaaaactctattttagtttttttatttaataatttagatataaaatagaataaaataaagtgactaaaaattaaacaaataccctttaagaaattaaaaaaactaaggaaacatttttcttgtttcgagtagataatgccagcctgttaaacgccgtcgacgagtctaacggacaccaaccagcgaaccagcagcgtcgcgtcgggccaagcgaagcagacggcacggcatctctgtcgctgcctctggacccctctcgagagttccgctccaccgttggacttgctccgctgtcggcatccagaaattgcgtggcggagcggcagacgtgagccggcacggcaggcggcctcctcctcctctcacggcaccggcagctacgggggattcctttcccaccgctccttcgctttcccttcctcgcccgccgtaataaatagacaccccctccacaccctctttccccaacctcgtgttgttcggagcgcacacacacacaaccagatctcccccaaatccacccgtcggcacctccgcttcaaggtacgccgctcgtcctcccccccccccctctctaccttctctagatcggcgttccggtccatgcatggttagggcccggtagttctacttctgttcatgtttgtgttagatccgtgtttgtgttagatccgtgctgctagcgttcgtacacggatgcgacctgtacgtcagacacgttctgattgctaacttgccagtgtttctctttggggaatcctgggatggctctagccgttccgcagacgggatcgatttcatgattttttttgtttcgttgcatagggtttggtttgcccttttcctttatttcaatatatgccgtgcacttgtttgtcgggtcatcttttcatgcttttttttgtcttggttgtgatgatgtggtctggttgggcggtcgttctagatcggagtagaattctgtttcaaactacctggtggatttattaattttggatctgtatgtgtgtgccatacatattcatagttacgaattgaagatgatggatggaaatatcgatctaggataggtatacatgttgatgcgggttttactgatgcatatacagagatgctttttgttcgcttggttgtgatgatgtggtgtggttgggcggtcgttcattcgttctagatcggagtagaatactgtttcaaactacctggtgtatttattaattttggaactgtatgtgtgtgtcatacatcttcatagttacgagtttaagatggatggaaatatcgatctaggataggtatacatgttgatgtgggttttactgatgcatatacatgatggcatatgcagcatctattcatatgctctaaccttgagtacctatctattataataaacaagtatgttttataattattttgatcttgatatacttggatgatggcatatgcagcagctatatgtggatttttttagccctgccttcatacgctatttatttgcttggtactgtttcttttgtcgatgctcaccctgttgtttggtgttacttctgcaggtcgactttaacttagcctaggatccatggccactgtgaacaactggctcgctttctccctctccccgcaggagctgccgccctcccagacgacggactccacactcatctcggccgccaccgccgaccatgtctccggcgatgtctgcttcaacatcccccaagattggagcatgaggggatcagagctttcggcgctcgtcgcggagccgaagctggaggacttcctcggcggcatctccttctccgagcagcatcacaaggccaactgcaacatgatacccagcactagcagcacagtttgctacgcgagctcaggtgctagcaccggctaccatcaccagctgtaccaccagcccaccagctcagcgctccacttcgcggactccgtaatggtggcttcctcggccggtgtccacgacggcggtgccatgctcagcgcggccgccgctaacggtgtcgctggcgctgccagtgccaacggcggcggcatcgggctgtccatgattaagaactggctgcggagccaaccggcgcccatgcagccgagggtggcggcggctgagggcgcgcaggggctctctttgtccatgaacatggcggggacgacccaaggcgctgctggcatgccacttctcgctggagagcgcgcacgggcgcccgagagtgtatcgacgtcagcacagggtggagccgtcgtcgtcacggcgccgaaggaggatagcggtggcagcggtgttgccggcgctctagtagccgtgagcacggacacgggtggcagcggcggcgcgtcggctgacaacacggcaaggaagacggtggacacgttcgggcagcgcacgtcgatttaccgtggcgtgacaaggcatagatggactgggagatatgaggcacatctttgggataacagttgcagaagggaagggcaaactcgtaagggtcgtcaagtctatttaggtggctatgataaagaggagaaagctgctagggcttatgatcttgctgctctgaagtactggggtgccacaacaacaacaaattttccagtgagtaactacgaaaaggagctcgaggacatgaagcacatgacaaggcaggagtttgtagcgtctctgagaaggaagagcagtggtttctccagaggtgcatccatttacaggggagtgactaggcatcaccaacatggaagatggcaagcacggattggacgagttgcagggaacaaggatctttacttgggcaccttcagcacccaggaggaggcagcggaggcgtacgacatcgcggcgatcaagttccgcggcctcaacgccgtcaccaacttcgacatgagccgctacgacgtgaagagcatcctggacagcagcgccctccccatcggcagcgccgccaagcgcctcaaggaggccgaggccgcagcgtccgcgcagcaccaccacgccggcgtggtgagctacgacgtcggccgcatcgcctcgcagctcggcgacggcggagccctggcggcggcgtacggcgcgcactaccacggcgccgcctggccgaccatcgcgttccagccgggcgccgccagcacaggcctgtaccacccgtacgcgcagcagccaatgcgcggcggcgggtggtgcaagcaggagcaggaccacgcggtgatcgcggccgcgcacagcctgcaggacctccaccacctgaacctgggcgcggccggcgcgcacgactttttctcggcagggcagcaggccgccgccgctgcgatgcacggcctgggtagcatcgacagtgcgtcgctcgagcacagcaccggctccaactccgtcgtctacaacggcggggtcggcgacagcaacggcgccagcgccgtcggcggcagtggcggtggctacatgatgccgatgagcgctgccggagcaaccactacatcggcaatggtgagccacgagcaggtgcatgcacgggcctacgacgaagccaagcaggctgctcagatggggtacgagagctacctggtgaacgcggagaacaatggtggcggaaggatgtctgcatgggggactgtcgtgtctgcagccgcggcggcagcagcaagcagcaacgacaacatggccgccgacgtcgggcatggcggcgcgcagctcttcagtgtctggaacgacacttaagcgtacctagtggtacctgacatcttatagtctgcaacctctcgtgtctgaattcctatctttatcaagtgttattgcttccacgactataggacagctttcgtcgaaagcttttgctcatgtgatctcgaaggattcatctagtctgatttttcgtgacttgtatcggttttattggattcatccaacatatatcaataaaaaatgagttgtgtttcctttcttcctagttcagttaaaattatttccctcctgcgcttgtgctgtaattgtctgtgtacctgttgtttgtgactgtgttagttcccttggatatgatttcgtatttgatatgtacatggagatagcttagcttcattattggagtatgaagttagtatgacatagtcactctcctggaaaattgacactgcaaaccatatttttattctgaaccacaaatcctagtcagtccgctggcatatgccgtccgtttgctgaatccagaacgtgggtttggagatgtacggctgagatgcctctatgcgaaggggatttcgtggtgaaacgagatgggagtagagcaacgcccgtggaagatgcttcaaacttccacacttttgagcaacgatcggcagtagtaaggtagacgatttcaagatcaaagcatatgaagataaacaacatcaacaacaaaatttgttggggttctatagagagaaacagagctacatacatacactgttttgtatctaccatctgagatgatgaaaagatgaaaaactaaagaatgccccggcgccaacgccaggacacgccgcgcgcgcgtcacccgagccatctcttgacccagccggcgctgtatatttacacacgttgcagcatcgatcaccacctgttcgatcgcgtcgccgtcaccggcgcgccgcgacttattgaactagtctagggcgcggctaacaacctagcttagattgccttgtctaaacccttaggctaacgcgccactctagaaggccgatctcccccgaacgcgccagatccgatatcgatgggccctggccgaagcttggtcacccgctagacgtgcgcacgataacttcgtatagcatacattatacgaagttataacagcggaccgggttaccgaattcctgcccttaaggccaattgttcaagattcattcaacaattgaaacatctcccatgattaaatcagtataaggttgctatggtcttgcttgacaaagtttttttttgagggaatttcaactaaatttttgagtgaaactatcaaatactgattttaaaaaatttttataaaaggaagcgcagagataaaaggccatctatgctacaaaagtacccaaaaatgtaatcctaaagtatgaattgcattttttttttgtttggacgaaaggaaaggagtattaccacaagaatgatatcatcttcatatttagatcttttttgggtaaagcttgagattctctaaatatagagaaatcagaagaaaaaaaaaccgtgttttggtggttttgatttctagcctccacaataactttgacggcgtcgacaagtctaacggacaccaagcagcgaaccaccagcgccgagccaagcgaagcagacggccgagacgttgacaccttcggcgcggcatctctcgagagttccgctccggcgctccacctccaccgctggcggtttcttattccgttccgttccgcctcctgctctgctcctctccacaccacacggcacgaaaccgttacggcaccggcagcacccagcacgggagaggggattcctttcccaccgttccttccctttccgccccgccgctataaatagccagccccatccccagcttttttccccaatctcatctcctctctcctgttgttcggagcacacgcacaatccgatcgatccccaaatccccttcgtctctcctcgcgagcctcgtggatcccagcttcaaggtacggcgatcgatcatcccccctccttctctctaccttcttttctctagactacatcggatggcgatccatggttagggcctgctagtttcccttcctgttttgtcgatggctgcgaggcacaatagatctgatggcgttatgacggctaacttgtcatgttgttgcgatttatagtccctttaggagatcagtttaatttctcggatggttcgagatcggtggtccatggttagtaccctaagatccgcgctgttagggttcgtagatggaggcgacctgttctgattgttaacttgtcagtacctgggaaatcctgggatggttctagctcgtccgcagatgagatcgatttcatgatcctctgtatcttgtttcgttgcctaggttccgtctaatctatccgtggtatgatgtagatgttttgatcgtgctaactacgtcttgtaaagttaattgtcaggtcataatttttagcatgcctttttttttgtttggttttgtctaattgggctgtcgttctagatcagagtagaagactgttccaaactacctgctggatttattgaacttggatctgtatgtgtgtcacatatcttcataaattcatgattaagatggattgaaatatcttttatctttttggtatggatagttctatatgttggtgtggctttgttagatgtatacatgcttagatacatgaagcaacgtgctgctactgtttagtaattgctgttcatttgtctaataaacagataaggatatgtatttatgttgctgttggttttgctggtactttgttggatacaaatgcttcaatacagaaaacagcatgctgctacgatttaccatttatctaatcttatcatatgtctaatctaataaacaaacatgcttttaaattatcttcatatgcttggatgatggcatacacagcggctatgtgtggttttttaaatacccagcatcatgggcatgcatgacactgctttaatatgctttttatttgcttgagactgtttcttttgtttatactgaccctttagttcggtgactcttctgcaggtcgactttaacttagcctaggatccatggcccagtccaagcacggcctgaccaaggagatgaccatgaagtaccgcatggagggctgcgtggacggccacaagttcgtgatcaccggcgagggcatcggctaccccttcaagggcaagcaggccatcaacctgtgcgtggtggagggcggccccttgcccttcgccgaggacatcttgtccgccgccttcatgtacggcaaccgcgtgttcaccgagtacccccaggacatcgtcgactacttcaagaactcctgccccgccggctacacctgggaccgctccttcctgttcgaggacggcgccgtgtgcatctgcaacgccgacatcaccgtgagcgtggaggagaactgcatgtaccacgagtccaagttctacggcgtgaacttccccgccgacggccccgtgatgaagaagatgaccgacaactgggagccctcctgcgagaagatcatccccgtgcccaagcagggcatcttgaagggcgacgtgagcatgtacctgctgctgaaggacggtggccgcttgcgctgccagttcgacaccgtgtacaaggccaagtccgtgccccgcaagatgcccgactggcacttcatccagcacaagctgacccgcgaggaccgcagcgacgccaagaaccagaagtggcacctgaccgagcacgccatcgcctccggctccgccttgccctccggactcagatctcgatagggtaccaatggccagttaacagatccagctgctgctgttctagggttcacaagtctgcctatttgtcttccccaatggagctatggttgtctggtctggtccttggtcgtgtcccgtttcattgtgtactatttacctgtaatgtgtatccttaagtctggtttgatggtgtctgaaacgttttgctgtggtagagcagcatggaagaactataatgaataagtgatccctaatcattgtgtccaaattttgcttctgctatacccttttgtgctgtttcttatgttttgcttaaaaatttgatctgacaaacaaatttgtctaaattatgctcttgttctgactgtgtactgtacacatttgtattgctaccggtttggcacatagttttctctttgattgcagatcaaacccttctgattgcagattgcttggctatggctgatgtgctcactgttcttctttagcttgtatattgctgatggtggcttggctacggctgaaaaagttgctgctgcgccgacttggcaactgttgctccagtaatgctttgtcctctcttcctagccgccgacttggcacttggcagctgttgctcctgtaatgcgttgttatctcttatctcttgagatgtactatgattttgaggctgtttgacttgtgccagattgccagtgctgatgctatattatctcaggtttttatgctagtatatgttttactgtgtgctgcctgtgtcgagttacgtaatctattgaaccgctatgcgtgttgatgccctgttgttgcttgccagattgatgcccctgttgcttgcagcttgcaagctgtagtgaaatcctaaaattcgaaaccaaatctattctgaacttttgaagatctgtgatgtccggaagaaaagattcaaacagataaacgggactctccagaatctataaaataaatgatcgacaaacgctttgctttggtaggcttcctagttagttagcggaccgaagcttcggtccgggcctagaaggccagcttcggccgcccctcggtaccctgggatcttccgacggcgtcttcaccgccccgccgccgcccgagccggacttgtcgctgccgccgccgctgctcatcttgcgcgcttgtgtccctccctcagtccctgcgttcgcggatcgcgggcgggtgcgacccgtttggactccggccggtagccttcgtgccgacctcgctcggtccaccggtttgtcggggacccacatgtcagtgaaggtacgcgtccacgtccacagaccctactaccccagacgagtccaaatcgctgttccctcacactctcgtgtaccagcgcgcggcggaaagcacctttccaacaaccgccgacacgtcggtcccacgtcggcatgctccaccggtcagtgtttggcgtgtacggctcccggcgacgaacgagtgtggcctaagctttcctactcccatcccatctgagccacacatctctctcacgccacgcgcacaaaacagccaggctcccacgcgcatcaaccggctctccctttccgtgccactcgcccccaagccccaaaccctcgccgccgcctccgagacagccgccgccacctaggccatggccaccgccgccgccgcgtctaccgcgctcactggcgccactaccgctgcgcccaaggcgaggcgccgggcgcacctcctggccacccgccgcgccctcgccgcgcccatcaggtgctcagcggcgtcacccgccatgccgatggctcccccggccaccccgctccggccgtggggccccaccgagccccgcaagggtgctgacatcctcgtcgagtccctcgagcgctgcggcgtccgcgacgtcttcgcctaccccggcggcgcgtcgatggagatccaccaggcactcacccgctcccccgtcatcgccaaccacctcttccgccacgagcaaggggaggcctttgccgcctccggctacgcgcgctcctcgggccgcgtcggcgtctgcatcgccacctccggccccggcgccaccaacctagtctccgcgctcgccgacgcgctgctcgattccgtcccgatggtcgccatcacgggacaggtggcgcgacgcatgattggcaccgacgccttccaggagacgcccatcgtcgaggtcacgcgctccatcaccaagcacaactacctggtcctcgacgtcgacgacatcccccgcgtcgtgcaggaggctttcttcctcgcctcctctggtcgaccagggccggtgcttgtcgacatccccaaggacatccagcagcagatggcggtgcctgtctgggacaagcccatgagtctgcctgggtacattgcgcgccttcccaagccccctgcgactgagttgcttgagcaggtgctgcgtcttgttggtgaatcgcggcgccctgttctttatgtgggcggtggctgcgcagcatctggtgaggagttgcgacgctttgtggagctgactggaatcccggtcacaactactcttatgggcctcggcaacttccccagcgacgacccactgtctctgcgcatgctaggtatgcatgggacggtgtatgcaaattatgcagtggataaggccgatctgttgcttgcacttggtgtgcggtttgatgatcgcgtgacagggaagattgaggcttttgcaagcagggctaagattgtgcacgttgatattgatccggctgagattggcaagaacaagcagccacatgtgtccatctgtgcagatgttaagcttgctttgcagggcatgaatgctcttcttgaaggaagcacatcaaagaagagctttgactttggctcatggaacgatgagttggatcagcagaagagggaattcccccttgggtataaaacatctaatgaggagatccagccacaatatgctattcaggttcttgatgagctgacgaaaggcgaggccatcatcggcacaggtgttgggcagcaccagatgtgggcggcacagtactacacttacaagcggccaaggcagtggttgtcttcagctggtcttggggctatgggatttggtttgccggctgctgctggtgcttctgtggcaaacccaggtgtcactgttgttgacatcgatggagatggtagctttctcatgaacgttcaggagctagctatgatccgaattgagaacctcccagtgaaggtctttgtgctaaacaaccagcacctggggatggtggtgcagttggaggacaggttctataaggccaacagagcgcacacatacttgggaaacccagagaatgaaagtgagatatatccagatttcgtgacgatcgccaaagggttcaacattccagccgtccgtgtgacaaagaagaacgaagtccgcgcagcgataaagaagatgctcgagactccagggccgtacctcttggatataatcgtcccacaccaggagcatgtgttgcctatgatccctagtggtggggctttcaaggatatgatcctggatggtgatggcaggactgtgtactgacttcgaataggtacccggggatcctctagtgccgtgggtcgtttaagctgccgctgtacctgtgtcgtctggtgccttctggtgtacctgggaggttgtcgtctatcaagtatctgtggttggtgtcatgagtcagtgagtcccaatactgttcgtgtcctgtgtgcattatacccaaaactgttatgggcaaatcatgaataagcttgatgttcgaacttaaaagtctctgctcaatatggtattatggttgtttttgttcgtctcctaatatttgcctgggatcaaattttattggctggtgttcatttgacctccatgttcttgctaggctccattttttactctacagccataatatgtttgattgtttggtttgttctttgttgtacacctggttctgtcgagcttagttttcgacactggcttacagcttaacatgttgctattttattgggttctgattgctattttattgggttctgattgctagtttttgctgaatccaaaaaccatgttatttatttaagcgatccaggttattattatgatggtggctaagtttttttttttccaagggtaaattttctggattctccagtgtttctgtggccgaattcaatcactagagtcgacctgcaaagcttcggtccgggcctagaaggcccgcgccacttacgcttgattccgatgacttcgtaggttcctagctcaagccgctcgtgtccaagcgtcacttacgattagctaatgattacggcatctaggaccgactagttcttatgtgcttctagtctccaaatgtggttgatagttattttgctctaagatcaacagtaatgaagtataaatcatcgttgtggtgtgctactcggttaattgagcattaacacacacaaacatgacgaggatggtataatctccaaaaatgtgtactttgttaggtgggaccctatagccttgattaatgtgctatgttaggcatgcctggaaacgtgtgacgcatatgttttgtgaacctgttgatattatatgtgcttttatattaccatattttattaaaatactaatatttattactagtaagatataacattctatctagcttaaaaactaaccataaatattccataataactagatttaccaaactaatatactaaatatacataataaatacaaaattaacaagacaataatcaatatttatgagcttaatatatttagacattatggttggtcgacgataatcatgctaacttttcgtaattgcttgattgaaatatgcttagaataatgcctctttgttctacatggcaaatagggaccattatggtgtaacaccctgggaaccacaaacaccccgaaatgctactaaactacacaactaaccttcatatataaaatttcgacagcatctcctttgaaaatttgcatagacgtggaagcaacagagtataaacagatctgcgtttaaacgtgcaagcgctactagacaattcagtacattaaaaacgtccgcaatgtgttattaagttgtctaagcgtcaatttgtttacaccacaatatatcctgcca

SEQ ID NO: 84 - DNA, 31400 bp, Artificial sequence
  PHP97933
gtttacccgccaatatatcctgtcaaacactgcggccgcacttgaccgcggatggagccggagctgtggtgaggccatcgacgggaggtgggggagaacacagtctcagtgttctttgtgagtccgcaaggtttttagcttttctgtattaattaaggttgctgttggctgtagaatacggtcgtggaagagctgtatcggtagctactacgtaagctattatatactggaagtctggagctcgtcgatctccggtcgtcttcctccatttctcctcgtcttgctttgactgctgctaccatttgcttctgttttctgatgaagcatgccatgtcggccaccagtgtttgtgtggtttttgcagggaatggctttcaagtgctgtgattgaatggccctcgtcgtcctcggctgagctcacatggacgcgtcatgtgagtgagatatatgatcatatgatgagtggggttcgggtgagtgcgtacttgaagtaggatcccgctttcactcattcattcattggcctttaaaccgggaaattttcgcgaggagatggagggaagcaagcagggtgacgagtgcagagtgccgcgagcgctttgtcaaaaggcaccgccgtaggcaaaaaaatcaatggccctgactgactcgatggtagtactactgtagagactagagagggttgctccccatatcttcgtgtgacttttactccagcattgcatttccgtcattgagacgttaattaatagcagctttcgggacagatgactgtggccatgtttcgtcacggccgcttcgtgccagctgggggtactatagtactgtgattttgttagtaaaaactttcattaggccaccattgacgaccgggccttcgcttttgctgcgctaattaaccatttcccggcgaccgaagggaacatgaacatgccccgacacatgagggcatgaggactagtgttctccctgtcgttcgttgacttgactagtgatagtttaaacgctcttcaactggaagagcggttactaccggttcactagctagctgctaatcgagctagttaccctatgaggtgacatgaagcgctcacggttactatgacggttagcttcacgactgttggtggcagtagcgtacgacttagctatagttccggacttacctagctaataacttcgtatagcatacattatacgaagttatggttaccgagctgttaccaagcggccgcacactgatagtttaaactgaaggcgggaaacgacaatctgatcatgagcggagaattaagggagtcacgttatgacccccgccgatgacgcgggacaagccgttttacgtttggaactgacagaaccgcaacgattgaaggagccactcagccgcgggtttctggagtttaatgagctaagcacatacgtcagaaaccattattgcgcgttcaaaagtcgcctaaggtcactatcagctagcaaatatttcttgtcaaaaatgctccactgacgttccataaattcccctcggtatccaattagagtctcatattcactcccatggcggccaatgcgggcggcggtggagcgggaggaggcagcggcagcggcagcgtggctgcgccggcggtgtgccgccccagcggctcgcggtggacgccgacgccggagcagatcaggatgctgaaggagctctactacggctgcggcatccggtcgcccagctcggagcagatccagcgcatcaccgccatgctgcggcagcacggcaagatcgagggcaagaacgtcttctactggttccagaaccacaaggcccgcgagcgccagaagcgccgcctcaccagcctcgacgtcaacgtgcccgccgccggcgcggccgacgccaccaccagccaactcggcgtcctctcgctgtcgtcgccgccgccttcaggcgcggcgcctccctcgcccaccctcggcttctacgccgccggcaatggcggcggatcggctgtgctgctggacacgagttccgactggggcagcagcggcgctgctatggccaccgagacatgcttcctgcaggactacatgggcgtgacggacacgggcagctcgtcgcagtggccacgcttctcgtcgtcggacacgataatggcggcggccgcggcgcgggcggcgacgacgcgggcgcccgagacgctccctctcttcccgacctgcggcgacgacggcggcagcggtagcagcagctacttgccgttctggggtgccgcgtccacaactgccggcgccacttcttccgttgcgatccaacagcaacaccagctgcaggagcagtacagcttttacagcaacagcaacagcacccagctggccggcaccggcaaccaagacgtatcggcaacagcagcagcagccgccgccctggagctgagcctcagctcatggtgctccccttaccctgctgcagggagtatgtgagagcaacgcgagctgccactgctcttcactgatgtctctggaatggaaggaggaggaagtgagaacagatcattcgacaaagcagcattagtccgttgatcggtggaagaccactcgtcagtgttgagttgaatgtttgatcaataaaatacggcaatgctgtaagggttgttttttatgccattgataatacactgtactgttcagttgttgaactctatttcttagccatgccaagtgcttttcttattttgaataacattacagcaaaaagttgaaagacaaaaaaaaaaacccccgaacagagtgctttgggtcccaagcttctttagactgtgttcggcgttccccctaaatttctccccctatatctcactcacttgtcacatcagcgttctctttccccctatatctccacgctctacagcagttccacctatatcaaacctctataccccaccacaacaatattatatactttcatcttcaactaactcatgtaccttccaatttttttctactaataattatttacgtgcacagaaacttagcaaggagagagagagcgggaatttaaatgctcggcgttaggcttttagtccgctaggtggctagaccgaggttaggacgctagttcactaggggcctagtggtgttttaagacgtcacggtcactacgaatcgaccgaagcttgcatgggccgcatcgagcagctggcttgtggggaccagacaaaaaaggaatggtgcagaattgttaggcgcacctaccaaaagcatctttgcctttattgcaaagataaagcagattcctctagtacaagtggggaacaaaataacgtggaaaagagctgtcctgacagcccactcactaatgcgtatgacgaacgcagtgacgaccacaaaactcgagcaacgagatcatgagccaatcaaagaggagtgatgtagacctaaagcaataatggagccatgacgtaagggcttacgcccatacgaaataattaaaggctgatgtgacctgtcggtctctcagaacctttactttttatgtttggcgtgtatttttaaatttccacggcaatgacgatgtgaccgtcgacccactaaaacattgctttgtcaaaagctaaaaaagatgatgcccgacagccacttgtgtgaagcatgagaagccggtccctccactaagaaaattagtgaagcatcttccagtggtccctccactcacagctcaatcagtgagcaacaggacgaaggaaatgacgtaagccatgacgtctaatcccagggccagcttgcatgcctgcagtgcagcgtgacccggtcgtgcccctctctagagataatgagcattgcatgtctaagttataaaaaattaccacatattttttttgtcacacttgtttgaagtgcagtttatctatctttatacatatatttaaactttactctacgaataatataatctatagtactacaataatatcagtgttttagagaatcatataaatgaacagttagacatggtctaaaggacaattgagtattttgacaacaggactctacagttttatctttttagtgtgcatgtgttctcctttttttttgcaaatagcttcacctatataatacttcatccattttattagtacatccatttagggtttagggttaatggtttttatagactaatttttttagtacatctattttattctattttagcctctaaattaagaaaactaaaactctattttagtttttttatttaataatttagatataaaatagaataaaataaagtgactaaaaattaaacaaataccctttaagaaattaaaaaaactaaggaaacatttttcttgtttcgagtagataatgccagcctgttaaacgccgtcgacgagtctaacggacaccaaccagcgaaccagcagcgtcgcgtcgggccaagcgaagcagacggcacggcatctctgtcgctgcctctggacccctctcgagagttccgctccaccgttggacttgctccgctgtcggcatccagaaattgcgtggcggagcggcagacgtgagccggcacggcaggcggcctcctcctcctctcacggcaccggcagctacgggggattcctttcccaccgctccttcgctttcccttcctcgcccgccgtaataaatagacaccccctccacaccctctttccccaacctcgtgttgttcggagcgcacacacacacaaccagatctcccccaaatccacccgtcggcacctccgcttcaaggtacgccgctcgtcctcccccccccccctctctaccttctctagatcggcgttccggtccatgcatggttagggcccggtagttctacttctgttcatgtttgtgttagatccgtgtttgtgttagatccgtgctgctagcgttcgtacacggatgcgacctgtacgtcagacacgttctgattgctaacttgccagtgtttctctttggggaatcctgggatggctctagccgttccgcagacgggatcgatttcatgattttttttgtttcgttgcatagggtttggtttgcccttttcctttatttcaatatatgccgtgcacttgtttgtcgggtcatcttttcatgcttttttttgtcttggttgtgatgatgtggtctggttgggcggtcgttctagatcggagtagaattctgtttcaaactacctggtggatttattaattttggatctgtatgtgtgtgccatacatattcatagttacgaattgaagatgatggatggaaatatcgatctaggataggtatacatgttgatgcgggttttactgatgcatatacagagatgctttttgttcgcttggttgtgatgatgtggtgtggttgggcggtcgttcattcgttctagatcggagtagaatactgtttcaaactacctggtgtatttattaattttggaactgtatgtgtgtgtcatacatcttcatagttacgagtttaagatggatggaaatatcgatctaggataggtatacatgttgatgtgggttttactgatgcatatacatgatggcatatgcagcatctattcatatgctctaaccttgagtacctatctattataataaacaagtatgttttataattattttgatcttgatatacttggatgatggcatatgcagcagctatatgtggatttttttagccctgccttcatacgctatttatttgcttggtactgtttcttttgtcgatgctcaccctgttgtttggtgttacttctgcaggtcgactttaacttagcctaggatccatggccactgtgaacaactggctcgctttctccctctccccgcaggagctgccgccctcccagacgacggactccacactcatctcggccgccaccgccgaccatgtctccggcgatgtctgcttcaacatcccccaagattggagcatgaggggatcagagctttcggcgctcgtcgcggagccgaagctggaggacttcctcggcggcatctccttctccgagcagcatcacaaggccaactgcaacatgatacccagcactagcagcacagtttgctacgcgagctcaggtgctagcaccggctaccatcaccagctgtaccaccagcccaccagctcagcgctccacttcgcggactccgtaatggtggcttcctcggccggtgtccacgacggcggtgccatgctcagcgcggccgccgctaacggtgtcgctggcgctgccagtgccaacggcggcggcatcgggctgtccatgattaagaactggctgcggagccaaccggcgcccatgcagccgagggtggcggcggctgagggcgcgcaggggctctctttgtccatgaacatggcggggacgacccaaggcgctgctggcatgccacttctcgctggagagcgcgcacgggcgcccgagagtgtatcgacgtcagcacagggtggagccgtcgtcgtcacggcgccgaaggaggatagcggtggcagcggtgttgccggcgctctagtagccgtgagcacggacacgggtggcagcggcggcgcgtcggctgacaacacggcaaggaagacggtggacacgttcgggcagcgcacgtcgatttaccgtggcgtgacaaggcatagatggactgggagatatgaggcacatctttgggataacagttgcagaagggaagggcaaactcgtaagggtcgtcaagtctatttaggtggctatgataaagaggagaaagctgctagggcttatgatcttgctgctctgaagtactggggtgccacaacaacaacaaattttccagtgagtaactacgaaaaggagctcgaggacatgaagcacatgacaaggcaggagtttgtagcgtctctgagaaggaagagcagtggtttctccagaggtgcatccatttacaggggagtgactaggcatcaccaacatggaagatggcaagcacggattggacgagttgcagggaacaaggatctttacttgggcaccttcagcacccaggaggaggcagcggaggcgtacgacatcgcggcgatcaagttccgcggcctcaacgccgtcaccaacttcgacatgagccgctacgacgtgaagagcatcctggacagcagcgccctccccatcggcagcgccgccaagcgcctcaaggaggccgaggccgcagcgtccgcgcagcaccaccacgccggcgtggtgagctacgacgtcggccgcatcgcctcgcagctcggcgacggcggagccctggcggcggcgtacggcgcgcactaccacggcgccgcctggccgaccatcgcgttccagccgggcgccgccagcacaggcctgtaccacccgtacgcgcagcagccaatgcgcggcggcgggtggtgcaagcaggagcaggaccacgcggtgatcgcggccgcgcacagcctgcaggacctccaccacctgaacctgggcgcggccggcgcgcacgactttttctcggcagggcagcaggccgccgccgctgcgatgcacggcctgggtagcatcgacagtgcgtcgctcgagcacagcaccggctccaactccgtcgtctacaacggcggggtcggcgacagcaacggcgccagcgccgtcggcggcagtggcggtggctacatgatgccgatgagcgctgccggagcaaccactacatcggcaatggtgagccacgagcaggtgcatgcacgggcctacgacgaagccaagcaggctgctcagatggggtacgagagctacctggtgaacgcggagaacaatggtggcggaaggatgtctgcatgggggactgtcgtgtctgcagccgcggcggcagcagcaagcagcaacgacaacatggccgccgacgtcgggcatggcggcgcgcagctcttcagtgtctggaacgacacttaagcgtacctagtggtacctgacatcttatagtctgcaacctctcgtgtctgaattcctatctttatcaagtgttattgcttccacgactataggacagctttcgtcgaaagcttttgctcatgtgatctcgaaggattcatctagtctgatttttcgtgacttgtatcggttttattggattcatccaacatatatcaataaaaaatgagttgtgtttcctttcttcctagttcagttaaaattatttccctcctgcgcttgtgctgtaattgtctgtgtacctgttgtttgtgactgtgttagttcccttggatatgatttcgtatttgatatgtacatggagatagcttagcttcattattggagtatgaagttagtatgacatagtcactctcctggaaaattgacactgcaaaccatatttttattctgaaccacaaatcctagtcagtccgctggcatatgccgtccgtttgctgaatccagaacgtgggtttggagatgtacggctgagatgcctctatgcgaaggggatttcgtggtgaaacgagatgggagtagagcaacgcccgtggaagatgcttcaaacttccacacttttgagcaacgatcggcagtagtaaggtagacgatttcaagatcaaagcatatgaagataaacaacatcaacaacaaaatttgttggggttctatagagagaaacagagctacatacatacactgttttgtatctaccatctgagatgatgaaaagatgaaaaactaaagaatgccccggcgccaacgccaggacacgccgcgcgcgcgtcacccgagccatctcttgacccagccggcgctgtatatttacacacgttgcagcatcgatcaccacctgttcgatcgcgtcgccgtcaccggcgcgccgcgacttattgaactagtctagggcgcggctaacaacctagcttagattgccttgtctaaacccttaggctaacgcgccactctagaaggccgatctcccccgaacgcgccagatccgatatcgatgggccctggccgaagcttggtcacccgcaccttgctagttggatattacctcttctcttcaaagtatccttgaacgctcaccggttatcaaatctctacactatagctctgtagtcttgctagatagttagttctttagctctctctagaggttcacaaactcaatacaacacacagtggagtagggtattacgctccggcggcccgaaccactctaaatccttgtgtcctcgtgtgctcttccaccattaatgactgtaattgcagggacacgaagagttgtagcgcttttgccaacaagatccgctatatgctagtagagtggaacctgcacagcaacaagcatccaataatctgagaataagaattatgtgtggtgatggttctcatctctgcaactcgccattttcgcgagagaaccaaatccaagttggtgaagatcatgatttgggctcatgggctggcatagtagctattacctttgcaattgtggttcgaatctatccgatattctccttttcagggagagctaatgcttatgcttattgggtattttggtttgacactgcttcacgcccaaaaaaaggcaactatgtctgagttggatatggcccaaaaaaaggcagctatgtctgagttggatatggaagtcttctttcgtttagggtgaagtaagaccaagctcatgagcttattatcttaggtcggaacaaattagttgataggcatggcacatttatcaaattataatgattttaacagaaaagcaacacctctttttcagcagcaccagctttgcaagctgcaattgacactccaagcatagtatttgctccaaactcagcctgcatttcgcacaatatcatatctatttccatttggataaaatatattttccagaaatatgggaacagaatcaagatacagaaaaaagttgtggtagtagtggtaagtggaaacacaagtacagtgaaaagatagcattatttctgaacagtcaaattaaccgaaataagtagtatcacatactgcccctaaattgactacacccaatgtaaagaattgcttgagcatattgagccatcagttgtttgtttgtgtaacggatttgacaatgcagagttcaggagcaaaaaaccgcaaaggagagaaagagggaaaggatctcctagtatcccaccttgtggcgcgccctgtcaagtgcatgatggcctggtcgatctgcgtctgctgctgcggttccatcccaacgagtgcctccgacaccttgtcgttgatcacccgcaccgcgtaggcgacccccctggcgaggaacttccgcctctcggaggccccggccgcgtcggcggcggcgccctcgagcgcgcccacgctagccgtagatgctcggtgcacggccttgttggtgtgcaactcgacctcaacggccggtgcgctacgcccgtcaaggatctggcgcgcccgcaccctcgtgatcacggtgggcgcctcccgcctcatgtggccgacgatgaaaagcgccgggttaggggccttggcgcgcaccgccgtattcagggcctcctcgctcttgcgcgagagcaggtgcttccccaggtactcctgcactgacaaggctgccacagcggtggaatttgtcctcacgacttcgccacgtcgtcctcacctccctggcttcccacgactccgccgtatcgaggtgctcggtgggtcgtcttaatccgaagtccgaactaggaagacgagacagagaggtctgaggaatgggcctcgtttgatgttgagctgaattatttttccagcataagcccaggtcttggtccatgaacaaaattactagaaacccagcccagtactacgatctaaaagagggactgccactggatagctctctctagcattctccacgctccaatacagcggcgtcgtgtctatccgggtctatccgcgaacacgtgagaactctccagaaactgctttctcctccacttcatctctctcgctttccctctataaaaagaccccttctaggaattgagggagacagcaagcaccaagcagcgatccgaagctcaatcaattcactcaaacctcttccccaaatcttcgattagatcttcgttgacaagaagactagaaccgaacctgacatgtccaacctgctcacggttcaccagaaccttccggctcttccagtggacgcgacgtccgatgaagtcaggaagaacctcatggacatgttccgcgacaggcaagcgttcagcgagcacacctggaagatgctgctctccgtctgccgctcctgggctgcatggtgcaagctgaacaacaggaagtggttccccgctgagcccgaggacgtgagggattaccttctgtacctgcaagcgcgaggtttgtttctgcttctacctttgatatatatataataattatcattaattagtagtaatataatatttcaaatatttttttcaaaataaaagaatgtagtatatagcaattgcttttctgtagtttataagtgtgtatattttaatttataacttttctaatatatgaccaaaacatggtgatgcctaggtctggcagtgaagaccatccagcaacaccttggacaactgaacatgcttcacaggcgctccggcctcccgcgccccagcgactcgaacgccgtgagcctcgtcatgcgccgcatcaggaaggaaaacgtcgatgccggcgaaagggcaaagcaggccctcgcgttcgagaggaccgatttcgaccaggtccgcagcctgatggagaacagcgacaggtgccaggacattaggaacctggcgttcctcggaattgcatacaacacgctcctcaggatcgcggaaattgcccgcattcgcgtgaaggacattagccgcaccgacggcggcaggatgcttatccacattggcaggaccaagacgctcgtttccaccgcaggcgtcgaaaaggccctcagcctcggagtgaccaagctcgtcgaacgctggatctccgtgtccggcgtcgcggacgacccaaacaactacctcttctgccgcgtccgcaagaacggggtggctgcccctagcgccaccagccaactcagcacgagggccttggaaggtattttcgaggccacccaccgcctgatctacggcgcgaaggatgacagcggtcaacgctacctcgcatggtccgggcactccgcccgcgttggagctgctagggacatggcccgcgccggtgtttccatccccgaaatcatgcaggcgggtggatggacgaacgtgaacattgtcatgaactacattcgcaaccttgacagcgagacgggcgcaatggttcgcctcctggaagatggtgactgaggtacccaacctagacttgtccatcttctggattggccaacttaattaatgtatgaaataaaaggatgcacacatagtgacatgctaatcactataatgtgggcatcaaagttgtgtgttatgtgtaattactagttatctgaataaaagagaaagagatcatccatatttcttatcctaaatgaatgtcacgtgtctttataattctttgatgaaccagatgcatttcattaaccaaatccatatacatataaatattaatcatatataattaatatcaattgggttagcaaaacaaatctagtctaggtgtgttttgcgatccgatatcgacgtctaaaaacggcccctaactaacgcttagttgcccgctagattagtcccccgttagtgcctagttagacacacgacgaactaggggctagtgccaccttgctagttggatattacctcttctcttcaaagtatccttgaacgctcaccggttatcaaatctctacactatagctctgtagtcttgctagatagttagttctttagctctcgcacgcaactttgtatagaaaagttgggccgaattcgagctcggtacggccagaatggcccggaccgaagcttgcatgcctgcagtgcagcgtgacccggtcgtgcccctctctagagataatgagcattgcatgtctaagttataaaaaattaccacatattttttttgtcacacttgtttgaagtgcagtttatctatctttatacatatatttaaactttactctacgaataatataatctatagtactacaataatatcagtgttttagagaatcatataaatgaacagttagacatggtctaaaggacaattgagtattttgacaacaggactctacagttttatctttttagtgtgcatgtgttctcctttttttttgcaaatagcttcacctatataatacttcatccattttattagtacatccatttagggtttagggttaatggtttttatagactaatttttttagtacatctattttattctattttagcctctaaattaagaaaactaaaactctattttagtttttttatttaataatttagatataaaatagaataaaataaagtgactaaaaattaaacaaataccctttaagaaattaaaaaaactaaggaaacatttttcttgtttcgagtagataatgccagcctgttaaacgccgtcgacgagtctaacggacaccaaccagcgaaccagcagcgtcgcgtcgggccaagcgaagcagacggcacggcatctctgtcgctgcctctggacccctctcgagagttccgctccaccgttggacttgctccgctgtcggcatccagaaattgcgtggcggagcggcagacgtgagccggcacggcaggcggcctcctcctcctctcacggcaccggcagctacgggggattcctttcccaccgctccttcgctttcccttcctcgcccgccgtaataaatagacaccccctccacaccctctttccccaacctcgtgttgttcggagcgcacacacacacaaccagatctcccccaaatccacccgtcggcacctccgcttcaaggtacgccgctcgtcctcccccccccccctctctaccttctctagatcggcgttccggtccatgcatggttagggcccggtagttctacttctgttcatgtttgtgttagatccgtgtttgtgttagatccgtgctgctagcgttcgtacacggatgcgacctgtacgtcagacacgttctgattgctaacttgccagtgtttctctttggggaatcctgggatggctctagccgttccgcagacgggatcgatttcatgattttttttgtttcgttgcatagggtttggtttgcccttttcctttatttcaatatatgccgtgcacttgtttgtcgggtcatcttttcatgcttttttttgtcttggttgtgatgatgtggtctggttgggcggtcgttctagatcggagtagaattctgtttcaaactacctggtggatttattaattttggatctgtatgtgtgtgccatacatattcatagttacgaattgaagatgatggatggaaatatcgatctaggataggtatacatgttgatgcgggttttactgatgcatatacagagatgctttttgttcgcttggttgtgatgatgtggtgtggttgggcggtcgttcattcgttctagatcggagtagaatactgtttcaaactacctggtgtatttattaattttggaactgtatgtgtgtgtcatacatcttcatagttacgagtttaagatggatggaaatatcgatctaggataggtatacatgttgatgtgggttttactgatgcatatacatgatggcatatgcagcatctattcatatgctctaaccttgagtacctatctattataataaacaagtatgttttataattattttgatcttgatatacttggatgatggcatatgcagcagctatatgtggatttttttagccctgccttcatacgctatttatttgcttggtactgtttcttttgtcgatgctcaccctgttgtttggtgttacttctgcaggtcgactttaacttagcctaggatccatggcaccgaagaagaagcgcaaggtgatggacaagaagtacagcatcggcctcgacatcggcaccaactcggtgggctgggccgtcatcacggacgaatataaggtcccgtcgaagaagttcaaggtcctcggcaatacagaccgccacagcatcaagaaaaacttgatcggcgccctcctgttcgatagcggcgagaccgcggaggcgaccaggctcaagaggaccgccaggagacggtacactaggcgcaagaacaggatctgctacctgcaggagatcttcagcaacgagatggcgaaggtggacgactccttcttccaccgcctggaggaatcattcctggtggaggaggacaagaagcatgagcggcacccaatcttcggcaacatcgtcgacgaggtaagtttctgcttctacctttgatatatatataataattatcattaattagtagtaatataatatttcaaatatttttttcaaaataaaagaatgtagtatatagcaattgcttttctgtagtttataagtgtgtatattttaatttataacttttctaatatatgaccaaaacatggtgatgtgcaggtggcctaccacgagaagtacccgacaatctaccacctccggaagaaactggtggacagcacagacaaggcggacctccggctcatctaccttgccctcgcgcatatgatcaagttccgcggccacttcctcatcgagggcgacctgaacccggacaactccgacgtggacaagctgttcatccagctcgtgcagacgtacaatcaactgttcgaggagaaccccataaacgctagcggcgtggacgccaaggccatcctctcggccaggctctcgaaatcaagaaggctggagaaccttatcgcgcagttgccaggcgaaaagaagaacggcctcttcggcaaccttattgcgctcagcctcggcctgacgccgaacttcaaatcaaacttcgacctcgcggaggacgccaagctccagctctcaaaggacacctacgacgacgacctcgacaacctcctggcccagataggagaccagtacgcggacctcttcctcgccgccaagaacctctccgacgctatcctgctcagcgacatccttcgggtcaacaccgaaattaccaaggcaccgctgtccgccagcatgattaaacgctacgacgagcaccatcaggacctcacgctgctcaaggcactcgtccgccagcagctccccgagaagtacaaggagatcttcttcgaccaatcaaaaaacggctacgcgggatatatcgacggcggtgccagccaggaagagttctacaagttcatcaaaccaatcctggagaagatggacggcaccgaggagttgctggtcaagctcaacagggaggacctcctcaggaagcagaggaccttcgacaacggctccatcccgcatcagatccacctgggcgaactgcatgccatcctgcggcgccaggaggacttctacccgttcctgaaggataaccgggagaagatcgagaagatcttgacgttccgcatcccatactacgtgggcccgctggctcgcggcaactcccggttcgcctggatgacccggaagtcggaggagaccatcacaccctggaactttgaggaggtggtcgataagggcgctagcgctcagagcttcatcgagcgcatgaccaacttcgataaaaacctgcccaatgaaaaagtcctccccaagcactcgctgctctacgagtacttcaccgtgtacaacgagctcaccaaggtcaaatacgtcaccgagggcatgcggaagccggcgttcctgagcggcgagcagaagaaggcgatagtggacctcctcttcaagaccaacaggaaggtgaccgtgaagcaattaaaagaggactacttcaagaaaatagagtgcttcgactccgtggagatctcgggcgtggaggatcggttcaacgcctcactcggcacgtatcacgacctcctcaagatcattaaagacaaggacttcctcgacaacgaggagaacgaggacatcctcgaggacatcgtcctcaccctgaccctgttcgaggaccgcgaaatgatcgaggagaggctgaagacctacgcgcacctgttcgacgacaaggtcatgaaacagctcaagaggcgccgctacactggttggggaaggctgtcccgcaagctcattaatggcatcagggacaagcagagcggcaagaccatcctggacttcctcaagtccgacgggttcgccaaccgcaacttcatgcagctcattcacgacgactcgctcacgttcaaggaagacatccagaaggcacaggtgagcgggcagggtgactccctccacgaacacatcgccaacctggccggctcgccggccattaaaaagggcatcctgcagacggtcaaggtcgtcgacgagctcgtgaaggtgatgggccggcacaagcccgaaaatatcgtcatagagatggccagggagaaccagaccacccaaaaagggcagaagaactcgcgcgagcggatgaaacggatcgaggagggcattaaagagctcgggtcccagatcctgaaggagcaccccgtggaaaatacccagctccagaatgaaaagctctacctctactacctgcagaacggccgcgacatgtacgtggaccaggagctggacattaatcggctatcggactacgacgtcgaccacatcgtgccgcagtcgttcctcaaggacgatagcatcgacaacaaggtgctcacccggtcggataaaaatcggggcaagagcgacaacgtgcccagcgaggaggtcgtgaagaagatgaaaaactactggcgccagctcctcaacgcgaaactgatcacccagcgcaagttcgacaacctgacgaaggcggaacgcggtggcttgagcgaactcgataaggcgggcttcataaaaaggcagctggtcgagacgcgccagatcacgaagcatgtcgcccagatcctggacagccgcatgaatactaagtacgatgaaaacgacaagctgatccgggaggtgaaggtgatcacgctgaagtccaagctcgtgtcggacttccgcaaggacttccagttctacaaggtccgcgagatcaacaactaccaccacgcccacgacgcctacctgaatgcggtggtcgggaccgccctgatcaagaagtacccgaagctggagtcggagttcgtgtacggcgactacaaggtctacgacgtgcgcaaaatgatcgccaagtccgagcaggagatcggcaaggccacggcaaaatacttcttctactcgaacatcatgaacttcttcaagaccgagatcaccctcgcgaacggcgagatccgcaagcgcccgctcatcgaaaccaacggcgagacgggcgagatcgtctgggataagggccgggatttcgcgacggtccgcaaggtgctctccatgccgcaagtcaatatcgtgaaaaagacggaggtccagacgggcgggttcagcaaggagtccatcctcccgaagcgcaactccgacaagctcatcgcgaggaagaaggattgggacccgaaaaaatatggcggcttcgacagcccgaccgtcgcatacagcgtcctcgtcgtggcgaaggtggagaagggcaagtcaaagaagctcaagtccgtgaaggagctgctcgggatcacgattatggagcggtcctccttcgagaagaacccgatcgacttcctagaggccaagggatataaggaggtcaagaaggacctgattattaaactgccgaagtactcgctcttcgagctggaaaacggccgcaagaggatgctcgcctccgcaggcgagttgcagaagggcaacgagctcgccctcccgagcaaatacgtcaatttcctgtacctcgctagccactatgaaaagctcaagggcagcccggaggacaacgagcagaagcagctcttcgtggagcagcacaagcattacctggacgagatcatcgagcagatcagcgagttctcgaagcgggtgatcctcgccgacgcgaacctggacaaggtgctgtcggcatataacaagcaccgcgacaaaccaatacgcgagcaggccgaaaatatcatccacctcttcaccctcaccaacctcggcgctccggcagccttcaagtacttcgacaccacgattgaccggaagcggtacacgagcacgaaggaggtgctcgatgcgacgctgatccaccagagcatcacagggctctatgaaacacgcatcgacctgagccagctgggcggagacaagagaccacgggaccgccacgatggcgagctgggaggccgcaagcgggcaaggtaggtaccgttaacctagacttgtccatcttctggattggccaacttaattaatgtatgaaataaaaggatgcacacatagtgacatgctaatcactataatgtgggcatcaaagttgtgtgttatgtgtaattactagttatctgaataaaagagaaagagatcatccatatttcttatcctaaatgaatgtcacgtgtctttataattctttgatgaaccagatgcatttcattaaccaaatccatatacatataaatattaatcatatataattaatatcaattgggttagcaaaacaaatctagtctaggtgtgttttgccccgggttaacggcaaacgctaattagtcactaggcccaggaaacactaactaagccctagcttatcctagcgcaacctagttaggtcttccccaagtttgtacaaaaaagcaggctccggccagaatggcccggaccgggttaccgaattcgagctcggtaccctgggatccgatatcgatgggccctggccgaagctttgagagtacaatgatgaacctagattaatcaatgccaaagtctgaaaaatgcaccctcagtctatgatccagaaaatcaagattgcttgaggccctgttcggttgttccggattagagccccggattaattcctagccggattacttctctaatttatatagattttgatgagctggaatgaatcctggcttattccggtacaaccgaacaggccctgaaggataccagtaatcgctgagctaaattggcatgctgtcagagtgtcagtattgcagcaaggtagtgagataaccggcatcatggtgccagtttgatggcaccattagggttagagatggtggccatgggcgcatgtcctggccaactttgtatgatatatggcagggtgaataggaaagtaaaattgtattgtaaaaagggatttcttctgtttgttagcgcatgtacaaggaatgcaagttttgagcgagggggcatcaaagatctggctgtgtttccagctgtttttgttagccccatcgaatccttgacataatgatcccgcttaaataagcaacctcgcttgtatagttccttgtgctctaacacacgatgatgataagtcgtaaaatagtggtgtccaaagaatttccaggcccagttgtaaaagctaaaatgctattcgaatttctactagcagtaagtcgtgtttagaaattatttttttatataccttttttccttctatgtacagtaggacacagtgtcagcgccgcgttgacggagaatatttgcaaaaaagtaaaagagaaagtcatagcggcgtatgtgccaaaaacttcgtcacagagagggccataagaaacatggcccacggcccaatacgaagcaccgcgacgaagcccaaacagcagtccgtaggtggagcaaagcgctgggtaatacgcaaacgttttgtcccaccttgactaatcacaagagtggagcgtaccttataaaccgagccgcaagcaccgaattgcccaaaacgctttcccgatgttttagagctagaaatagcaagttaaaataaggctagtccgttatcaacttgaaaaagtggcaccgagtcggtgctttttttttgcggccgcgaattcctgcagggccctcttgtcggaccagttgcccaccacgttggtgaggggcacccagctttcttgtacaaagtggccgttaacggatcggccagaatggcccggaccgggttaccgaattcgagctcggtaccctgggatccgatatcgatgggccctggccgaagctttgagagtacaatgatgaacctagattaatcaatgccaaagtctgaaaaatgcaccctcagtctatgatccagaaaatcaagattgcttgaggccctgttcggttgttccggattagagccccggattaattcctagccggattacttctctaatttatatagattttgatgagctggaatgaatcctggcttattccggtacaaccgaacaggccctgaaggataccagtaatcgctgagctaaattggcatgctgtcagagtgtcagtattgcagcaaggtagtgagataaccggcatcatggtgccagtttgatggcaccattagggttagagatggtggccatgggcgcatgtcctggccaactttgtatgatatatggcagggtgaataggaaagtaaaattgtattgtaaaaagggatttcttctgtttgttagcgcatgtacaaggaatgcaagttttgagcgagggggcatcaaagatctggctgtgtttccagctgtttttgttagccccatcgaatccttgacataatgatcccgcttaaataagcaacctcgcttgtatagttccttgtgctctaacacacgatgatgataagtcgtaaaatagtggtgtccaaagaatttccaggcccagttgtaaaagctaaaatgctattcgaatttctactagcagtaagtcgtgtttagaaattatttttttatataccttttttccttctatgtacagtaggacacagtgtcagcgccgcgttgacggagaatatttgcaaaaaagtaaaagagaaagtcatagcggcgtatgtgccaaaaacttcgtcacagagagggccataagaaacatggcccacggcccaatacgaagcaccgcgacgaagcccaaacagcagtccgtaggtggagcaaagcgctgggtaatacgcaaacgttttgtcccaccttgactaatcacaagagtggagcgtaccttataaaccgagccgcaagcaccgaattgcaatataaaattaccgatgttttagagctagaaatagcaagttaaaataaggctagtccgttatcaacttgaaaaagtggcaccgagtcggtgctttttttttgcggccgcgaattcctgcagggccctcttgtcggaccagttgcccaccacgttggtgaggggcaactttattatacaaagttgatagatatcatttaaatcctaaggacccggcggaccgattaaactgattcggtccgacgcgttacctaataacttcgtatagcatacattatacgaagttattagctaactaactagtaagcttaagccatgggtcgacggatccgttaactcacttaagatgtactcgacaatggtgccctcataccggcatgtgtttcctagaaataatcaatatattgattgagatttatctcgatatatttctgaactatgttcatcatataaataactgaaaacatcaaatcgtaattttaaactcatgcttggtcaatacatagataatacaatattacttcatcatcccaatgatgtcctagcacaacctattgaatgttaatgtttggttgtgtgggggtgtgtttataacatagatgtgattatttgtgctttttgttgagtatatacatatatggtatgttgatttgatatagtgatggacacatgctttggccttggatattcaaatcacttgtacttgcacgaagcaaaacataatataagtttagaagtaaacttgtaactgtgtccaaacatgctcacacaaagtcatatcgcattatatttttttggtaaatattcaacacatgtattttttacaagaacccaaattttacagacaaatgcagcattgtagacatgtagaattctttgaagcatgtgaacttaacaacactaatgtcattaaatcaactggaccctatgagtaacaatttcgatattgcaaacaccaaattatggaacttatttgctgaaaaaattatgatcaatgtgaagtttaaattattataccataaatatatcaaagattttttttgaggaaggtaaaaattgcatggaatgggctgcccaacgtgatagctcacttttatgctaggtagcattaccaaagatgggaatgttctgatgaacaccaaacccactcaaataatatttatatttgggttgtttagttgtaaaagtgaagacccaagattaaagtaccaattgtcgatgccatacactagaagtgaagaatgttgttagcgttaggagtagatgtgtcaatggggaccgatactcgttatcgatgggccgcacgtaagcttgcatgcctgcagtgcagcgtgacccggtcgtgcccctctctagagataatgagcattgcatgtctaagttataaaaaattaccacatattttttttgtcacacttgtttgaagtgcagtttatctatctttatacatatatttaaactttactctacgaataatataatctatagtactacaataatatcagtgttttagagaatcatataaatgaacagttagacatggtctaaaggacaattgagtattttgacaacaggactctacagttttatctttttagtgtgcatgtgttctcctttttttttgcaaatagcttcacctatataatacttcatccattttattagtacatccatttagggtttagggttaatggtttttatagactaatttttttagtacatctattttattctattttagcctctaaattaagaaaactaaaactctattttagtttttttatttaataatttagatataaaatagaataaaataaagtgactaaaaattaaacaaataccctttaagaaattaaaaaaactaaggaaacatttttcttgtttcgagtagataatgccagcctgttaaacgccgtcgacgagtctaacggacaccaaccagcgaaccagcagcgtcgcgtcgggccaagcgaagcagacggcacggcatctctgtcgctgcctctggacccctctcgagagttccgctccaccgttggacttgctccgctgtcggcatccagaaattgcgtggcggagcggcagacgtgagccggcacggcaggcggcctcctcctcctctcacggcaccggcagctacgggggattcctttcccaccgctccttcgctttcccttcctcgcccgccgtaataaatagacaccccctccacaccctctttccccaacctcgtgttgttcggagcgcacacacacacaaccagatctcccccaaatccacccgtcggcacctccgcttcaaggtacgccgctcgtcctcccccccccccctctctaccttctctagatcggcgttccggtccatgcatggttagggcccggtagttctacttctgttcatgtttgtgttagatccgtgtttgtgttagatccgtgctgctagcgttcgtacacggatgcgacctgtacgtcagacacgttctgattgctaacttgccagtgtttctctttggggaatcctgggatggctctagccgttccgcagacgggatcgatttcatgattttttttgtttcgttgcatagggtttggtttgcccttttcctttatttcaatatatgccgtgcacttgtttgtcgggtcatcttttcatgcttttttttgtcttggttgtgatgatgtggtctggttgggcggtcgttctagatcggagtagaattctgtttcaaactacctggtggatttattaattttggatctgtatgtgtgtgccatacatattcatagttacgaattgaagatgatggatggaaatatcgatctaggataggtatacatgttgatgcgggttttactgatgcatatacagagatgctttttgttcgcttggttgtgatgatgtggtgtggttgggcggtcgttcattcgttctagatcggagtagaatactgtttcaaactacctggtgtatttattaattttggaactgtatgtgtgtgtcatacatcttcatagttacgagtttaagatggatggaaatatcgatctaggataggtatacatgttgatgtgggttttactgatgcatatacatgatggcatatgcagcatctattcatatgctctaaccttgagtacctatctattataataaacaagtatgttttataattattttgatcttgatatacttggatgatggcatatgcagcagctatatgtggatttttttagccctgccttcatacgctatttatttgcttggtactgtttcttttgtcgatgctcaccctgttgtttggtgttacttctgcaggtcgactctagaggatccaccatggttgaacaagatggattgcacgcaggttctccggccgcttgggtggagaggctattcggctatgactgggcacaacagacaatcggctgctctgatgccgccgtgttccggctgtcagcgcaggggcgcccggttctttttgtcaagaccgacctgtccggtgccctgaatgaactgcaggacgaggcagcgcggctatcgtggctggccacgacgggcgttccttgcgcagctgtgctcgacgttgtcactgaagcgggaagggactggctgctattgggcgaagtgccggggcaggatctcctgtcatctcaccttgctcctgccgagaaagtatccatcatggctgatgcaatgcggcggctgcatacgcttgatccggctacctgcccattcgaccaccaagcgaaacatcgcatcgagcgagcacgtactcggatggaagccggtcttgtcgatcaggatgatctggacgaagagcatcaggggctcgcgccagccgaactgttcgccaggctcaaggcgcgcatgcccgacggcgatgatctcgtcgtgacccatggcgatgcctgcttgccgaatatcatggtggaaaatggccgcttttctggattcatcgactgtggccggctgggtgtggcggaccgctatcaggacatagcgttggctacccgtgatattgctgaagagcttggcggcgaatgggctgaccgcttcctcgtgctttacggtatcgccgctcccgattcgcagcgcatcgccttctatcgccttcttgacgagttcttctgaggatccaccatggttaacctagacttgtccatcttctggattggccaacttaattaatgtatgaaataaaaggatgcacacatagtgacatgctaatcactataatgtgggcatcaaagttgtgtgttatgtgtaattactagttatctgaataaaagagaaagagatcatccatatttcttatcctaaatgaatgtcacgtgtctttataattctttgatgaaccagatgcatttcattaaccaaatccatatacatataaatattaatcatatataattaatatcaattgggttagcaaaacaaatctagtctaggtgtgttttgcgaatgcgaccttcttatgtgcttctagtctccaaatgtggttgatagttattttgctctaagatcaacagtaatgaagtataaatcatcgttgtggtgtgctactcggttaattgagcattaacacacacaaacatgacgaggatggtataatctccaaaaatgtgtactttgttaggtgggaccctatagccttgattaatgtgctatgttaggcatgcctggaaacgtgtgacgcatatgttttgtgaacctgttgatattatatgtgcttttatattaccatattttattaaaatactaatatttattactagtaagatataacattctatctagcttaaaaactaaccataaatattccataataactagatttaccaaactaatatactaaatatacataataaatacaaaattaacaagacaataatcaatatttatgagcttaatatatttagacattatggttggtcgacgataatcatgctaacttttcgtaattgcttgattgaaatatgcttagaataatgcctctttgttctacatggcaaatagggaccattatggtgtaacaccctgggaaccacaaacaccccgaaatgctactaaactacacaactaaccttcatatataaaatttcgacagcatctcctttgaaaatttgcatagacgtggaagcaacagagtataaacagatatcatgataagaaaacatactagacattaataatctgctagaaatgggaagaatcctaacttgacgactgcgtaactgactagagtcacacttagctgaccctagtcacttactgcccttaaggccaattgttcaagattcattcaacaattgaaacatctcccatgattaaatcagtataaggttgctatggtcttgcttgacaaagtttttttttgagggaatttcaactaaatttttgagtgaaactatcaaatactgattttaaaaaatttttataaaaggaagcgcagagataaaaggccatctatgctacaaaagtacccaaaaatgtaatcctaaagtatgaattgcattttttttttgtttggacgaaaggaaaggagtattaccacaagaatgatatcatcttcatatttagatcttttttgggtaaagcttgagattctctaaatatagagaaatcagaagaaaaaaaaaccgtgttttggtggttttgatttctagcctccacaataactttgacggcgtcgacaagtctaacggacaccaagcagcgaaccaccagcgccgagccaagcgaagcagacggccgagacgttgacaccttcggcgcggcatctctcgagagttccgctccggcgctccacctccaccgctggcggtttcttattccgttccgttccgcctcctgctctgctcctctccacaccacacggcacgaaaccgttacggcaccggcagcacccagcacgggagaggggattcctttcccaccgttccttccctttccgccccgccgctataaatagccagccccatccccagcttttttccccaatctcatctcctctctcctgttgttcggagcacacgcacaatccgatcgatccccaaatccccttcgtctctcctcgcgagcctcgtggatcccagcttcaaggtacggcgatcgatcatcccccctccttctctctaccttcttttctctagactacatcggatggcgatccatggttagggcctgctagtttcccttcctgttttgtcgatggctgcgaggcacaatagatctgatggcgttatgacggctaacttgtcatgttgttgcgatttatagtccctttaggagatcagtttaatttctcggatggttcgagatcggtggtccatggttagtaccctaagatccgcgctgttagggttcgtagatggaggcgacctgttctgattgttaacttgtcagtacctgggaaatcctgggatggttctagctcgtccgcagatgagatcgatttcatgatcctctgtatcttgtttcgttgcctaggttccgtctaatctatccgtggtatgatgtagatgttttgatcgtgctaactacgtcttgtaaagttaattgtcaggtcataatttttagcatgcctttttttttgtttggttttgtctaattgggctgtcgttctagatcagagtagaagactgttccaaactacctgctggatttattgaacttggatctgtatgtgtgtcacatatcttcataaattcatgattaagatggattgaaatatcttttatctttttggtatggatagttctatatgttggtgtggctttgttagatgtatacatgcttagatacatgaagcaacgtgctgctactgtttagtaattgctgttcatttgtctaataaacagataaggatatgtatttatgttgctgttggttttgctggtactttgttggatacaaatgcttcaatacagaaaacagcatgctgctacgatttaccatttatctaatcttatcatatgtctaatctaataaacaaacatgcttttaaattatcttcatatgcttggatgatggcatacacagcggctatgtgtggttttttaaatacccagcatcatgggcatgcatgacactgctttaatatgctttttatttgcttgagactgtttcttttgtttatactgaccctttagttcggtgactcttctgcaggtcgactttaacttagcctaggatccatggcccagtccaagcacggcctgaccaaggagatgaccatgaagtaccgcatggagggctgcgtggacggccacaagttcgtgatcaccggcgagggcatcggctaccccttcaagggcaagcaggccatcaacctgtgcgtggtggagggcggccccttgcccttcgccgaggacatcttgtccgccgccttcatgtacggcaaccgcgtgttcaccgagtacccccaggacatcgtcgactacttcaagaactcctgccccgccggctacacctgggaccgctccttcctgttcgaggacggcgccgtgtgcatctgcaacgccgacatcaccgtgagcgtggaggagaactgcatgtaccacgagtccaagttctacggcgtgaacttccccgccgacggccccgtgatgaagaagatgaccgacaactgggagccctcctgcgagaagatcatccccgtgcccaagcagggcatcttgaagggcgacgtgagcatgtacctgctgctgaaggacggtggccgcttgcgctgccagttcgacaccgtgtacaaggccaagtccgtgccccgcaagatgcccgactggcacttcatccagcacaagctgacccgcgaggaccgcagcgacgccaagaaccagaagtggcacctgaccgagcacgccatcgcctccggctccgccttgccctccggactcagatctcgatagggtaccaatggccagttaacagatccagctgctgctgttctagggttcacaagtctgcctatttgtcttccccaatggagctatggttgtctggtctggtccttggtcgtgtcccgtttcattgtgtactatttacctgtaatgtgtatccttaagtctggtttgatggtgtctgaaacgttttgctgtggtagagcagcatggaagaactataatgaataagtgatccctaatcattgtgtccaaattttgcttctgctatacccttttgtgctgtttcttatgttttgcttaaaaatttgatctgacaaacaaatttgtctaaattatgctcttgttctgactgtgtactgtacacatttgtattgctaccggtttggcacatagttttctctttgattgcagatcaaacccttctgattgcagattgcttggctatggctgatgtgctcactgttcttctttagcttgtatattgctgatggtggcttggctacggctgaaaaagttgctgctgcgccgacttggcaactgttgctccagtaatgctttgtcctctcttcctagccgccgacttggcacttggcagctgttgctcctgtaatgcgttgttatctcttatctcttgagatgtactatgattttgaggctgtttgacttgtgccagattgccagtgctgatgctatattatctcaggtttttatgctagtatatgttttactgtgtgctgcctgtgtcgagttacgtaatctattgaaccgctatgcgtgttgatgccctgttgttgcttgccagattgatgcccctgttgcttgcagcttgcaagctgtagtgaaatcctaaaattcgaaaccaaatctattctgaacttttgaagatctgtgatgtccggaagaaaagattcaaacagataaacgggactctccagaatctataaaataaatgatcgacaaacgctttgctttggtaggcttcctagttagttagcggaccgaagcttcggttgtttctgtggccgaattcaatcactagagtcgacctgcatgattccgatgacttcgtaggttcctagctcaagccgctcgtgtccaagcgtcacttacgattagctaatgattacggcatctaggaccgactagctagctagctaagagctcggtaccgagctcgaattcattccgattaatcgtggcctcttgctcttcaggatgaagagctatgtttaaacgtgcaagcgctactagacaattcagtacattaaaaacgtccgcaatgtgttattaagttgtctaagcgtcaatttgtttacaccacaatatatcctgcca

SEQ ID NO: 85 - DNA, 26047 bp, Artificial sequence
  PHP98248
gtttacccgccaatatatcctgtcaaacactgatagtttaaactgaaggcgggaaacgacaatctgatcatgagcggagaattaagggagtcacgttatgacccccgccgatgacgcgggacaagccgttttacgtttggaactgacagaaccgcaacgttgaaggagccactcagcaagctggtacgattgtaatacgactcactatagggcgaattgagcgctgtttaaacgctcttcaactggaagagcggttacgctgtttaaacgctcttcaactggaagagcggttactaccggttcactagctagctgctaatcgagctagttaccctatgaggtgacatgaagcgctcacggttactatgacggttagcttcacgactgttggtggcagtagcgtacgacttagctatagttccggacttacccttaagcgatttaaatctgcggttaccgaattcgagctcggtacctagtacccttgtacttttggtttcacctgcatagagaaaacccacaagaatatgacagtctgatttgtcagtctcattctcaagcaacatttctctatccgttactttcatggtgaataacacaatccatcatcaatactttgtgttactcagaaactgaaagttattccgagtcttgcatatctttggacctactcgtttttctaccattattgctgattgttaagctctcgctacttgaatcggcattgttggagtgggaaggttcaaaaaattggagttatgactagttgtctctttctatgtacgatggagaaaatgaataaacaactgagaaaatggctcttgtttagttgatgatgctcttaagctttccactggttgccatatatgatttgggcatttcactttgatcttaatgggccttgtaaagcccaagactcatgattatctttagttgatgctcttaattaggtgtgggcaaataattcaaactgtatgtacccgaccaaaaccaaagcaaaaataatcgaaccaaaccgaaaatttaaaaataaccgaatgaaaactaaatcctataactgaaagaactgaaaccgaatcaaaatatttaatgtaaccaaaaatatccgaaatataattatattgtcaaaaatattaataatttctagattaaataattaaaaatacttaaaaatttatataaaatagtaaaaatactcgaaaataaccacaaatattcaaaaacaaccgaaatatcccaaaatattcaaagcaaaataaccgaatggataccaaattttaaaaccgaaaaaactggaacaaaaccaaaatcgaaccaaaatttcaaaaatcgaataaatactaaactttagaacaaaaaaaaacgataaccgaatgtatacgaaccaaagccgaattagataaccgaacgtccaggactactcttaatctttccgccacttatgatttgggctattactttgtttataatgagccttttcaagctcaagttcatgattgtccgtgagatgagaaactgacttgttggattcgaaaccctagctagtattggttaatacttaatacataaatgacctgcattgacatcatcatccaagaaaataaaaattgtatgcttgagatatttagttttcctagctaggttttctttattttagtaccgaatctttaggtgtgccacgttaatttagacccattttttcatacttaccaactgagtctagtttaatcatgactataatcgtataaaatgattcagtcgacgtcattgcgaacgtatataaaatcatccaaattgacgtcattccaaagaggtaagcatgcttatctaagagtccgagcatactaaacaagacgacattttatttgcactccaaatcaaattttgtattgcctaaagaaaaacaatcaaactcaagtttcttaaaattaatttcattcaaactaatcactttcaatatctcacatattattcatgccatttctatttgtctaaacatgatttaaaaaaaaaagtaaaatacaaagattactatgcaaaaactctataaaaaaaaattcaaatttcttatttatttgtgacatcaaattttcaaaataatttttttaattatcggttgatccggtcagtcgataaaaacataaactttcagcgaccgttaaaactttcctactaccgatttagagaaaatcttagcttgaaacgtaattgtaacctgccttcatgcaagtcgcaagatatgtcatcctaagttgtatatgttttctcaaaagatgtatttacttgagaaaatacgtttcaacgttgatggacaaccaattaagaatcaagcacctttcgtaatcaatttaggcttatcgtctaaggtatactgatttacgacagttgactagacttataaggaacaaaataatagaatagtttctaaacacttcacctaatcatagagactaagatggtaattcgtaaacgacaaagcctagtgacactgtccattgtaaaattccacatcatattagtattaaacatatacatgtagtttcctgaacacatgtagtatcaaacacacttcgtggcttcttcctcgaaacctgcggccgcgctatagttccggacttacccttaagataacttcgtatagcatacattatacgaagttatgggcccacgcgtgaagagcggttaccagagctggtcacctttgtccaccaagatggaactgtcttcggccagaatggccatctggattcagcaggcctagaaggccatttatcgctatcaactttgtatagaaaagttgggccgagctcggtacggccagaatggcccggaccgggttaccaagcggccgcacactgatagtttaaactgaaggcgggaaacgacaatctgatcatgagcggagaattaagggagtcacgttatgacccccgccgatgacgcgggacaagccgttttacgtttggaactgacagaaccgcaacgattgaaggagccactcagccgcgggtttctggagtttaatgagctaagcacatacgtcagaaaccattattgcgcgttcaaaagtcgcctaaggtcactatcagctagcaaatatttcttgtcaaaaatgctccactgacgttccataaattcccctcggtatccaattagagtctcatattcactcccatggcggccaatgcgggcggcggtggagcgggaggaggcagcggcagcggcagcgtggctgcgccggcggtgtgccgccccagcggctcgcggtggacgccgacgccggagcagatcaggatgctgaaggagctctactacggctgcggcatccggtcgcccagctcggagcagatccagcgcatcaccgccatgctgcggcagcacggcaagatcgagggcaagaacgtcttctactggttccagaaccacaaggcccgcgagcgccagaagcgccgcctcaccagcctcgacgtcaacgtgcccgccgccggcgcggccgacgccaccaccagccaactcggcgtcctctcgctgtcgtcgccgccgccttcaggcgcggcgcctccctcgcccaccctcggcttctacgccgccggcaatggcggcggatcggctgtgctgctggacacgagttccgactggggcagcagcggcgctgctatggccaccgagacatgcttcctgcaggactacatgggcgtgacggacacgggcagctcgtcgcagtggccacgcttctcgtcgtcggacacgataatggcggcggccgcggcgcgggcggcgacgacgcgggcgcccgagacgctccctctcttcccgacctgcggcgacgacggcggcagcggtagcagcagctacttgccgttctggggtgccgcgtccacaactgccggcgccacttcttccgttgcgatccaacagcaacaccagctgcaggagcagtacagcttttacagcaacagcaacagcacccagctggccggcaccggcaaccaagacgtatcggcaacagcagcagcagccgccgccctggagctgagcctcagctcatggtgctccccttaccctgctgcagggagtatgtgagagcaacgcgagctgccactgctcttcactgatgtctctggaatggaaggaggaggaagtgagaacagatcattcgacaaagcagcattagtccgttgatcggtggaagaccactcgtcagtgttgagttgaatgtttgatcaataaaatacggcaatgctgtaagggttgttttttatgccattgataatacactgtactgttcagttgttgaactctatttcttagccatgccaagtgcttttcttattttgaataacattacagcaaaaagttgaaagacaaaaaaaaaaacccccgaacagagtgctttgggtcccaagcttctttagactgtgttcggcgttccccctaaatttctccccctatatctcactcacttgtcacatcagcgttctctttccccctatatctccacgctctacagcagttccacctatatcaaacctctataccccaccacaacaatattatatactttcatcttcaactaactcatgtaccttccaatttttttctactaataattatttacgtgcacagaaacttagcaaggagagagagagcgggaatttaaatgctcggcgttaggcttttagtccgctaggtggctagaccgaggttaggacgctagttcactaggggcctagtggtgttttaagacgtcacggtcaccacgcgtggaccgaagcttgcatgcctgcagtgcagcgtgacccggtcgtgcccctctctagagataatgagcattgcatgtctaagttataaaaaattaccacatattttttttgtcacacttgtttgaagtgcagtttatctatctttatacatatatttaaactttactctacgaataatataatctatagtactacaataatatcagtgttttagagaatcatataaatgaacagttagacatggtctaaaggacaattgagtattttgacaacaggactctacagttttatctttttagtgtgcatgtgttctcctttttttttgcaaatagcttcacctatataatacttcatccattttattagtacatccatttagggtttagggttaatggtttttatagactaatttttttagtacatctattttattctattttagcctctaaattaagaaaactaaaactctattttagtttttttatttaataatttagatataaaatagaataaaataaagtgactaaaaattaaacaaataccctttaagaaattaaaaaaactaaggaaacatttttcttgtttcgagtagataatgccagcctgttaaacgccgtcgacgagtctaacggacaccaaccagcgaaccagcagcgtcgcgtcgggccaagcgaagcagacggcacggcatctctgtcgctgcctctggacccctctcgagagttccgctccaccgttggacttgctccgctgtcggcatccagaaattgcgtggcggagcggcagacgtgagccggcacggcaggcggcctcctcctcctctcacggcaccggcagctacgggggattcctttcccaccgctccttcgctttcccttcctcgcccgccgtaataaatagacaccccctccacaccctctttccccaacctcgtgttgttcggagcgcacacacacacaaccagatctcccccaaatccacccgtcggcacctccgcttcaaggtacgccgctcgtcctcccccccccccctctctaccttctctagatcggcgttccggtccatgcatggttagggcccggtagttctacttctgttcatgtttgtgttagatccgtgtttgtgttagatccgtgctgctagcgttcgtacacggatgcgacctgtacgtcagacacgttctgattgctaacttgccagtgtttctctttggggaatcctgggatggctctagccgttccgcagacgggatcgatttcatgattttttttgtttcgttgcatagggtttggtttgcccttttcctttatttcaatatatgccgtgcacttgtttgtcgggtcatcttttcatgcttttttttgtcttggttgtgatgatgtggtctggttgggcggtcgttctagatcggagtagaattctgtttcaaactacctggtggatttattaattttggatctgtatgtgtgtgccatacatattcatagttacgaattgaagatgatggatggaaatatcgatctaggataggtatacatgttgatgcgggttttactgatgcatatacagagatgctttttgttcgcttggttgtgatgatgtggtgtggttgggcggtcgttcattcgttctagatcggagtagaatactgtttcaaactacctggtgtatttattaattttggaactgtatgtgtgtgtcatacatcttcatagttacgagtttaagatggatggaaatatcgatctaggataggtatacatgttgatgtgggttttactgatgcatatacatgatggcatatgcagcatctattcatatgctctaaccttgagtacctatctattataataaacaagtatgttttataattattttgatcttgatatacttggatgatggcatatgcagcagctatatgtggatttttttagcactgccttcatacgctatttatttgcttggtactgtttcttttgtcgatgctcaccctgttgtttggtgttacttctgcaggtcgactttaacttagcctaggatccatggccactgtgaacaactggctcgctttctccctctccccgcaggagctgccgccctcccagacgacggactccacactcatctcggccgccaccgccgaccatgtctccggcgatgtctgcttcaacatcccccaagattggagcatgaggggatcagagctttcggcgctcgtcgcggagccgaagctggaggacttcctcggcggcatctccttctccgagcagcatcacaaggccaactgcaacatgatacccagcactagcagcacagtttgctacgcgagctcaggtgctagcaccggctaccatcaccagctgtaccaccagcccaccagctcagcgctccacttcgcggactccgtaatggtggcttcctcggccggtgtccacgacggcggtgccatgctcagcgcggccgccgctaacggtgtcgctggcgctgccagtgccaacggcggcggcatcgggctgtccatgattaagaactggctgcggagccaaccggcgcccatgcagccgagggtggcggcggctgagggcgcgcaggggctctctttgtccatgaacatggcggggacgacccaaggcgctgctggcatgccacttctcgctggagagcgcgcacgggcgcccgagagtgtatcgacgtcagcacagggtggagccgtcgtcgtcacggcgccgaaggaggatagcggtggcagcggtgttgccggcgctctagtagccgtgagcacggacacgggtggcagcggcggcgcgtcggctgacaacacggcaaggaagacggtggacacgttcgggcagcgcacgtcgatttaccgtggcgtgacaaggcatagatggactgggagatatgaggcacatctttgggataacagttgcagaagggaagggcaaactcgtaagggtcgtcaagtctatttaggtggctatgataaagaggagaaagctgctagggcttatgatcttgctgctctgaagtactggggtgccacaacaacaacaaattttccagtgagtaactacgaaaaggagctcgaggacatgaagcacatgacaaggcaggagtttgtagcgtctctgagaaggaagagcagtggtttctccagaggtgcatccatttacaggggagtgactaggcatcaccaacatggaagatggcaagcacggattggacgagttgcagggaacaaggatctttacttgggcaccttcagcacccaggaggaggcagcggaggcgtacgacatcgcggcgatcaagttccgcggcctcaacgccgtcaccaacttcgacatgagccgctacgacgtgaagagcatcctggacagcagcgccctccccatcggcagcgccgccaagcgcctcaaggaggccgaggccgcagcgtccgcgcagcaccaccacgccggcgtggtgagctacgacgtcggccgcatcgcctcgcagctcggcgacggcggagccctggcggcggcgtacggcgcgcactaccacggcgccgcctggccgaccatcgcgttccagccgggcgccgccagcacaggcctgtaccacccgtacgcgcagcagccaatgcgcggcggcgggtggtgcaagcaggagcaggaccacgcggtgatcgcggccgcgcacagcctgcaggacctccaccacctgaacctgggcgcggccggcgcgcacgactttttctcggcagggcagcaggccgccgccgctgcgatgcacggcctgggtagcatcgacagtgcgtcgctcgagcacagcaccggctccaactccgtcgtctacaacggcggggtcggcgacagcaacggcgccagcgccgtcggcggcagtggcggtggctacatgatgccgatgagcgctgccggagcaaccactacatcggcaatggtgagccacgagcaggtgcatgcacgggcctacgacgaagccaagcaggctgctcagatggggtacgagagctacctggtgaacgcggagaacaatggtggcggaaggatgtctgcatgggggactgtcgtgtctgcagccgcggcggcagcagcaagcagcaacgacaacatggccgccgacgtcgggcatggcggcgcgcagctcttcagtgtctggaacgacacttaagcgtacctagtggtacctgacatcttatagtctgcaacctctcgtgtctgaattcctatctttatcaagtgttattgcttccacgactataggacagctttcgtcgaaagcttttgctcatgtgatctcgaaggattcatctagtctgatttttcgtgacttgtatcggttttattggattcatccaacatatatcaataaaaaatgagttgtgtttcctttcttcctagttcagttaaaattatttccctcctgcgcttgtgctgtaattgtctgtgtacctgttgtttgtgactgtgttagttcccttggatatgatttcgtatttgatatgtacatggagatagcttagcttcattattggagtatgaagttagtatgacatagtcactctcctggaaaattgacactgcaaaccatatttttattctgaaccacaaatcctagtcagtccgctggcatatgccgtccgtttgctgaatccagaacgtgggtttggagatgtacggctgagatgcctctatgcgaaggggatttcgtggtgaaacgagatgggagtagagcaacgcccgtggaagatgcttcaaacttccacacttttgagcaacgatcggcagtagtaaggtagacgatttcaagatcaaagcatatgaagataaacaacatcaacaacaaaatttgttggggttctatagagagaaacagagctacatacatacactgttttgtatctaccatctgagatgatgaaaagatgaaaaactaaagaatgccccggcgccaacgccaggacacgccgcgcgcgcgtcacccgagccatctcttgacccagccggcgctgtatatttacacacgttgcagcatcgatcaccacctgttcgatcgcgtcgccgtcaccggcgcgccgcgacttattgaactagtctagggcgcggctaacaacctagcttagattgccttgtctaaacccttaggctaacgcgccacggtaacccggtccgggcctagaaggccccagagctggtcaccccatacgattggaagcttcaagtttgtacaaaaaagcaggctccggccagagttacccggaccgaagcttgcatgcctgcagtgcagcgtgacccggtcgtgcccctctctagagataatgagcattgcatgtctaagttataaaaaattaccacatattttttttgtcacacttgtttgaagtgcagtttatctatctttatacatatatttaaactttactctacgaataatataatctatagtactacaataatatcagtgttttagagaatcatataaatgaacagttagacatggtctaaaggacaattgagtattttgacaacaggactctacagttttatctttttagtgtgcatgtgttctcctttttttttgcaaatagcttcacctatataatacttcatccattttattagtacatccatttagggtttagggttaatggtttttatagactaatttttttagtacatctattttattctattttagcctctaaattaagaaaactaaaactctattttagtttttttatttaataatttagatataaaatagaataaaataaagtgactaaaaattaaacaaataccctttaagaaattaaaaaaactaaggaaacatttttcttgtttcgagtagataatgccagcctgttaaacgccgtcgacgagtctaacggacaccaaccagcgaaccagcagcgtcgcgtcgggccaagcgaagcagacggcacggcatctctgtcgctgcctctggacccctctcgagagttccgctccaccgttggacttgctccgctgtcggcatccagaaattgcgtggcggagcggcagacgtgagccggcacggcaggcggcctcctcctcctctcacggcaccggcagctacgggggattcctttcccaccgctccttcgctttcccttcctcgcccgccgtaataaatagacaccccctccacaccctctttccccaacctcgtgttgttcggagcgcacacacacacaaccagatctcccccaaatccacccgtcggcacctccgcttcaaggtacgccgctcgtcctcccccccccccctctctaccttctctagatcggcgttccggtccatgcatggttagggcccggtagttctacttctgttcatgtttgtgttagatccgtgtttgtgttagatccgtgctgctagcgttcgtacacggatgcgacctgtacgtcagacacgttctgattgctaacttgccagtgtttctctttggggaatcctgggatggctctagccgttccgcagacgggatcgatttcatgattttttttgtttcgttgcatagggtttggtttgcccttttcctttatttcaatatatgccgtgcacttgtttgtcgggtcatcttttcatgcttttttttgtcttggttgtgatgatgtggtctggttgggcggtcgttctagatcggagtagaattctgtttcaaactacctggtggatttattaattttggatctgtatgtgtgtgccatacatattcatagttacgaattgaagatgatggatggaaatatcgatctaggataggtatacatgttgatgcgggttttactgatgcatatacagagatgctttttgttcgcttggttgtgatgatgtggtgtggttgggcggtcgttcattcgttctagatcggagtagaatactgtttcaaactacctggtgtatttattaattttggaactgtatgtgtgtgtcatacatcttcatagttacgagtttaagatggatggaaatatcgatctaggataggtatacatgttgatgtgggttttactgatgcatatacatgatggcatatgcagcatctattcatatgctctaaccttgagtacctatctattataataaacaagtatgttttataattattttgatcttgatatacttggatgatggcatatgcagcagctatatgtggatttttttagccctgccttcatacgctatttatttgcttggtactgtttcttttgtcgatgctcaccctgttgtttggtgttacttctgcaggtcgactttaacttagcctaggatccatgatgatgatgagcagcggccgggcgggcggcggggccaccgcggggcgatacccgttcacggcgtcgcagtggcaggagctggagcaccaggcgctcatctacaagtgcctggcgtccggcaagcccatcccttcctacctcatgccgccgctccgccgcatcctcgactccgccctcgccacgtcgccgtccctcgcctacccgccgcaaccctcactgggctggggctgcttcgggatgggcttcacccggaaggccgacgaggacccggagcccgggcggtgccggcgcacggacggcaagaagtggcgctgctccaaggaggcgtacccggactccaagtactgcgagaagcacatgcaccggggcaagaaccgttcaagaaagcctgtggaaatgtccttggccacgccggccccggcgccggcccccgccgccgccacaaccgccaccgccacctcatccccggcgccgtcctaccaccgcccggcccacgacgccacgccgtctccgtaccacgcgctgtatggaggcggcggcggcggcggcggtagcccttactcggcgtcggcacgcccaggagcaaccggaggcggcggcgcgtaccaccacgcgcagcatgtgagccccttccacctccacctcgagaccacccacccgcacccgccgccgccctacaactactccgccgaccagagggactacgcgtacgggcacgcggccgccaaggaggtcggcgagcacgccttcttctcggacggcgcgggcgagcgggtcgaccggcaggccgcggcggggcagtggcagttcaggcagctcggggtggagacgaagccgggccccacgccgctgttccccgtcgccgggtacgggcacggcgcggcgtcgccgtacggcgtggagatgggcaaggacgacgacgagcaggaggagaggcgccgccagcactgcttcgttcttggagccgacctgcggctggagcggccgtcgtcgggccatggccatggccatgaccatgacgacgccgccgccgcgcagaagccgctccggcccttcttcgacgagtggccgcaccagaagggggacaaggccgggtcgtggatggggctcgacggcgagacgcagctctccatgtccatccccatggccgccaccgacctccccgtcacctcccgcttccgtaacgacgagtgaggtaccgttaacagatctactaactatctatactgtaataatgttgtatagccgccggatagctagctagtttagtcattcagcggcgatgggtaataataaagtgtcatccatccatcaccatgcgtggcaacgtgagcaatgacctgattgaacaaattgaaatgaaaagaagaaatatgttatatgtcaacgagatttcctcataatgccactgacgacgtgtgtccaagaaatgtatcagtgatacgtatattcacaatttttttatgacttatactcacaatttgtttttttactacttatactcacaatttgttgtgcgtaccataacaatttcgatcgaatatatatcagaaagttgacgaaagtaagctcactcaaaaagttaaatgggctgcggaagctgcgtcaggcccaagttttggctattctatccggtatccacgattttgatggctgagggacatatgttcgcttaagcttcggtccgggcctagaaggccgatctcccgggcacccagctttcttgtacaaagtggccgttaacggatcggccagaatggcccggaccgggttaccgaattcgagctcggtaccctggttcacaaactcaatacaacacacagtggagtagggtattacgctccggcggcccgaaccactctaaatccttgtgtcctcgtgtgctcttccaccattaatgactgtaattgcagggacacgaagagttgtagcgcttttgccaacaagatccgctatatgctagtagagtggaacctgcacagcaacaagcatccaataatctgagaataagaattatgtgtggtgatggttctcatctctgcaactcgccattttcgcgagagaaccaaatccaagttggtgaagatcatgatttgggctcatgggctggcatagtagctattacctttgcaattgtggttcgaatctatccgatattctccttttcagggagagctaatgcttatgcttattgggtattttggtttgacactgcttcacgcccaaaaaaaggcaactatgtctgagttggatatggcccaaaaaaaggcagctatgtctgagttggatatggaagtcttctttcgtttagggtgaagtaagaccaagctcatgagcttattatcttaggtcggaacaaattagttgataggcatggcacatttatcaaattataatgattttaacagaaaagcaacacctctttttcagcagcaccagctttgcaagctgcaattgacactccaagcatagtatttgctccaaactcagcctgcatttcgcacaatatcatatctatttccatttggataaaatatattttccagaaatatgggaacagaatcaagatacagaaaaaagttgtggtagtagtggtaagtggaaacacaagtacagtgaaaagatagcattatttctgaacagtcaaattaaccgaaataagtagtatcacatactgcccctaaattgactacacccaatgtaaagaattgcttgagcatattgagccatcagttgtttgtttgtgtaacggatttgacaatgcagagttcaggagcaaaaaaccgcaaaggagagaaagagggaaaggatctcctagtatcccaccttgtggcgcgccctgtcaagtgcatgatggcctggtcgatctgcgtctgctgctgcggttccatcccaacgagtgcctccgacaccttgtcgttgatcacccgcaccgcgtaggcgacccccctggcgaggaacttccgcctctcggaggccccggccgcgtcggcggcggcgccctcgagcgcgcccacgctagccgtagatgctcggtgcacggccttgttggtgtgcaactcgacctcaacggccggtgcgctacgcccgtcaaggatctggcgcgcccgcaccctcgtgatcacggtgggcgcctcccgcctcatgtggccgacgatgaaaagcgccgggttaggggccttggcgcgcaccgccgtattcagggcctcctcgctcttgcgcgagagcaggtgcttccccaggtactcctgcactgacaaggctgccacagcggtggaatttgtcctcacgacttcgccacgtcgtcctcacctccctggcttcccacgactccgccgtatcgaggtgctcggtgggtcgtcttaatccgaagtccgaactaggaagacgagacagagaggtctgaggaatgggcctcgtttgatgttgagctgaattatttttccagcataagcccaggtcttggtccatgaacaaaattactagaaacccagcccagtactacgatctaaaagagggactgccactggatagctctctctagcattctccacgctccaatacagcggcgtcgtgtctatccgggtctatccgcgaacacgtgagaactctccagaaactgctttctcctccacttcatctctctcgctttccctctataaaaagaccccttctaggaattgagggagacagcaagcaccaagcagcgatccgaagctcaatcaattcactcaaacctcttccccaaatcttcgattagatcttcgttgacaagaagactagaaccgaacctgacatgtccaacctgctcacggttcaccagaaccttccggctcttccagtggacgcgacgtccgatgaagtcaggaagaacctcatggacatgttccgcgacaggcaagcgttcagcgagcacacctggaagatgctgctctccgtctgccgctcctgggctgcatggtgcaagctgaacaacaggaagtggttccccgctgagcccgaggacgtgagggattaccttctgtacctgcaagcgcgaggtttgtttctgcttctacctttgatatatatataataattatcattaattagtagtaatataatatttcaaatatttttttcaaaataaaagaatgtagtatatagcaattgcttttctgtagtttataagtgtgtatattttaatttataacttttctaatatatgaccaaaacatggtgatgcctaggtctggcagtgaagaccatccagcaacaccttggacaactgaacatgcttcacaggcgctccggcctcccgcgccccagcgactcgaacgccgtgagcctcgtcatgcgccgcatcaggaaggaaaacgtcgatgccggcgaaagggcaaagcaggccctcgcgttcgagaggaccgatttcgaccaggtccgcagcctgatggagaacagcgacaggtgccaggacattaggaacctggcgttcctcggaattgcatacaacacgctcctcaggatcgcggaaattgcccgcattcgcgtgaaggacattagccgcaccgacggcggcaggatgcttatccacattggcaggaccaagacgctcgtttccaccgcaggcgtcgaaaaggccctcagcctcggagtgaccaagctcgtcgaacgctggatctccgtgtccggcgtcgcggacgacccaaacaactacctcttctgccgcgtccgcaagaacggggtggctgcccctagcgccaccagccaactcagcacgagggccttggaaggtattttcgaggccacccaccgcctgatctacggcgcgaaggatgacagcggtcaacgctacctcgcatggtccgggcactccgcccgcgttggagctgctagggacatggcccgcgccggtgtttccatccccgaaatcatgcaggcgggtggatggacgaacgtgaacattgtcatgaactacattcgcaaccttgacagcgagacgggcgcaatggttcgcctcctggaagatggtgactgaggtacccaacctagacttgtccatcttctggattggccaacttaattaatgtatgaaataaaaggatgcacacatagtgacatgctaatcactataatgtgggcatcaaagttgtgtgttatgtgtaattactagttatctgaataaaagagaaagagatcatccatatttcttatcctaaatgaatgtcacgtgtctttataattctttgatgaaccagatgcatttcattaaccaaatccatatacatataaatattaatcatatataattaatatcaattgggttagcaaaacaaatctagtctaggtgtgttttgcgatccgatatcgaattggccacggtaccagctgctgctgttctagggttcacaagtctgcctatttgtcttccccaatggagctatggttgtctggtctggtccttggtcgtgtcccgtttcattgtgtactatttacctgtaatgtgtatccttaagtctggtttgatggtgtctgaaacgttttgctgtggtagagcagcatggaagaactataatgaataagtgatccctaatcattgtgtccaaattttgcttctgctatacccttttgtgctgtttcttatgttttgcttaaaaatttgatctgacaaacaaatttgtctaaattatgctcttgttctgactgtgtactgtacacatttgtattgctaccggtttggcacatagttttctctttgattgcagatcaaacccttctgattgcagattgcttggctatggctgatgtgctcactgttcttctttagcttgtatattgctgatggtggcttggctacggctgaaaaagttgctgctgcgccgacttggcaactgttgctccagtaatgctttgtcctctcttcctagccgccgacttggcacttggcagctgttgctcctgtaatgcgttgttatctcttatctcttgagatgtactatgattttgaggctgtttgacttgtgccagattgccagtgctgatgctatattatctcaggtttttatgctagtatatgttttactgtgtgctgcctgtgtcgagttacgtaatctattgaaccgctatgcgtgttgatgccctgttgttgcttgccagattgatgcccctgttgcttgcagcttgcaagctgtagtgaaatcctaaaattccaaaccaaatctattctgaacttttgaagatctgtgatgtccggaagaaaagattcaaacagataaacgggactctccagaatctataaaataaatgatcgacaaacgctttgctttggtaggcttcaagcttggtcacccggtccgggcctagaaggccagcttcggccgccccgggcaactttattatacaaagttgatagataaatcagatatctggttcctaaggacccggcggaccgattaaactgattcggtccgacgcgttacctaataacttcgtatagcatacattatacgaagttattagctaactaactagtaagcttaagccatgggtcgacggatccgttaactagcgtggcatttggcaccgccgcacactatgcgagctaggagtgctagtttacagatgaaactatgaaaccaagaaaacacaattgtccgtagctagcgcgtggcgtcgtgtcaagcttcacacagtatcttcgttcttcactataaatcgcgcctgttgttcgtgagacccaccaccgtggataacagtcccctaataataagcgatcaacagcactgctgatggctgaacaccgaggcgccgccgcgcgtaaccatccgccggagcagcccgtcgtgccggcgaacgacgccttccccgaccgcgcccagcagctctgcctcgacgccgggcgcgcgctcgcgatgtgcggcgtgctcgtcgccgtccctcccgcattttacgcgtcgacgtcgcggacgacaccgcacttgccttcgtcggcttcgtcctctggatcatcggtgcgtggctgtgcctcctggcgctcacgcccttggctccacgggcggtgagggcgggcggggccgccgccagcaccttgctgatcaggtgcctgtccctttcatgaactactagcgcccgcgcccgcggccgccgggcacaagagaacacatcgatgttcgctgcgtacgtcagcaataaggcactctttgtcagtagtcgagtgcatatgttgggtgtttgccctgggagatttcaagtgttgtggccattatcccgcaggataaaaaatcggcggcttttggattgatacggaaaataacgatgtttcatgctcgtgttgtgtgtgtgacatcttgtcagccaagtttttaaccgttgctactccccctctgtgggctcagtgtgtggaccggaatacgtcgtacataggccgtagcctaagcccaatatgccgtttttcaggttggcctgtgtgacgacaagcgggtctcaaaagcccatcacgcaactggcctgcaattattggaggagagcgcgtcgagttggttccagaggctgcgtggtggggccggactctgcgacgacctctcgttcgcgtccgatttggttgccgtgagccgtgacgtaacgcctccttccgttcctccctatataagttccacccccgggtccggtttccccaagccccagtgacccccgatcccgatcgcgaaatctccgcacccgccggcaagggaccgaagcaagcctctctcccgaccgtcgcatcaaggtacgcgtccgctcgatctgtcctcttccttctcgatttgacttgctgtggtgcccgatcacgggatcagaatcgcaccagtgtagatttcgcatgttctaagatgtgttagtttccaggctaatccagttctcttgacgcccgatccgatcgagctccgtgtttatttcagcctaatcgtagtattcccctaaaatttcctcattagggggttcgcaagattgttggtcgacaggttcacttatgctcgatcgcttacttttagtcgattcatgctgcgtactattgttgccccccgtggttttatcttttctcgtgtgaaatccagtagatatagtagatatcgtagcattaggttttaattcaatcgattgattattgtatcatcaaaattgagaagttcgaatcatgcctatcatgctgcctcaaccgaaatcctgtatattgaagtttcaattcaattgattgatcattcattagattcaaccaaaatctagaaggttagatgacgcatgtcatgctgcctgcgtagtttacctttgatctgtttatgattaccttatcagtaggatatttgtgattttgggaagtagcactaactgattcatgctgacatgatgttccctttcagattatactgttgagtcctatctaattgatgctttgtatgctatatgaatacgtcatggtaaattagcagttaattagcatattagcaattgggcgtacctcatcaggattgctcttgtagatgtgtgtggtgatgtttcttgttcaattcatgttctgctttaaaagtatgtgttctctgtttgttaattaagattcatggttataatgatttggacctaattaatcagggttgcccttttagatgcgtggttacttgttgagttcatttttttcctgctatagttgtatgcgtttgttcattcatggttagatttgatttgtttcttctctattccatgccttccatatacttcaattgtagcttaacatgagatttctgtatatgcaggtcgaccgccggggatccacacgacaccatggcccagtccaagcacggcctgaccaaggagatgaccatgaagtaccgcatggagggctgcgtggacggccacaagttcgtgatcaccggcgagggcatcggctaccccttcaagggcaagcaggccatcaacctgtgcgtggtggagggcggccccttgcccttcgccgaggacatcttgtccgccgccttcatgtacggcaaccgcgtgttcaccgagtacccccaggacatcgtcgactacttcaagaactcctgccccgccggctacacctgggaccgctccttcctgttcgaggacggcgccgtgtgcatctgcaacgccgacatcaccgtgagcgtggaggagaactgcatgtaccacgagtccaagttctacggcgtgaacttccccgccgacggccccgtgatgaagaagatgaccgacaactgggagccctcctgcgagaagatcatccccgtgcccaagcagggcatcttgaagggcgacgtgagcatgtacctgctgctgaaggacggtggccgcttgcgctgccagttcgacaccgtgtacaaggccaagtccgtgccccgcaagatgcccgactggcacttcatccagcacaagctgacccgcgaggaccgcagcgacgccaagaaccagaagtggcacctgaccgagcacgccatcgcctccggctccgccttgccctccggactcagatctcgatagagtcaacctagacttgtccatcttctggattggccaacttaattaatgtatgaaataaaaggatgcacacatagtgacatgctaatcactataatgtgggcatcaaagttgtgtgttatgtgtaattactagttatctgaataaaagagaaagagatcatccatatttcttatcctaaatgaatgtcacgtgtctttataattctttgatgaaccagatgcatttcattaaccaaatccatatacatataaatattaatcatatataattaatatcaattgggttagcaaaacaaatctagtctaggtgtgttttgcgaattgcggcgcccttactttaacgcctctaaccaacacccctttatctttataaggaacaataaacagaatttgccccactgttctaaatcacctaataatatccccagctaaaaacaataaaggtttcctagaattaagacaagcatgactgttcctccaggagggtttggaacattgttgcagtcttgcagatacgggcgaagggtgagaaacagagcggagggctggaggtgacctcggtagtcgacgccggagttgagcttgacaacgacggggcggcccctgatggacttgaggaagtccgatggcgtcttcaccgtcccgccggcgcccgaggcgggcctgtcgctgccgccgccgccgctgctcatcttgcgcgctgtgcccccggcggtgtccctgtgttgcggatcgcgggtgggccaggtggatgcgagggcgacccgtttggactccggccggagccgccggatccctggtcggtgtcagtgccgtttactctgggccccacgtgtcagtaccgtctgtagatgacaacaacccgtcgtccacagtcatgtccaaaatatcctttcttcttttttttcgattcggatatctatcttccttttttttttccaaaaatcttcttgacgcaccagcgcgcacgtttgtggtaaacgccgacacgtcggtcccacgtcgatagaccccacccaccagtgagtagcgtgtacgtattcgggggtgacggacgtgtcgccgtcgtcttgctagtcccattcccatctgagccacacatctctgaacaaaaaaaaggagggaggcctccacgcacatccccctccgtgccacccgccccaaaccctcgcgccgcctccgagacagccgccgcaaccatggccaccgccgccgccgcgtctaccgcgctcactggcgccactaccgctgcgcccaaggcgaggcgccgggcgcacctcctggccacccgccgcgccctcgccgcgcccatcaggtgctcagcggcgtcacccgccatgccgatggctcccccggccaccccgctccggccgtggggccccaccgagccccgcaagggtgctgacatcctcgtcgagtccctcgagcgctgcggcgtccgcgacgtcttcgcctaccccggcggcgcgtccatggagatccaccaggcactcacccgctcccccgtcatcgccaaccacctcttccgccacgagcaaggggaggcctttgccgcctccggctacgcgcgctcctcgggccgcgtcggcgtctgcatcgccacctccggccccggcgccaccaacctagtctccgcgctcgccgacgcgctgctcgattccgtccccatggtcgccatcacgggacaggtggcgcgacgcatgattggcaccgacgccttccaggagacgcccatcgtcgaggtcacccgctccatcaccaagcacaactacctggtcctcgacgtcgacgacatcccccgcgtcgtgcaggaggctttcttcctcgcctcctctggtcgaccagggccggtgcttgtcgacatccccaaggacatccagcagcagatggcggtgcctgtctgggacaagcccatgagtctgcctgggtacattgcgcgccttcccaagccccctgcgactgagttgcttgagcaggtgctgcgtcttgttggtgaatcgcggcgccctgttctttatgtgggcggtggctgcgcagcatctggtgaggagttgcgacgctttgtggagctgactggaatcccggtcacaactactcttatgggcctcggcaacttccccagcgacgacccactgtctctgcgcatgctaggtatgcatgggacggtgtatgcaaattatgcagtggataaggccgatctgttgcttgcacttggtgtgcggtttgatgatcgcgtgacagggaagattgaggcttttgcaagcagggctaagattgtgcacgttgatattgatccggctgagattggcaagaacaagcagccacatgtgtccatctgtgcagatgttaagcttgctttgcagggcatgaatgctcttcttgaaggaagcacatcaaagaagagctttgactttggctcatggaacgatgagttggatcagcagaagagggaattcccccttgggtataaaacatctaatgaggagatccagccacaatatgctattcaggttcttgatgagctgacgaaaggcgaggccatcatcggcacaggtgttgggcagcaccagatgtgggcggcacagtactacacttacaagcggccaaggcagtggttgtcttcagctggtcttggggctatgggatttggtttgccggctgctgctggtgcttctgtggcaaacccaggtgtcactgttgttgacatcgatggagatggtagctttctcatgaacgttcaggagctagctatgatccgaattgagaacctcccagtgaaggtctttgtgctaaacaaccagcacctggggatggtggtgcagttggaggacaggttctataaggccaacagagcgcacacatacttgggaaacccagagaatgaaagtgagatatatccagatttcgtgacgatcgccaaagggttcaacattccagcggtccgtgtgacaaagaagaacgaagtccgcgcagcgataaagaagatgctcgagactccagggccgtacctcttggatataatcgtcccacaccaggagcatgtgttgcctatgatccctagtggtggggctttcaaggatatgatcctggatggtgatggcaggactgtgtactgactagctagtcagttaacagatctgccagatcctcggtgtacaaataacccgtcttatcctatgagacgggccggcgtcagtgtgttctggaggaatttttatgtcagagcctttttctttgtgtgcttgatgtagatgccaagggaagcttattggctgttgaagcttgatgcaaaataaattatggaactctgttttttgtttatctaataataactagcaaatatgcttccattgcattgaaactaacagccttttgtgtttccaagttttattttgtgacaatgtcatctatttcaattagttgtggaatcggaaacttgcaggactaacttggaaactccaatccctcagcatcctggactttttcctggtgtaatccatgtagatattattttaatcatcattttagttctggaggtttttccatctccggttttgctcccctttcttcaaaaaaaaaaaaaaaatgccgtaggcgccgcaacgcccacctgttgttcaaactcatgggcacgagtggctcgaagattttatacaacaattgctgtagtttcaccgttgctggtgaagaagcatttttttaaaaaaatatagtggtattcattttaattagtttagttgtgcagcgagcaaaatttggacatgctctgctcggaatctgatcgacctagacacagattagcagcagtagctttgtcatctgttccaagagttgcgatctgatagaagaaaaaaaaaccttcccttcaatgtaaaaccgaaactaacaagaaagaagcacagtgccgtttaggcaagtatggagtacgtattaagcatgtagaaggccatgcatgaaccactaacaagaaagaagcgcagtgccattcaggcaagcataagcatgtagattggcatgcatgaacaactaacagtagatcgtctctggtctgattagaagttttttgggaagccaagaaatcatgtacaactggttccatctcaaattccgtggcaaaaagaggcctaagcaacatacctcgagtagatcacattcaagcttggtcacccggtccgtcaatattctgattccgatgacttcgtaggttcctagctcaagccgctcgtgtccaagcgtcacttacgattagctaatgattacggcatctaggaccgactagtggcgcgccgactagctagctaaggtaccgagctcgaattcattccgattaatcgtggcctcttgctcttcaggatgaagagctatgtttaaacgtgcaagcgctactagacaattcagtacattaaaaacgtccgcaatgtgttattaagttgtctaagcgtcaatttgtttacaccacaatatatcctgcca

SEQ ID NO: 86 - DNA, 27221 bp, Artificial sequence
  PHP98283
gtttacccgccaatatatcctgtcaaacactgatagtttaaactgaaggcgggaaacgacaatctgatcatgagcggagaattaagggagtcacgttatgacccccgccgatgacgcgggacaagccgttttacgtttggaactgacagaaccgcaacgttgaaggagccactcagcaagctggtacgattgtaatacgactcactatagggcgaattgagcgctgtttaaacgctcttcaactggaagagcggttacgctgtttaaacgctcttcaactggaagagcggttactaccggttcactagctagctgctaatcgagctagttaccctatgaggtgacatgaagcgctcacggttactatgacggttagcttcacgactgttggtggcagtagcgtacgacttagctatagttccggacttacccttaagcgatttaaatctgcggttaccgaattcgagctcggtacctagtacccttgtacttttggtttcacctgcatagagaaaacccacaagaatatgacagtctgatttgtcagtctcattctcaagcaacatttctctatccgttactttcatggtgaataacacaatccatcatcaatactttgtgttactcagaaactgaaagttattccgagtcttgcatatctttggacctactcgtttttctaccattattgctgattgttaagctctcgctacttgaatcggcattgttggagtgggaaggttcaaaaaattggagttatgactagttgtctctttctatgtacgatggagaaaatgaataaacaactgagaaaatggctcttgtttagttgatgatgctcttaagctttccactggttgccatatatgatttgggcatttcactttgatcttaatgggccttgtaaagcccaagactcatgattatctttagttgatgctcttaattaggtgtgggcaaataattcaaactgtatgtacccgaccaaaaccaaagcaaaaataatcgaaccaaaccgaaaatttaaaaataaccgaatgaaaactaaatcctataactgaaagaactgaaaccgaatcaaaatatttaatgtaaccaaaaatatccgaaatataattatattgtcaaaaatattaataatttctagattaaataattaaaaatacttaaaaatttatataaaatagtaaaaatactcgaaaataaccacaaatattcaaaaacaaccgaaatatcccaaaatattcaaagcaaaataaccgaatggataccaaattttaaaaccgaaaaaactggaacaaaaccaaaatcgaaccaaaatttcaaaaatcgaataaatactaaactttagaacaaaaaaaaacgataaccgaatgtatacgaaccaaagccgaattagataaccgaacgtccaggactactcttaatctttccgccacttatgatttgggctattactttgtttataatgagccttttcaagctcaagttcatgattgtccgtgagatgagaaactgacttgttggattcgaaaccctagctagtattggttaatacttaatacataaatgacctgcattgacatcatcatccaagaaaataaaaattgtatgcttgagatatttagttttcctagctaggttttctttattttagtaccgaatctttaggtgtgccacgttaatttagacccattttttcatacttaccaactgagtctagtttaatcatgactataatcgtataaaatgattcagtcgacgtcattgcgaacgtatataaaatcatccaaattgacgtcattccaaagaggtaagcatgcttatctaagagtccgagcatactaaacaagacgacattttatttgcactccaaatcaaattttgtattgcctaaagaaaaacaatcaaactcaagtttcttaaaattaatttcattcaaactaatcactttcaatatctcacatattattcatgccatttctatttgtctaaacatgatttaaaaaaaaaagtaaaatacaaagattactatgcaaaaactctataaaaaaaaattcaaatttcttatttatttgtgacatcaaattttcaaaataatttttttaattatcggttgatccggtcagtcgataaaaacataaactttcagcgaccgttaaaactttcctactaccgatttagagaaaatcttagcttgaaacgtaattgtaacctgccttcatgcaagtcgcaagatatgtcatcctaagttgtatatgttttctcaaaagatgtatttacttgagaaaatacgtttcaacgttgatggacaaccaattaagaatcaagcacctttcgtaatcaatttaggcttatcgtctaaggtatactgatttacgacagttgactagacttataaggaacaaaataatagaatagtttctaaacacttcacctaatcatagagactaagatggtaattcgtaaacgacaaagcctagtgacactgtccattgtaaaattccacatcatattagtattaaacatatacatgtagtttcctgaacacatgtagtatcaaacacacttcgtggcttcttcctcgaaacctgcggccgcgctatagttccggacttacccttaagataacttcgtatagcatacattatacgaagttatgggcccacgcgtgaagagcggttaccagagctggtcacctttgtccaccaagatggaactgtcttcggccagaatggccatctggattcagcaggcctagaaggccatttatcgctatcaactttgtatagaaaagttgggccgagctcggtacggccagaatggcccggaccgggttaccaagcggccgcacactgatagtttaaactgaaggcgggaaacgacaatctgatcatgagcggagaattaagggagtcacgttatgacccccgccgatgacgcgggacaagccgttttacgtttggaactgacagaaccgcaacgattgaaggagccactcagccgcgggtttctggagtttaatgagctaagcacatacgtcagaaaccattattgcgcgttcaaaagtcgcctaaggtcactatcagctagcaaatatttcttgtcaaaaatgctccactgacgttccataaattcccctcggtatccaattagagtctcatattcactcccatggcggccaatgcgggcggcggtggagcgggaggaggcagcggcagcggcagcgtggctgcgccggcggtgtgccgccccagcggctcgcggtggacgccgacgccggagcagatcaggatgctgaaggagctctactacggctgcggcatccggtcgcccagctcggagcagatccagcgcatcaccgccatgctgcggcagcacggcaagatcgagggcaagaacgtcttctactggttccagaaccacaaggcccgcgagcgccagaagcgccgcctcaccagcctcgacgtcaacgtgcccgccgccggcgcggccgacgccaccaccagccaactcggcgtcctctcgctgtcgtcgccgccgccttcaggcgcggcgcctccctcgcccaccctcggcttctacgccgccggcaatggcggcggatcggctgtgctgctggacacgagttccgactggggcagcagcggcgctgctatggccaccgagacatgcttcctgcaggactacatgggcgtgacggacacgggcagctcgtcgcagtggccacgcttctcgtcgtcggacacgataatggcggcggccgcggcgcgggcggcgacgacgcgggcgcccgagacgctccctctcttcccgacctgcggcgacgacggcggcagcggtagcagcagctacttgccgttctggggtgccgcgtccacaactgccggcgccacttcttccgttgcgatccaacagcaacaccagctgcaggagcagtacagcttttacagcaacagcaacagcacccagctggccggcaccggcaaccaagacgtatcggcaacagcagcagcagccgccgccctggagctgagcctcagctcatggtgctccccttaccctgctgcagggagtatgtgagagcaacgcgagctgccactgctcttcactgatgtctctggaatggaaggaggaggaagtgagaacagatcattcgacaaagcagcattagtccgttgatcggtggaagaccactcgtcagtgttgagttgaatgtttgatcaataaaatacggcaatgctgtaagggttgttttttatgccattgataatacactgtactgttcagttgttgaactctatttcttagccatgccaagtgcttttcttattttgaataacattacagcaaaaagttgaaagacaaaaaaaaaaacccccgaacagagtgctttgggtcccaagcttctttagactgtgttcggcgttccccctaaatttctccccctatatctcactcacttgtcacatcagcgttctctttccccctatatctccacgctctacagcagttccacctatatcaaacctctataccccaccacaacaatattatatactttcatcttcaactaactcatgtaccttccaatttttttctactaataattatttacgtgcacagaaacttagcaaggagagagagagcgggaatttaaatgctcggcgttaggcttttagtccgctaggtggctagaccgaggttaggacgctagttcactaggggcctagtggtgttttaagacgtcacggtcaccacgcgtggaccgaagcttgcatgcctgcatcactgactagctaaacagcggccgcatcgagcagctggcttgtggggaccagacaaaaaaggaatggtgcagaattgttaggcgcacctaccaaaagcatctttgcctttattgcaaagataaagcagattcctctagtacaagtggggaacaaaataacgtggaaaagagctgtcctgacagcccactcactaatgcgtatgacgaacgcagtgacgaccacaaaactcgagcaacgagatcatgagccaatcaaagaggagtgatgtagacctaaagcaataatggagccatgacgtaagggcttacgcccatacgaaataattaaaggctgatgtgacctgtcggtctctcagaacctttactttttatgtttggcgtgtatttttaaatttccacggcaatgacgatgtgaccgtcgacccactaaaacattgctttgtcaaaagctaaaaaagatgatgcccgacagccacttgtgtgaagcatgagaagccggtccctccactaagaaaattagtgaagcatcttccagtggtccctccactcacagctcaatcagtgagcaacaggacgaaggaaatgacgtaagccatgacgtctaatcccagggcccggtgaccaatcgaattagcttggcgcgtggaccgaagcttgcatgcctgcagtgcagcgtgacccggtcgtgcccctctctagagataatgagcattgcatgtctaagttataaaaaattaccacatattttttttgtcacacttgtttgaagtgcagtttatctatctttatacatatatttaaactttactctacgaataatataatctatagtactacaataatatcagtgttttagagaatcatataaatgaacagttagacatggtctaaaggacaattgagtattttgacaacaggactctacagttttatctttttagtgtgcatgtgttctcctttttttttgcaaatagcttcacctatataatacttcatccattttattagtacatccatttagggtttagggttaatggtttttatagactaatttttttagtacatctattttattctattttagcctctaaattaagaaaactaaaactctattttagtttttttatttaataatttagatataaaatagaataaaataaagtgactaaaaattaaacaaataccctttaagaaattaaaaaaactaaggaaacatttttcttgtttcgagtagataatgccagcctgttaaacgccgtcgacgagtctaacggacaccaaccagcgaaccagcagcgtcgcgtcgggccaagcgaagcagacggcacggcatctctgtcgctgcctctggacccctctcgagagttccgctccaccgttggacttgctccgctgtcggcatccagaaattgcgtggcggagcggcagacgtgagccggcacggcaggcggcctcctcctcctctcacggcaccggcagctacgggggattcctttcccaccgctccttcgctttcccttcctcgcccgccgtaataaatagacaccccctccacaccctctttccccaacctcgtgttgttcggagcgcacacacacacaaccagatctcccccaaatccacccgtcggcacctccgcttcaaggtacgccgctcgtcctcccccccccccctctctaccttctctagatcggcgttccggtccatgcatggttagggcccggtagttctacttctgttcatgtttgtgttagatccgtgtttgtgttagatccgtgctgctagcgttcgtacacggatgcgacctgtacgtcagacacgttctgattgctaacttgccagtgtttctctttggggaatcctgggatggctctagccgttccgcagacgggatcgatttcatgattttttttgtttcgttgcatagggtttggtttgcccttttcctttatttcaatatatgccgtgcacttgtttgtcgggtcatcttttcatgcttttttttgtcttggttgtgatgatgtggtctggttgggcggtcgttctagatcggagtagaattctgtttcaaactacctggtggatttattaattttggatctgtatgtgtgtgccatacatattcatagttacgaattgaagatgatggatggaaatatcgatctaggataggtatacatgttgatgcgggttttactgatgcatatacagagatgctttttgttcgcttggttgtgatgatgtggtgtggttgggcggtcgttcattcgttctagatcggagtagaatactgtttcaaactacctggtgtatttattaattttggaactgtatgtgtgtgtcatacatcttcatagttacgagtttaagatggatggaaatatcgatctaggataggtatacatgttgatgtgggttttactgatgcatatacatgatggcatatgcagcatctattcatatgctctaaccttgagtacctatctattataataaacaagtatgttttataattattttgatcttgatatacttggatgatggcatatgcagcagctatatgtggatttttttagcactgccttcatacgctatttatttgcttggtactgtttcttttgtcgatgctcaccctgttgtttggtgttacttctgcaggtcgactttaacttagcctaggatccatggccactgtgaacaactggctcgctttctccctctccccgcaggagctgccgccctcccagacgacggactccacactcatctcggccgccaccgccgaccatgtctccggcgatgtctgcttcaacatcccccaagattggagcatgaggggatcagagctttcggcgctcgtcgcggagccgaagctggaggacttcctcggcggcatctccttctccgagcagcatcacaaggccaactgcaacatgatacccagcactagcagcacagtttgctacgcgagctcaggtgctagcaccggctaccatcaccagctgtaccaccagcccaccagctcagcgctccacttcgcggactccgtaatggtggcttcctcggccggtgtccacgacggcggtgccatgctcagcgcggccgccgctaacggtgtcgctggcgctgccagtgccaacggcggcggcatcgggctgtccatgattaagaactggctgcggagccaaccggcgcccatgcagccgagggtggcggcggctgagggcgcgcaggggctctctttgtccatgaacatggcggggacgacccaaggcgctgctggcatgccacttctcgctggagagcgcgcacgggcgcccgagagtgtatcgacgtcagcacagggtggagccgtcgtcgtcacggcgccgaaggaggatagcggtggcagcggtgttgccggcgctctagtagccgtgagcacggacacgggtggcagcggcggcgcgtcggctgacaacacggcaaggaagacggtggacacgttcgggcagcgcacgtcgatttaccgtggcgtgacaaggcatagatggactgggagatatgaggcacatctttgggataacagttgcagaagggaagggcaaactcgtaagggtcgtcaagtctatttaggtggctatgataaagaggagaaagctgctagggcttatgatcttgctgctctgaagtactggggtgccacaacaacaacaaattttccagtgagtaactacgaaaaggagctcgaggacatgaagcacatgacaaggcaggagtttgtagcgtctctgagaaggaagagcagtggtttctccagaggtgcatccatttacaggggagtgactaggcatcaccaacatggaagatggcaagcacggattggacgagttgcagggaacaaggatctttacttgggcaccttcagcacccaggaggaggcagcggaggcgtacgacatcgcggcgatcaagttccgcggcctcaacgccgtcaccaacttcgacatgagccgctacgacgtgaagagcatcctggacagcagcgccctccccatcggcagcgccgccaagcgcctcaaggaggccgaggccgcagcgtccgcgcagcaccaccacgccggcgtggtgagctacgacgtcggccgcatcgcctcgcagctcggcgacggcggagccctggcggcggcgtacggcgcgcactaccacggcgccgcctggccgaccatcgcgttccagccgggcgccgccagcacaggcctgtaccacccgtacgcgcagcagccaatgcgcggcggcgggtggtgcaagcaggagcaggaccacgcggtgatcgcggccgcgcacagcctgcaggacctccaccacctgaacctgggcgcggccggcgcgcacgactttttctcggcagggcagcaggccgccgccgctgcgatgcacggcctgggtagcatcgacagtgcgtcgctcgagcacagcaccggctccaactccgtcgtctacaacggcggggtcggcgacagcaacggcgccagcgccgtcggcggcagtggcggtggctacatgatgccgatgagcgctgccggagcaaccactacatcggcaatggtgagccacgagcaggtgcatgcacgggcctacgacgaagccaagcaggctgctcagatggggtacgagagctacctggtgaacgcggagaacaatggtggcggaaggatgtctgcatgggggactgtcgtgtctgcagccgcggcggcagcagcaagcagcaacgacaacatggccgccgacgtcgggcatggcggcgcgcagctcttcagtgtctggaacgacacttaagcgtacctagtggtacctgacatcttatagtctgcaacctctcgtgtctgaattcctatctttatcaagtgttattgcttccacgactataggacagctttcgtcgaaagcttttgctcatgtgatctcgaaggattcatctagtctgatttttcgtgacttgtatcggttttattggattcatccaacatatatcaataaaaaatgagttgtgtttcctttcttcctagttcagttaaaattatttccctcctgcgcttgtgctgtaattgtctgtgtacctgttgtttgtgactgtgttagttcccttggatatgatttcgtatttgatatgtacatggagatagcttagcttcattattggagtatgaagttagtatgacatagtcactctcctggaaaattgacactgcaaaccatatttttattctgaaccacaaatcctagtcagtccgctggcatatgccgtccgtttgctgaatccagaacgtgggtttggagatgtacggctgagatgcctctatgcgaaggggatttcgtggtgaaacgagatgggagtagagcaacgcccgtggaagatgcttcaaacttccacacttttgagcaacgatcggcagtagtaaggtagacgatttcaagatcaaagcatatgaagataaacaacatcaacaacaaaatttgttggggttctatagagagaaacagagctacatacatacactgttttgtatctaccatctgagatgatgaaaagatgaaaaactaaagaatgccccggcgccaacgccaggacacgccgcgcgcgcgtcacccgagccatctcttgacccagccggcgctgtatatttacacacgttgcagcatcgatcaccacctgttcgatcgcgtcgccgtcaccggcgcgccgcgacttattgaactagtctagggcgcggctaacaacctagcttagattgccttgtctaaacccttaggctaacgcgccacggtaacccggtccgggcctagaaggccccagagctggtcaccccatacgattggaagcttcaagtttgtacaaaaaagcaggctccggccagagttacccggaccgaagcttgcatgcctgcagtgcagcgtgacccggtcgtgcccctctctagagataatgagcattgcatgtctaagttataaaaaattaccacatattttttttgtcacacttgtttgaagtgcagtttatctatctttatacatatatttaaactttactctacgaataatataatctatagtactacaataatatcagtgttttagagaatcatataaatgaacagttagacatggtctaaaggacaattgagtattttgacaacaggactctacagttttatctttttagtgtgcatgtgttctcctttttttttgcaaatagcttcacctatataatacttcatccattttattagtacatccatttagggtttagggttaatggtttttatagactaatttttttagtacatctattttattctattttagcctctaaattaagaaaactaaaactctattttagtttttttatttaataatttagatataaaatagaataaaataaagtgactaaaaattaaacaaataccctttaagaaattaaaaaaactaaggaaacatttttcttgtttcgagtagataatgccagcctgttaaacgccgtcgacgagtctaacggacaccaaccagcgaaccagcagcgtcgcgtcgggccaagcgaagcagacggcacggcatctctgtcgctgcctctggacccctctcgagagttccgctccaccgttggacttgctccgctgtcggcatccagaaattgcgtggcggagcggcagacgtgagccggcacggcaggcggcctcctcctcctctcacggcaccggcagctacgggggattcctttcccaccgctccttcgctttcccttcctcgcccgccgtaataaatagacaccccctccacaccctctttccccaacctcgtgttgttcggagcgcacacacacacaaccagatctcccccaaatccacccgtcggcacctccgcttcaaggtacgccgctcgtcctcccccccccccctctctaccttctctagatcggcgttccggtccatgcatggttagggcccggtagttctacttctgttcatgtttgtgttagatccgtgtttgtgttagatccgtgctgctagcgttcgtacacggatgcgacctgtacgtcagacacgttctgattgctaacttgccagtgtttctctttggggaatcctgggatggctctagccgttccgcagacgggatcgatttcatgattttttttgtttcgttgcatagggtttggtttgcccttttcctttatttcaatatatgccgtgcacttgtttgtcgggtcatcttttcatgcttttttttgtcttggttgtgatgatgtggtctggttgggcggtcgttctagatcggagtagaattctgtttcaaactacctggtggatttattaattttggatctgtatgtgtgtgccatacatattcatagttacgaattgaagatgatggatggaaatatcgatctaggataggtatacatgttgatgcgggttttactgatgcatatacagagatgctttttgttcgcttggttgtgatgatgtggtgtggttgggcggtcgttcattcgttctagatcggagtagaatactgtttcaaactacctggtgtatttattaattttggaactgtatgtgtgtgtcatacatcttcatagttacgagtttaagatggatggaaatatcgatctaggataggtatacatgttgatgtgggttttactgatgcatatacatgatggcatatgcagcatctattcatatgctctaaccttgagtacctatctattataataaacaagtatgttttataattattttgatcttgatatacttggatgatggcatatgcagcagctatatgtggatttttttagccctgccttcatacgctatttatttgcttggtactgtttcttttgtcgatgctcaccctgttgtttggtgttacttctgcaggtcgactttaacttagcctaggatccatgatgatgatgagcagcggccgggcgggcggcggggccaccgcggggcgatacccgttcacggcgtcgcagtggcaggagctggagcaccaggcgctcatctacaagtgcctggcgtccggcaagcccatcccttcctacctcatgccgccgctccgccgcatcctcgactccgccctcgccacgtcgccgtccctcgcctacccgccgcaaccctcactgggctggggctgcttcgggatgggcttcacccggaaggccgacgaggacccggagcccgggcggtgccggcgcacggacggcaagaagtggcgctgctccaaggaggcgtacccggactccaagtactgcgagaagcacatgcaccggggcaagaaccgttcaagaaagcctgtggaaatgtccttggccacgccggccccggcgccggcccccgccgccgccacaaccgccaccgccacctcatccccggcgccgtcctaccaccgcccggcccacgacgccacgccgtctccgtaccacgcgctgtatggaggcggcggcggcggcggcggtagcccttactcggcgtcggcacgcccaggagcaaccggaggcggcggcgcgtaccaccacgcgcagcatgtgagccccttccacctccacctcgagaccacccacccgcacccgccgccgccctacaactactccgccgaccagagggactacgcgtacgggcacgcggccgccaaggaggtcggcgagcacgccttcttctcggacggcgcgggcgagcgggtcgaccggcaggccgcggcggggcagtggcagttcaggcagctcggggtggagacgaagccgggccccacgccgctgttccccgtcgccgggtacgggcacggcgcggcgtcgccgtacggcgtggagatgggcaaggacgacgacgagcaggaggagaggcgccgccagcactgcttcgttcttggagccgacctgcggctggagcggccgtcgtcgggccatggccatggccatgaccatgacgacgccgccgccgcgcagaagccgctccggcccttcttcgacgagtggccgcaccagaagggggacaaggccgggtcgtggatggggctcgacggcgagacgcagctctccatgtccatccccatggccgccaccgacctccccgtcacctcccgcttccgtaacgacgagtgaggtaccgttaacagatctactaactatctatactgtaataatgttgtatagccgccggatagctagctagtttagtcattcagcggcgatgggtaataataaagtgtcatccatccatcaccatgcgtggcaacgtgagcaatgacctgattgaacaaattgaaatgaaaagaagaaatatgttatatgtcaacgagatttcctcataatgccactgacgacgtgtgtccaagaaatgtatcagtgatacgtatattcacaatttttttatgacttatactcacaatttgtttttttactacttatactcacaatttgttgtgcgtaccataacaatttcgatcgaatatatatcagaaagttgacgaaagtaagctcactcaaaaagttaaatgggctgcggaagctgcgtcaggcccaagttttggctattctatccggtatccacgattttgatggctgagggacatatgttcgcttaagcttcggtccgggcctagaaggccgatctcccgggcacccagctttcttgtacaaagtggccgttaacggatcggccagaatggcccggaccgggttaccccgcggttcaaagccaatgactgttgttaggtccagtttctaaggacgaatcatccaatcactggttctttctgaacaaaacaaagagctatagagttacgttactgtagccgagacagagcctgcaatctggttatgccacatactaggttctttcttaaagttgactcactctatcctaagttctacttacaaggagctacaacaaattggtcataaccggagagcgttcaaggaggtaatatcccatcttactctgtagcaaggctacaaaaggagagctaaagaactaggctacaaaaagagagctaaagaactaactatctagcaagactacagagctatagtgtagagatttcataaccggtgagcgttcaaggatactttgaagagaagaggtaatatctcaactagcaagactacaaaaaaatggagatataaaactaactgtctaacaagactacagagctatagtagagatagatacgttcgacacttaagcatgagaattcgagctcggtaccctggttcacaaactcaatacaacacacagtggagtagggtattacgctccggcggcccgaaccactctaaatccttgtgtcctcgtgtgctcttccaccattaatgactgtaattgcagggacacgaagagttgtagcgcttttgccaacaagatccgctatatgctagtagagtggaacctgcacagcaacaagcatccaataatctgagaataagaattatgtgtggtgatggttctcatctctgcaactcgccattttcgcgagagaaccaaatccaagttggtgaagatcatgatttgggctcatgggctggcatagtagctattacctttgcaattgtggttcgaatctatccgatattctccttttcagggagagctaatgcttatgcttattgggtattttggtttgacactgcttcacgcccaaaaaaaggcaactatgtctgagttggatatggcccaaaaaaaggcagctatgtctgagttggatatggaagtcttctttcgtttagggtgaagtaagaccaagctcatgagcttattatcttaggtcggaacaaattagttgataggcatggcacatttatcaaattataatgattttaacagaaaagcaacacctctttttcagcagcaccagctttgcaagctgcaattgacactccaagcatagtatttgctccaaactcagcctgcatttcgcacaatatcatatctatttccatttggataaaatatattttccagaaatatgggaacagaatcaagatacagaaaaaagttgtggtagtagtggtaagtggaaacacaagtacagtgaaaagatagcattatttctgaacagtcaaattaaccgaaataagtagtatcacatactgcccctaaattgactacacccaatgtaaagaattgcttgagcatattgagccatcagttgtttgtttgtgtaacggatttgacaatgcagagttcaggagcaaaaaaccgcaaaggagagaaagagggaaaggatctcctagtatcccaccttgtggcgcgccctgtcaagtgcatgatggcctggtcgatctgcgtctgctgctgcggttccatcccaacgagtgcctccgacaccttgtcgttgatcacccgcaccgcgtaggcgacccccctggcgaggaacttccgcctctcggaggccccggccgcgtcggcggcggcgccctcgagcgcgcccacgctagccgtagatgctcggtgcacggccttgttggtgtgcaactcgacctcaacggccggtgcgctacgcccgtcaaggatctggcgcgcccgcaccctcgtgatcacggtgggcgcctcccgcctcatgtggccgacgatgaaaagcgccgggttaggggccttggcgcgcaccgccgtattcagggcctcctcgctcttgcgcgagagcaggtgcttccccaggtactcctgcactgacaaggctgccacagcggtggaatttgtcctcacgacttcgccacgtcgtcctcacctccctggcttcccacgactccgccgtatcgaggtgctcggtgggtcgtcttaatccgaagtccgaactaggaagacgagacagagaggtctgaggaatgggcctcgtttgatgttgagctgaattatttttccagcataagcccaggtcttggtccatgaacaaaattactagaaacccagcccagtactacgatctaaaagagggactgccactggatagctctctctagcattctccacgctccaatacagcggcgtcgtgtctatccgggtctatccgcgaacacgtgagaactctccagaaactgctttctcctccacttcatctctctcgctttccctctataaaaagaccccttctaggaattgagggagacagcaagcaccaagcagcgatccgaagctcaatcaattcactcaaacctcttccccaaatcttcgattagatcttcgttgacaagaagactagaaccgaacctgacatgtccaacctgctcacggttcaccagaaccttccggctcttccagtggacgcgacgtccgatgaagtcaggaagaacctcatggacatgttccgcgacaggcaagcgttcagcgagcacacctggaagatgctgctctccgtctgccgctcctgggctgcatggtgcaagctgaacaacaggaagtggttccccgctgagcccgaggacgtgagggattaccttctgtacctgcaagcgcgaggtttgtttctgcttctacctttgatatatatataataattatcattaattagtagtaatataatatttcaaatatttttttcaaaataaaagaatgtagtatatagcaattgcttttctgtagtttataagtgtgtatattttaatttataacttttctaatatatgaccaaaacatggtgatgcctaggtctggcagtgaagaccatccagcaacaccttggacaactgaacatgcttcacaggcgctccggcctcccgcgccccagcgactcgaacgccgtgagcctcgtcatgcgccgcatcaggaaggaaaacgtcgatgccggcgaaagggcaaagcaggccctcgcgttcgagaggaccgatttcgaccaggtccgcagcctgatggagaacagcgacaggtgccaggacattaggaacctggcgttcctcggaattgcatacaacacgctcctcaggatcgcggaaattgcccgcattcgcgtgaaggacattagccgcaccgacggcggcaggatgcttatccacattggcaggaccaagacgctcgtttccaccgcaggcgtcgaaaaggccctcagcctcggagtgaccaagctcgtcgaacgctggatctccgtgtccggcgtcgcggacgacccaaacaactacctcttctgccgcgtccgcaagaacggggtggctgcccctagcgccaccagccaactcagcacgagggccttggaaggtattttcgaggccacccaccgcctgatctacggcgcgaaggatgacagcggtcaacgctacctcgcatggtccgggcactccgcccgcgttggagctgctagggacatggcccgcgccggtgtttccatccccgaaatcatgcaggcgggtggatggacgaacgtgaacattgtcatgaactacattcgcaaccttgacagcgagacgggcgcaatggttcgcctcctggaagatggtgactgaggtacccaacctagacttgtccatcttctggattggccaacttaattaatgtatgaaataaaaggatgcacacatagtgacatgctaatcactataatgtgggcatcaaagttgtgtgttatgtgtaattactagttatctgaataaaagagaaagagatcatccatatttcttatcctaaatgaatgtcacgtgtctttataattctttgatgaaccagatgcatttcattaaccaaatccatatacatataaatattaatcatatataattaatatcaattgggttagcaaaacaaatctagtctaggtgtgttttgcgatccgatatcgaattggccacggtaccagctgctgctgttctagggttcacaagtctgcctatttgtcttccccaatggagctatggttgtctggtctggtccttggtcgtgtcccgtttcattgtgtactatttacctgtaatgtgtatccttaagtctggtttgatggtgtctgaaacgttttgctgtggtagagcagcatggaagaactataatgaataagtgatccctaatcattgtgtccaaattttgcttctgctatacccttttgtgctgtttcttatgttttgcttaaaaatttgatctgacaaacaaatttgtctaaattatgctcttgttctgactgtgtactgtacacatttgtattgctaccggtttggcacatagttttctctttgattgcagatcaaacccttctgattgcagattgcttggctatggctgatgtgctcactgttcttctttagcttgtatattgctgatggtggcttggctacggctgaaaaagttgctgctgcgccgacttggcaactgttgctccagtaatgctttgtcctctcttcctagccgccgacttggcacttggcagctgttgctcctgtaatgcgttgttatctcttatctcttgagatgtactatgattttgaggctgtttgacttgtgccagattgccagtgctgatgctatattatctcaggtttttatgctagtatatgttttactgtgtgctgcctgtgtcgagttacgtaatctattgaaccgctatgcgtgttgatgccctgttgttgcttgccagattgatgcccctgttgcttgcagcttgcaagctgtagtgaaatcctaaaattccaaaccaaatctattctgaacttttgaagatctgtgatgtccggaagaaaagattcaaacagataaacgggactctccagaatctataaaataaatgatcgacaaacgctttgctttggtaggcttcaagcttggtcacccggtccgggcctagaaggccagcttcggccgccccgggcaactttattatacaaagttgatagataaatcagatatctggttcctaaggacccggcggaccgattaaactgattcggtccgacgcgttacctaataacttcgtatagcatacattatacgaagttattagctaactaactagtaagcttaagccatgggtcgacggatccgttaactagcgtggcatttggcaccgccgcacactatgcgagctaggagtgctagtttacagatgaaactatgaaaccaagaaaacacaattgtccgtagctagcgcgtggcgtcgtgtcaagcttcacacagtatcttcgttcttcactataaatcgcgcctgttgttcgtgagacccaccaccgtggataacagtcccctaataataagcgatcaacagcactgctgatggctgaacaccgaggcgccgccgcgcgtaaccatccgccggagcagcccgtcgtgccggcgaacgacgccttccccgaccgcgcccagcagctctgcctcgacgccgggcgcgcgctcgcgatgtgcggcgtgctcgtcgccgtccctcccgcattttacgcgtcgacgtcgcggacgacaccgcacttgccttcgtcggcttcgtcctctggatcatcggtgcgtggctgtgcctcctggcgctcacgcccttggctccacgggcggtgagggcgggcggggccgccgccagcaccttgctgatcaggtgcctgtccctttcatgaactactagcgcccgcgcccgcggccgccgggcacaagagaacacatcgatgttcgctgcgtacgtcagcaataaggcactctttgtcagtagtcgagtgcatatgttgggtgtttgccctgggagatttcaagtgttgtggccattatcccgcaggataaaaaatcggcggcttttggattgatacggaaaataacgatgtttcatgctcgtgttgtgtgtgtgacatcttgtcagccaagtttttaaccgttgctactccccctctgtgggctcagtgtgtggaccggaatacgtcgtacataggccgtagcctaagcccaatatgccgtttttcaggttggcctgtgtgacgacaagcgggtctcaaaagcccatcacgcaactggcctgcaattattggaggagagcgcgtcgagttggttccagaggctgcgtggtggggccggactctgcgacgacctctcgttcgcgtccgatttggttgccgtgagccgtgacgtaacgcctccttccgttcctccctatataagttccacccccgggtccggtttccccaagccccagtgacccccgatcccgatcgcgaaatctccgcacccgccggcaagggaccgaagcaagcctctctcccgaccgtcgcatcaaggtacgcgtccgctcgatctgtcctcttccttctcgatttgacttgctgtggtgcccgatcacgggatcagaatcgcaccagtgtagatttcgcatgttctaagatgtgttagtttccaggctaatccagttctcttgacgcccgatccgatcgagctccgtgtttatttcagcctaatcgtagtattcccctaaaatttcctcattagggggttcgcaagattgttggtcgacaggttcacttatgctcgatcgcttacttttagtcgattcatgctgcgtactattgttgccccccgtggttttatcttttctcgtgtgaaatccagtagatatagtagatatcgtagcattaggttttaattcaatcgattgattattgtatcatcaaaattgagaagttcgaatcatgcctatcatgctgcctcaaccgaaatcctgtatattgaagtttcaattcaattgattgatcattcattagattcaaccaaaatctagaaggttagatgacgcatgtcatgctgcctgcgtagtttacctttgatctgtttatgattaccttatcagtaggatatttgtgattttgggaagtagcactaactgattcatgctgacatgatgttccctttcagattatactgttgagtcctatctaattgatgctttgtatgctatatgaatacgtcatggtaaattagcagttaattagcatattagcaattgggcgtacctcatcaggattgctcttgtagatgtgtgtggtgatgtttcttgttcaattcatgttctgctttaaaagtatgtgttctctgtttgttaattaagattcatggttataatgatttggacctaattaatcagggttgcccttttagatgcgtggttacttgttgagttcatttttttcctgctatagttgtatgcgtttgttcattcatggttagatttgatttgtttcttctctattccatgccttccatatacttcaattgtagcttaacatgagatttctgtatatgcaggtcgaccgccggggatccacacgacaccatggcccagtccaagcacggcctgaccaaggagatgaccatgaagtaccgcatggagggctgcgtggacggccacaagttcgtgatcaccggcgagggcatcggctaccccttcaagggcaagcaggccatcaacctgtgcgtggtggagggcggccccttgcccttcgccgaggacatcttgtccgccgccttcatgtacggcaaccgcgtgttcaccgagtacccccaggacatcgtcgactacttcaagaactcctgccccgccggctacacctgggaccgctccttcctgttcgaggacggcgccgtgtgcatctgcaacgccgacatcaccgtgagcgtggaggagaactgcatgtaccacgagtccaagttctacggcgtgaacttccccgccgacggccccgtgatgaagaagatgaccgacaactgggagccctcctgcgagaagatcatccccgtgcccaagcagggcatcttgaagggcgacgtgagcatgtacctgctgctgaaggacggtggccgcttgcgctgccagttcgacaccgtgtacaaggccaagtccgtgccccgcaagatgcccgactggcacttcatccagcacaagctgacccgcgaggaccgcagcgacgccaagaaccagaagtggcacctgaccgagcacgccatcgcctccggctccgccttgccctccggactcagatctcgatagagtcaacctagacttgtccatcttctggattggccaacttaattaatgtatgaaataaaaggatgcacacatagtgacatgctaatcactataatgtgggcatcaaagttgtgtgttatgtgtaattactagttatctgaataaaagagaaagagatcatccatatttcttatcctaaatgaatgtcacgtgtctttataattctttgatgaaccagatgcatttcattaaccaaatccatatacatataaatattaatcatatataattaatatcaattgggttagcaaaacaaatctagtctaggtgtgttttgcgaattgcggcgcccttactttaacgcctctaaccaacacccctttatctttataaggaacaataaacagaatttgccccactgttctaaatcacctaataatatccccagctaaaaacaataaaggtttcctagaattaagacaagcatgactgttcctccaggagggtttggaacattgttgcagtcttgcagatacgggcgaagggtgagaaacagagcggagggctggaggtgacctcggtagtcgacgccggagttgagcttgacaacgacggggcggcccctgatggacttgaggaagtccgatggcgtcttcaccgtcccgccggcgcccgaggcgggcctgtcgctgccgccgccgccgctgctcatcttgcgcgctgtgcccccggcggtgtccctgtgttgcggatcgcgggtgggccaggtggatgcgagggcgacccgtttggactccggccggagccgccggatccctggtcggtgtcagtgccgtttactctgggccccacgtgtcagtaccgtctgtagatgacaacaacccgtcgtccacagtcatgtccaaaatatcctttcttcttttttttcgattcggatatctatcttccttttttttttccaaaaatcttcttgacgcaccagcgcgcacgtttgtggtaaacgccgacacgtcggtcccacgtcgatagaccccacccaccagtgagtagcgtgtacgtattcgggggtgacggacgtgtcgccgtcgtcttgctagtcccattcccatctgagccacacatctctgaacaaaaaaaaggagggaggcctccacgcacatccccctccgtgccacccgccccaaaccctcgcgccgcctccgagacagccgccgcaaccatggccaccgccgccgccgcgtctaccgcgctcactggcgccactaccgctgcgcccaaggcgaggcgccgggcgcacctcctggccacccgccgcgccctcgccgcgcccatcaggtgctcagcggcgtcacccgccatgccgatggctcccccggccaccccgctccggccgtggggccccaccgagccccgcaagggtgctgacatcctcgtcgagtccctcgagcgctgcggcgtccgcgacgtcttcgcctaccccggcggcgcgtccatggagatccaccaggcactcacccgctcccccgtcatcgccaaccacctcttccgccacgagcaaggggaggcctttgccgcctccggctacgcgcgctcctcgggccgcgtcggcgtctgcatcgccacctccggccccggcgccaccaacctagtctccgcgctcgccgacgcgctgctcgattccgtccccatggtcgccatcacgggacaggtggcgcgacgcatgattggcaccgacgccttccaggagacgcccatcgtcgaggtcacccgctccatcaccaagcacaactacctggtcctcgacgtcgacgacatcccccgcgtcgtgcaggaggctttcttcctcgcctcctctggtcgaccagggccggtgcttgtcgacatccccaaggacatccagcagcagatggcggtgcctgtctgggacaagcccatgagtctgcctgggtacattgcgcgccttcccaagccccctgcgactgagttgcttgagcaggtgctgcgtcttgttggtgaatcgcggcgccctgttctttatgtgggcggtggctgcgcagcatctggtgaggagttgcgacgctttgtggagctgactggaatcccggtcacaactactcttatgggcctcggcaacttccccagcgacgacccactgtctctgcgcatgctaggtatgcatgggacggtgtatgcaaattatgcagtggataaggccgatctgttgcttgcacttggtgtgcggtttgatgatcgcgtgacagggaagattgaggcttttgcaagcagggctaagattgtgcacgttgatattgatccggctgagattggcaagaacaagcagccacatgtgtccatctgtgcagatgttaagcttgctttgcagggcatgaatgctcttcttgaaggaagcacatcaaagaagagctttgactttggctcatggaacgatgagttggatcagcagaagagggaattcccccttgggtataaaacatctaatgaggagatccagccacaatatgctattcaggttcttgatgagctgacgaaaggcgaggccatcatcggcacaggtgttgggcagcaccagatgtgggcggcacagtactacacttacaagcggccaaggcagtggttgtcttcagctggtcttggggctatgggatttggtttgccggctgctgctggtgcttctgtggcaaacccaggtgtcactgttgttgacatcgatggagatggtagctttctcatgaacgttcaggagctagctatgatccgaattgagaacctcccagtgaaggtctttgtgctaaacaaccagcacctggggatggtggtgcagttggaggacaggttctataaggccaacagagcgcacacatacttgggaaacccagagaatgaaagtgagatatatccagatttcgtgacgatcgccaaagggttcaacattccagcggtccgtgtgacaaagaagaacgaagtccgcgcagcgataaagaagatgctcgagactccagggccgtacctcttggatataatcgtcccacaccaggagcatgtgttgcctatgatccctagtggtggggctttcaaggatatgatcctggatggtgatggcaggactgtgtactgactagctagtcagttaacagatctgccagatcctcggtgtacaaataacccgtcttatcctatgagacgggccggcgtcagtgtgttctggaggaatttttatgtcagagcctttttctttgtgtgcttgatgtagatgccaagggaagcttattggctgttgaagcttgatgcaaaataaattatggaactctgttttttgtttatctaataataactagcaaatatgcttccattgcattgaaactaacagccttttgtgtttccaagttttattttgtgacaatgtcatctatttcaattagttgtggaatcggaaacttgcaggactaacttggaaactccaatccctcagcatcctggactttttcctggtgtaatccatgtagatattattttaatcatcattttagttctggaggtttttccatctccggttttgctcccctttcttcaaaaaaaaaaaaaaaatgccgtaggcgccgcaacgcccacctgttgttcaaactcatgggcacgagtggctcgaagattttatacaacaattgctgtagtttcaccgttgctggtgaagaagcatttttttaaaaaaatatagtggtattcattttaattagtttagttgtgcagcgagcaaaatttggacatgctctgctcggaatctgatcgacctagacacagattagcagcagtagctttgtcatctgttccaagagttgcgatctgatagaagaaaaaaaaaccttcccttcaatgtaaaaccgaaactaacaagaaagaagcacagtgccgtttaggcaagtatggagtacgtattaagcatgtagaaggccatgcatgaaccactaacaagaaagaagcgcagtgccattcaggcaagcataagcatgtagattggcatgcatgaacaactaacagtagatcgtctctggtctgattagaagttttttgggaagccaagaaatcatgtacaactggttccatctcaaattccgtggcaaaaagaggcctaagcaacatacctcgagtagatcacattcaagcttggtcacccggtccgtcaatattctgattccgatgacttcgtaggttcctagctcaagccgctcgtgtccaagcgtcacttacgattagctaatgattacggcatctaggaccgactagtggcgcgccgactagctagctaaggtaccgagctcgaattcattccgattaatcgtggcctcttgctcttcaggatgaagagctatgtttaaacgtgcaagcgctactagacaattcagtacattaaaaacgtccgcaatgtgttattaagttgtctaagcgtcaatttgtttacaccacaatatatcctgcca

SEQ ID NO: 87 - DNA, 20678 bp, Artificial sequence
  PHP98310
gtttacccgccaatatatcctgtcaaacactgatagtttaaactgaaggcgggaaacgacaatctgatcatgagcggagaattaagggagtcacgttatgacccccgccgatgacgcgggacaagccgttttacgtttggaactgacagaaccgcaacgttgaaggagccactcagcaagctggtacgattgtaatacgactcactatagggcgaattgagcgctgtttaaacgctcttcaactggaagagcggttacgctgtttaaacgctcttcaactggaagagcggttactaccggttcactagctagctgctaatcgagctagttaccctatgaggtgacatgaagcgctcacggttactatgacggttagcttcacgactgttggtggcagtagcgtacgacttagctatagttccggacttacccttaagcgatttaaatctgcggttaccgaattcgagctcggtacctagtacccttgtacttttggtttcacctgcatagagaaaacccacaagaatatgacagtctgatttgtcagtctcattctcaagcaacatttctctatccgttactttcatggtgaataacacaatccatcatcaatactttgtgttactcagaaactgaaagttattccgagtcttgcatatctttggacctactcgtttttctaccattattgctgattgttaagctctcgctacttgaatcggcattgttggagtgggaaggttcaaaaaattggagttatgactagttgtctctttctatgtacgatggagaaaatgaataaacaactgagaaaatggctcttgtttagttgatgatgctcttaagctttccactggttgccatatatgatttgggcatttcactttgatcttaatgggccttgtaaagcccaagactcatgattatctttagttgatgctcttaattaggtgtgggcaaataattcaaactgtatgtacccgaccaaaaccaaagcaaaaataatcgaaccaaaccgaaaatttaaaaataaccgaatgaaaactaaatcctataactgaaagaactgaaaccgaatcaaaatatttaatgtaaccaaaaatatccgaaatataattatattgtcaaaaatattaataatttctagattaaataattaaaaatacttaaaaatttatataaaatagtaaaaatactcgaaaataaccacaaatattcaaaaacaaccgaaatatcccaaaatattcaaagcaaaataaccgaatggataccaaattttaaaaccgaaaaaactggaacaaaaccaaaatcgaaccaaaatttcaaaaatcgaataaatactaaactttagaacaaaaaaaaacgataaccgaatgtatacgaaccaaagccgaattagataaccgaacgtccaggactactcttaatctttccgccacttatgatttgggctattactttgtttataatgagccttttcaagctcaagttcatgattgtccgtgagatgagaaactgacttgttggattcgaaaccctagctagtattggttaatacttaatacataaatgacctgcattgacatcatcatccaagaaaataaaaattgtatgcttgagatatttagttttcctagctaggttttctttattttagtaccgaatctttaggtgtgccacgttaatttagacccattttttcatacttaccaactgagtctagtttaatcatgactataatcgtataaaatgattcagtcgacgtcattgcgaacgtatataaaatcatccaaattgacgtcattccaaagaggtaagcatgcttatctaagagtccgagcatactaaacaagacgacattttatttgcactccaaatcaaattttgtattgcctaaagaaaaacaatcaaactcaagtttcttaaaattaatttcattcaaactaatcactttcaatatctcacatattattcatgccatttctatttgtctaaacatgatttaaaaaaaaaagtaaaatacaaagattactatgcaaaaactctataaaaaaaaattcaaatttcttatttatttgtgacatcaaattttcaaaataatttttttaattatcggttgatccggtcagtcgataaaaacataaactttcagcgaccgttaaaactttcctactaccgatttagagaaaatcttagcttgaaacgtaattgtaacctgccttcatgcaagtcgcaagatatgtcatcctaagttgtatatgttttctcaaaagatgtatttacttgagaaaatacgtttcaacgttgatggacaaccaattaagaatcaagcacctttcgtaatcaatttaggcttatcgtctaaggtatactgatttacgacagttgactagacttataaggaacaaaataatagaatagtttctaaacacttcacctaatcatagagactaagatggtaattcgtaaacgacaaagcctagtgacactgtccattgtaaaattccacatcatattagtattaaacatatacatgtagtttcctgaacacatgtagtatcaaacacacttcgtggcttcttcctcgaaacctgcggccgcgctatagttccggacttacccttaagataacttcgtatagcatacattatacgaagttatgggcccacgcgtgaagagcggttaccagagctggtcacctttgtccaccaagatggaactgtcttcggccagaatggccatctggattcagcaggcctagaaggccatttatcgctatcaactttgtatagaaaagttgggccgaattcgagctcggtacggccagaatggcccggaccgaagcttgcggccgcacactgatagtttaaactgaaggcgggaaacgacaatctgatcatgagcggagaattaagggagtcacgttatgacccccgccgatgacgcgggacaagccgttttacgtttggaactgacagaaccgcaacgttgaaggagccactcagccgcgggtttctggagtttaatgagctaagcacatacgtcagaaaccattattgcgcgttcaaaagtcgcctaaggtcactatcagctagcaaatatttcttgtcaaaaatgctccactgacgttccataaattcccctcggtatccaattagagtctcatattcactctcccgggggatctcgactctagaggatcgctcaggaaggccgctgagatagaggcatggcggccaatgcgggcggcggtggagcgggaggaggcagcggcagcggcagcgtggctgcgccggcggtgtgccgccccagcggctcgcggtggacgccgacgccggagcagatcaggatgctgaaggagctctactacggctgcggcatccggtcgcccagctcggagcagatccagcgcatcaccgccatgctgcggcagcacggcaagatcgagggcaagaacgtcttctactggttccagaaccacaaggcccgcgagcgccagaagcgccgcctcaccagcctcgacgtcaacgtgcccgccgccggcgcggccgacgccaccaccagccaactcggcgtcctctcgctgtcgtcgccgccgccttcaggcgcggcgcctccctcgcccaccctcggcttctacgccgccggcaatggcggcggatcggctgtgctgctggacacgagttccgactggggcagcagcggcgctgccatggccaccgagacatgcttcctgcaggactacatgggcgtgacggacacgggcagctcgtcgcagtggccacgcttctcgtcgtcggacacgataatggcggcggccgcggcgcgggcggcgacgacgcgggcgcccgagacgctccctctcttcccgacctgcggcgacgacggcggcagcggtagcagcagctacttgccgttctggggtgccgcgtccacaactgccggcgccacttcttccgttgcgatccagcagcaacaccagctgcaggagcagtacagcttttacagcaacagcaacagcacccagctggccggcaccggcaaccaagacgtatcggcaacagcagcagcagccgccgccctggagctgagcctcagctcatggtgctccccttaccctgctgcagggagtatgtgagagcaacgcgagctgccactgctcttcactgatgtctctggaatggaaggaggaggaagtgagcatagcgttggtgcgttgctgtcaagggcgaattcacatggttaacctagacttgtccatcttctggattggccaacttaattaatgtatgaaataaaaggatgcacacatagtgacatgctaatcactataatgtgggcatcaaagttgtgtgttatgtgtaattactagttatctgaataaaagagaaagagatcatccatatttcttatcctaaatgaatgtcacgtgtctttataattctttgatgaaccagatgcatttcattaaccaaatccatatacatataaatattaatcatatataattaatatcaattgggttagcaaaacaaatctagtctaggtgtgttttgcgaatgcggccgccaccgcggtggagctcgaattccggtccgggcctagaaggccagcttcaagtttgtacaaaaaagcaggctccggccagagttacccggaccgaagcttgcatgcctgcagtgcagcgtgacccggtcgtgcccctctctagagataatgagcattgcatgtctaagttataaaaaattaccacatattttttttgtcacacttgtttgaagtgcagtttatctatctttatacatatatttaaactttactctacgaataatataatctatagtactacaataatatcagtgttttagagaatcatataaatgaacagttagacatggtctaaaggacaattgagtattttgacaacaggactctacagttttatctttttagtgtgcatgtgttctcctttttttttgcaaatagcttcacctatataatacttcatccattttattagtacatccatttagggtttagggttaatggtttttatagactaatttttttagtacatctattttattctattttagcctctaaattaagaaaactaaaactctattttagtttttttatttaataatttagatataaaatagaataaaataaagtgactaaaaattaaacaaataccctttaagaaattaaaaaaactaaggaaacatttttcttgtttcgagtagataatgccagcctgttaaacgccgtcgacgagtctaacggacaccaaccagcgaaccagcagcgtcgcgtcgggccaagcgaagcagacggcacggcatctctgtcgctgcctctggacccctctcgagagttccgctccaccgttggacttgctccgctgtcggcatccagaaattgcgtggcggagcggcagacgtgagccggcacggcaggcggcctcctcctcctctcacggcaccggcagctacgggggattcctttcccaccgctccttcgctttcccttcctcgcccgccgtaataaatagacaccccctccacaccctctttccccaacctcgtgttgttcggagcgcacacacacacaaccagatctcccccaaatccacccgtcggcacctccgcttcaaggtacgccgctcgtcctcccccccccccctctctaccttctctagatcggcgttccggtccatgcatggttagggcccggtagttctacttctgttcatgtttgtgttagatccgtgtttgtgttagatccgtgctgctagcgttcgtacacggatgcgacctgtacgtcagacacgttctgattgctaacttgccagtgtttctctttggggaatcctgggatggctctagccgttccgcagacgggatcgatttcatgattttttttgtttcgttgcatagggtttggtttgcccttttcctttatttcaatatatgccgtgcacttgtttgtcgggtcatcttttcatgcttttttttgtcttggttgtgatgatgtggtctggttgggcggtcgttctagatcggagtagaattctgtttcaaactacctggtggatttattaattttggatctgtatgtgtgtgccatacatattcatagttacgaattgaagatgatggatggaaatatcgatctaggataggtatacatgttgatgcgggttttactgatgcatatacagagatgctttttgttcgcttggttgtgatgatgtggtgtggttgggcggtcgttcattcgttctagatcggagtagaatactgtttcaaactacctggtgtatttattaattttggaactgtatgtgtgtgtcatacatcttcatagttacgagtttaagatggatggaaatatcgatctaggataggtatacatgttgatgtgggttttactgatgcatatacatgatggcatatgcagcatctattcatatgctctaaccttgagtacctatctattataataaacaagtatgttttataattattttgatcttgatatacttggatgatggcatatgcagcagctatatgtggatttttttagccctgccttcatacgctatttatttgcttggtactgtttcttttgtcgatgctcaccctgttgtttggtgttacttctgcaggtcgactttaacttagcctaggatccatgatgatgatgagcagcggccgggcgggcggcggggccaccgcggggcgatacccgttcacggcgtcgcagtggcaggagctggagcaccaggcgctcatctacaagtgcctggcgtccggcaagcccatcccttcctacctcatgccgccgctccgccgcatcctcgactccgccctcgccacgtcgccgtccctcgcctacccgccgcaaccctcactgggctggggctgcttcgggatgggcttcacccggaaggccgacgaggacccggagcccgggcggtgccggcgcacggacggcaagaagtggcgctgctccaaggaggcgtacccggactccaagtactgcgagaagcacatgcaccggggcaagaaccgttcaagaaagcctgtggaaatgtccttggccacgccggccccggcgccggcccccgccgccgccacaaccgccaccgccacctcatccccggcgccgtcctaccaccgcccggcccacgacgccacgccgtctccgtaccacgcgctgtatggaggcggcggcggcggcggcggtagcccttactcggcgtcggcacgcccaggagcaaccggaggcggcggcgcgtaccaccacgcgcagcatgtgagccccttccacctccacctcgagaccacccacccgcacccgccgccgccctacaactactccgccgaccagagggactacgcgtacgggcacgcggccgccaaggaggtcggcgagcacgccttcttctcggacggcgcgggcgagcgggtcgaccggcaggccgcggcggggcagtggcagttcaggcagctcggggtggagacgaagccgggccccacgccgctgttccccgtcgccgggtacgggcacggcgcggcgtcgccgtacggcgtggagatgggcaaggacgacgacgagcaggaggagaggcgccgccagcactgcttcgttcttggagccgacctgcggctggagcggccgtcgtcgggccatggccatggccatgaccatgacgacgccgccgccgcgcagaagccgctccggcccttcttcgacgagtggccgcaccagaagggggacaaggccgggtcgtggatggggctcgacggcgagacgcagctctccatgtccatccccatggccgccaccgacctccccgtcacctcccgcttccgtaacgacgagtgaggtaccgttaacagatctactaactatctatactgtaataatgttgtatagccgccggatagctagctagtttagtcattcagcggcgatgggtaataataaagtgtcatccatccatcaccatgcgtggcaacgtgagcaatgacctgattgaacaaattgaaatgaaaagaagaaatatgttatatgtcaacgagatttcctcataatgccactgacgacgtgtgtccaagaaatgtatcagtgatacgtatattcacaatttttttatgacttatactcacaatttgtttttttactacttatactcacaatttgttgtgcgtaccataacaatttcgatcgaatatatatcagaaagttgacgaaagtaagctcactcaaaaagttaaatgggctgcggaagctgcgtcaggcccaagttttggctattctatccggtatccacgattttgatggctgagggacatatgttcgcttaagcttcggtccgggcctagaaggccgatctcccgggcacccagctttcttgtacaaagtggccgttaacggatcggccagaatggcccggaccgggttaccgaattcgagctcggtaccctggttcacaaactcaatacaacacacagtggagtagggtattacgctccggcggcccgaaccactctaaatccttgtgtcctcgtgtgctcttccaccattaatgactgtaattgcagggacacgaagagttgtagcgcttttgccaacaagatccgctatatgctagtagagtggaacctgcacagcaacaagcatccaataatctgagaataagaattatgtgtggtgatggttctcatctctgcaactcgccattttcgcgagagaaccaaatccaagttggtgaagatcatgatttgggctcatgggctggcatagtagctattacctttgcaattgtggttcgaatctatccgatattctccttttcagggagagctaatgcttatgcttattgggtattttggtttgacactgcttcacgcccaaaaaaaggcaactatgtctgagttggatatggcccaaaaaaaggcagctatgtctgagttggatatggaagtcttctttcgtttagggtgaagtaagaccaagctcatgagcttattatcttaggtcggaacaaattagttgataggcatggcacatttatcaaattataatgattttaacagaaaagcaacacctctttttcagcagcaccagctttgcaagctgcaattgacactccaagcatagtatttgctccaaactcagcctgcatttcgcacaatatcatatctatttccatttggataaaatatattttccagaaatatgggaacagaatcaagatacagaaaaaagttgtggtagtagtggtaagtggaaacacaagtacagtgaaaagatagcattatttctgaacagtcaaattaaccgaaataagtagtatcacatactgcccctaaattgactacacccaatgtaaagaattgcttgagcatattgagccatcagttgtttgtttgtgtaacggatttgacaatgcagagttcaggagcaaaaaaccgcaaaggagagaaagagggaaaggatctcctagtatcccaccttgtggcgcgccctgtcaagtgcatgatggcctggtcgatctgcgtctgctgctgcggttccatcccaacgagtgcctccgacaccttgtcgttgatcacccgcaccgcgtaggcgacccccctggcgaggaacttccgcctctcggaggccccggccgcgtcggcggcggcgccctcgagcgcgcccacgctagccgtagatgctcggtgcacggccttgttggtgtgcaactcgacctcaacggccggtgcgctacgcccgtcaaggatctggcgcgcccgcaccctcgtgatcacggtgggcgcctcccgcctcatgtggccgacgatgaaaagcgccgggttaggggccttggcgcgcaccgccgtattcagggcctcctcgctcttgcgcgagagcaggtgcttccccaggtactcctgcactgacaaggctgccacagcggtggaatttgtcctcacgacttcgccacgtcgtcctcacctccctggcttcccacgactccgccgtatcgaggtgctcggtgggtcgtcttaatccgaagtccgaactaggaagacgagacagagaggtctgaggaatgggcctcgtttgatgttgagctgaattatttttccagcataagcccaggtcttggtccatgaacaaaattactagaaacccagcccagtactacgatctaaaagagggactgccactggatagctctctctagcattctccacgctccaatacagcggcgtcgtgtctatccgggtctatccgcgaacacgtgagaactctccagaaactgctttctcctccacttcatctctctcgctttccctctataaaaagaccccttctaggaattgagggagacagcaagcaccaagcagcgatccgaagctcaatcaattcactcaaacctcttccccaaatcttcgattagatcttcgttgacaagaagactagaaccgaacctgacatgtccaacctgctcacggttcaccagaaccttccggctcttccagtggacgcgacgtccgatgaagtcaggaagaacctcatggacatgttccgcgacaggcaagcgttcagcgagcacacctggaagatgctgctctccgtctgccgctcctgggctgcatggtgcaagctgaacaacaggaagtggttccccgctgagcccgaggacgtgagggattaccttctgtacctgcaagcgcgaggtttgtttctgcttctacctttgatatatatataataattatcattaattagtagtaatataatatttcaaatatttttttcaaaataaaagaatgtagtatatagcaattgcttttctgtagtttataagtgtgtatattttaatttataacttttctaatatatgaccaaaacatggtgatgcctaggtctggcagtgaagaccatccagcaacaccttggacaactgaacatgcttcacaggcgctccggcctcccgcgccccagcgactcgaacgccgtgagcctcgtcatgcgccgcatcaggaaggaaaacgtcgatgccggcgaaagggcaaagcaggccctcgcgttcgagaggaccgatttcgaccaggtccgcagcctgatggagaacagcgacaggtgccaggacattaggaacctggcgttcctcggaattgcatacaacacgctcctcaggatcgcggaaattgcccgcattcgcgtgaaggacattagccgcaccgacggcggcaggatgcttatccacattggcaggaccaagacgctcgtttccaccgcaggcgtcgaaaaggccctcagcctcggagtgaccaagctcgtcgaacgctggatctccgtgtccggcgtcgcggacgacccaaacaactacctcttctgccgcgtccgcaagaacggggtggctgcccctagcgccaccagccaactcagcacgagggccttggaaggtattttcgaggccacccaccgcctgatctacggcgcgaaggatgacagcggtcaacgctacctcgcatggtccgggcactccgcccgcgttggagctgctagggacatggcccgcgccggtgtttccatccccgaaatcatgcaggcgggtggatggacgaacgtgaacattgtcatgaactacattcgcaaccttgacagcgagacgggcgcaatggttcgcctcctggaagatggtgactgaggtacccaacctagacttgtccatcttctggattggccaacttaattaatgtatgaaataaaaggatgcacacatagtgacatgctaatcactataatgtgggcatcaaagttgtgtgttatgtgtaattactagttatctgaataaaagagaaagagatcatccatatttcttatcctaaatgaatgtcacgtgtctttataattctttgatgaaccagatgcatttcattaaccaaatccatatacatataaatattaatcatatataattaatatcaattgggttagcaaaacaaatctagtctaggtgtgttttgcgatccgatatcgaattggccacggtaccagctgctgctgttctagggttcacaagtctgcctatttgtcttccccaatggagctatggttgtctggtctggtccttggtcgtgtcccgtttcattgtgtactatttacctgtaatgtgtatccttaagtctggtttgatggtgtctgaaacgttttgctgtggtagagcagcatggaagaactataatgaataagtgatccctaatcattgtgtccaaattttgcttctgctatacccttttgtgctgtttcttatgttttgcttaaaaatttgatctgacaaacaaatttgtctaaattatgctcttgttctgactgtgtactgtacacatttgtattgctaccggtttggcacatagttttctctttgattgcagatcaaacccttctgattgcagattgcttggctatggctgatgtgctcactgttcttctttagcttgtatattgctgatggtggcttggctacggctgaaaaagttgctgctgcgccgacttggcaactgttgctccagtaatgctttgtcctctcttcctagccgccgacttggcacttggcagctgttgctcctgtaatgcgttgttatctcttatctcttgagatgtactatgattttgaggctgtttgacttgtgccagattgccagtgctgatgctatattatctcaggtttttatgctagtatatgttttactgtgtgctgcctgtgtcgagttacgtaatctattgaaccgctatgcgtgttgatgccctgttgttgcttgccagattgatgcccctgttgcttgcagcttgcaagctgtagtgaaatcctaaaattccaaaccaaatctattctgaacttttgaagatctgtgatgtccggaagaaaagattcaaacagataaacgggactctccagaatctataaaataaatgatcgacaaacgctttgctttggtaggcttcaagcttggtcacccggtccgggcctagaaggccagcttcggccgccccgggcaactttattatacaaagttgatagataaatcagatatctggttcctaaggacccggcggaccgattaaactgattcggtccgacgcgttacctaataacttcgtatagcatacattatacgaagttattagctaactaactagtaagcttaagccatgggtcgacggatccgttaactagcgtggcatttggcaccgccgcacactatgcgagctaggagtgctagtttacagatgaaactatgaaaccaagaaaacacaattgtccgtagctagcgcgtggcgtcgtgtcaagcttcacacagtatcttcgttcttcactataaatcgcgcctgttgttcgtgagacccaccaccgtggataacagtcccctaataataagcgatcaacagcactgctgatggctgaacaccgaggcgccgccgcgcgtaaccatccgccggagcagcccgtcgtgccggcgaacgacgccttccccgaccgcgcccagcagctctgcctcgacgccgggcgcgcgctcgcgatgtgcggcgtgctcgtcgccgtccctcccgcattttacgcgtcgacgtcgcggacgacaccgcacttgccttcgtcggcttcgtcctctggatcatcggtgcgtggctgtgcctcctggcgctcacgcccttggctccacgggcggtgagggcgggcggggccgccgccagcaccttgctgatcaggtgcctgtccctttcatgaactactagcgcccgcgcccgcggccgccgggcacaagagaacacatcgatgttcgctgcgtacgtcagcaataaggcactctttgtcagtagtcgagtgcatatgttgggtgtttgccctgggagatttcaagtgttgtggccattatcccgcaggataaaaaatcggcggcttttggattgatacggaaaataacgatgtttcatgctcgtgttgtgtgtgtgacatcttgtcagccaagtttttaaccgttgctactccccctctgtgggctcagtgtgtggaccggaatacgtcgtacataggccgtagcctaagcccaatatgccgtttttcaggttggcctgtgtgacgacaagcgggtctcaaaagcccatcacgcaactggcctgcaattattggaggagagcgcgtcgagttggttccagaggctgcgtggtggggccggactctgcgacgacctctcgttcgcgtccgatttggttgccgtgagccgtgacgtaacgcctccttccgttcctccctatataagttccacccccgggtccggtttccccaagccccagtgacccccgatcccgatcgcgaaatctccgcacccgccggcaagggaccgaagcaagcctctctcccgaccgtcgcatcaaggtacgcgtccgctcgatctgtcctcttccttctcgatttgacttgctgtggtgcccgatcacgggatcagaatcgcaccagtgtagatttcgcatgttctaagatgtgttagtttccaggctaatccagttctcttgacgcccgatccgatcgagctccgtgtttatttcagcctaatcgtagtattcccctaaaatttcctcattagggggttcgcaagattgttggtcgacaggttcacttatgctcgatcgcttacttttagtcgattcatgctgcgtactattgttgccccccgtggttttatcttttctcgtgtgaaatccagtagatatagtagatatcgtagcattaggttttaattcaatcgattgattattgtatcatcaaaattgagaagttcgaatcatgcctatcatgctgcctcaaccgaaatcctgtatattgaagtttcaattcaattgattgatcattcattagattcaaccaaaatctagaaggttagatgacgcatgtcatgctgcctgcgtagtttacctttgatctgtttatgattaccttatcagtaggatatttgtgattttgggaagtagcactaactgattcatgctgacatgatgttccctttcagattatactgttgagtcctatctaattgatgctttgtatgctatatgaatacgtcatggtaaattagcagttaattagcatattagcaattgggcgtacctcatcaggattgctcttgtagatgtgtgtggtgatgtttcttgttcaattcatgttctgctttaaaagtatgtgttctctgtttgttaattaagattcatggttataatgatttggacctaattaatcagggttgcccttttagatgcgtggttacttgttgagttcatttttttcctgctatagttgtatgcgtttgttcattcatggttagatttgatttgtttcttctctattccatgccttccatatacttcaattgtagcttaacatgagatttctgtatatgcaggtcgaccgccggggatccacacgacaccatggcccagtccaagcacggcctgaccaaggagatgaccatgaagtaccgcatggagggctgcgtggacggccacaagttcgtgatcaccggcgagggcatcggctaccccttcaagggcaagcaggccatcaacctgtgcgtggtggagggcggccccttgcccttcgccgaggacatcttgtccgccgccttcatgtacggcaaccgcgtgttcaccgagtacccccaggacatcgtcgactacttcaagaactcctgccccgccggctacacctgggaccgctccttcctgttcgaggacggcgccgtgtgcatctgcaacgccgacatcaccgtgagcgtggaggagaactgcatgtaccacgagtccaagttctacggcgtgaacttccccgccgacggccccgtgatgaagaagatgaccgacaactgggagccctcctgcgagaagatcatccccgtgcccaagcagggcatcttgaagggcgacgtgagcatgtacctgctgctgaaggacggtggccgcttgcgctgccagttcgacaccgtgtacaaggccaagtccgtgccccgcaagatgcccgactggcacttcatccagcacaagctgacccgcgaggaccgcagcgacgccaagaaccagaagtggcacctgaccgagcacgccatcgcctccggctccgccttgccctccggactcagatctcgatagagtcaacctagacttgtccatcttctggattggccaacttaattaatgtatgaaataaaaggatgcacacatagtgacatgctaatcactataatgtgggcatcaaagttgtgtgttatgtgtaattactagttatctgaataaaagagaaagagatcatccatatttcttatcctaaatgaatgtcacgtgtctttataattctttgatgaaccagatgcatttcattaaccaaatccatatacatataaatattaatcatatataattaatatcaattgggttagcaaaacaaatctagtctaggtgtgttttgcgaattgcggcgcccttactttaacgcctctaaccaacacccctttatctttataaggaacaataaacagaatttgccccactgttctaaatcacctaataatatccccagctaaaaacaataaaggtttcctagaattaagacaagcatgactgttcctccaggagggtttggaacattgttgcagtcttgcagatacgggcgaagggtgagaaacagagcggagggctggaggtgacctcggtagtcgacgccggagttgagcttgacaacgacggggcggcccctgatggacttgaggaagtccgatggcgtcttcaccgtcccgccggcgcccgaggcgggcctgtcgctgccgccgccgccgctgctcatcttgcgcgctgtgcccccggcggtgtccctgtgttgcggatcgcgggtgggccaggtggatgcgagggcgacccgtttggactccggccggagccgccggatccctggtcggtgtcagtgccgtttactctgggccccacgtgtcagtaccgtctgtagatgacaacaacccgtcgtccacagtcatgtccaaaatatcctttcttcttttttttcgattcggatatctatcttccttttttttttccaaaaatcttcttgacgcaccagcgcgcacgtttgtggtaaacgccgacacgtcggtcccacgtcgatagaccccacccaccagtgagtagcgtgtacgtattcgggggtgacggacgtgtcgccgtcgtcttgctagtcccattcccatctgagccacacatctctgaacaaaaaaaaggagggaggcctccacgcacatccccctccgtgccacccgccccaaaccctcgcgccgcctccgagacagccgccgcaaccatggccaccgccgccgccgcgtctaccgcgctcactggcgccactaccgctgcgcccaaggcgaggcgccgggcgcacctcctggccacccgccgcgccctcgccgcgcccatcaggtgctcagcggcgtcacccgccatgccgatggctcccccggccaccccgctccggccgtggggccccaccgagccccgcaagggtgctgacatcctcgtcgagtccctcgagcgctgcggcgtccgcgacgtcttcgcctaccccggcggcgcgtccatggagatccaccaggcactcacccgctcccccgtcatcgccaaccacctcttccgccacgagcaaggggaggcctttgccgcctccggctacgcgcgctcctcgggccgcgtcggcgtctgcatcgccacctccggccccggcgccaccaacctagtctccgcgctcgccgacgcgctgctcgattccgtccccatggtcgccatcacgggacaggtggcgcgacgcatgattggcaccgacgccttccaggagacgcccatcgtcgaggtcacccgctccatcaccaagcacaactacctggtcctcgacgtcgacgacatcccccgcgtcgtgcaggaggctttcttcctcgcctcctctggtcgaccagggccggtgcttgtcgacatccccaaggacatccagcagcagatggcggtgcctgtctgggacaagcccatgagtctgcctgggtacattgcgcgccttcccaagccccctgcgactgagttgcttgagcaggtgctgcgtcttgttggtgaatcgcggcgccctgttctttatgtgggcggtggctgcgcagcatctggtgaggagttgcgacgctttgtggagctgactggaatcccggtcacaactactcttatgggcctcggcaacttccccagcgacgacccactgtctctgcgcatgctaggtatgcatgggacggtgtatgcaaattatgcagtggataaggccgatctgttgcttgcacttggtgtgcggtttgatgatcgcgtgacagggaagattgaggcttttgcaagcagggctaagattgtgcacgttgatattgatccggctgagattggcaagaacaagcagccacatgtgtccatctgtgcagatgttaagcttgctttgcagggcatgaatgctcttcttgaaggaagcacatcaaagaagagctttgactttggctcatggaacgatgagttggatcagcagaagagggaattcccccttgggtataaaacatctaatgaggagatccagccacaatatgctattcaggttcttgatgagctgacgaaaggcgaggccatcatcggcacaggtgttgggcagcaccagatgtgggcggcacagtactacacttacaagcggccaaggcagtggttgtcttcagctggtcttggggctatgggatttggtttgccggctgctgctggtgcttctgtggcaaacccaggtgtcactgttgttgacatcgatggagatggtagctttctcatgaacgttcaggagctagctatgatccgaattgagaacctcccagtgaaggtctttgtgctaaacaaccagcacctggggatggtggtgcagttggaggacaggttctataaggccaacagagcgcacacatacttgggaaacccagagaatgaaagtgagatatatccagatttcgtgacgatcgccaaagggttcaacattccagcggtccgtgtgacaaagaagaacgaagtccgcgcagcgataaagaagatgctcgagactccagggccgtacctcttggatataatcgtcccacaccaggagcatgtgttgcctatgatccctagtggtggggctttcaaggatatgatcctggatggtgatggcaggactgtgtactgactagctagtcagttaacagatctgccagatcctcggtgtacaaataacccgtcttatcctatgagacgggccggcgtcagtgtgttctggaggaatttttatgtcagagcctttttctttgtgtgcttgatgtagatgccaagggaagcttattggctgttgaagcttgatgcaaaataaattatggaactctgttttttgtttatctaataataactagcaaatatgcttccattgcattgaaactaacagccttttgtgtttccaagttttattttgtgacaatgtcatctatttcaattagttgtggaatcggaaacttgcaggactaacttggaaactccaatccctcagcatcctggactttttcctggtgtaatccatgtagatattattttaatcatcattttagttctggaggtttttccatctccggttttgctcccctttcttcaaaaaaaaaaaaaaaatgccgtaggcgccgcaacgcccacctgttgttcaaactcatgggcacgagtggctcgaagattttatacaacaattgctgtagtttcaccgttgctggtgaagaagcatttttttaaaaaaatatagtggtattcattttaattagtttagttgtgcagcgagcaaaatttggacatgctctgctcggaatctgatcgacctagacacagattagcagcagtagctttgtcatctgttccaagagttgcgatctgatagaagaaaaaaaaaccttcccttcaatgtaaaaccgaaactaacaagaaagaagcacagtgccgtttaggcaagtatggagtacgtattaagcatgtagaaggccatgcatgaaccactaacaagaaagaagcgcagtgccattcaggcaagcataagcatgtagattggcatgcatgaacaactaacagtagatcgtctctggtctgattagaagttttttgggaagccaagaaatcatgtacaactggttccatctcaaattccgtggcaaaaagaggcctaagcaacatacctcgagtagatcacattcaagcttggtcacccggtccgtcaatattctgattccgatgacttcgtaggttcctagctcaagccgctcgtgtccaagcgtcacttacgattagctaatgattacggcatctaggaccgactagtggcgcgccgactagctagctaaggtaccgagctcgaattcattccgattaatcgtggcctcttgctcttcaggatgaagagctatgtttaaacgtgcaagcgctactagacaattcagtacattaaaaacgtccgcaatgtgttattaagttgtctaagcgtcaatttgtttacaccacaatatatcctgcca

SEQ ID NO: 88 - DNA, 23775 bp, Artificial sequence
  PHP98392
gtttacccgccaatatatcctgtcaaacactgcggccgcacttgaccgcggatggagccggagctgtggtgaggccatcgacgggaggtgggggagaacacagtctcagtgttctttgtgagtccgcaaggtttttagcttttctgtattaattaaggttgctgttggctgtagaatacggtcgtggaagagctgtatcggtagctactacgtaagctattatatactggaagtctggagctcgtcgatctccggtcgtcttcctccatttctcctcgtcttgctttgactgctgctaccatttgcttctgttttctgatgaagcatgccatgtcggccaccagtgtttgtgtggtttttgcagggaatggctttcaagtgctgtgattgaatggccctcgtcgtcctcggctgagctcacatggacgcgtcatgtgagtgagatatatgatcatatgatgagtggggttcgggtgagtgcgtacttgaagtaggatcccgctttcactcattcattcattggcctttaaaccgggaaattttcgcgaggagatggagggaagcaagcagggtgacgagtgcagagtgccgcgagcgctttgtcaaaaggcaccgccgtaggcaaaaaaatcaatggccctgactgactcgatggtagtactactgtagagactagagagggttgctccccatatcttcgtgtgacttttactccagcattgcatttccgtcattgagacgttaattaatagcagctttcgggacagatgactgtggccatgtttcgtcacggccgcttcgtgccagctgggggtactatagtactgtgattttgttagtaaaaactttcattaggccaccattgacgaccgggccttcgcttttgctgcgctaattaaccatttcccggcgaccgaagggaacatgaacatgccccgacacatgagggcatgaggactagtgttctccctgtcgttcgttgacttgactagtgatagtttaaacgctcttcaactggaagagcggttactaccggttcactagctagctgctaatcgagctagttaccctatgaggtgacatgaagcgctcacggttactatgacggttagcttcacgactgttggtggcagtagcgtacgacttagctatagttccggacttacctagcgtgcagcgtgacccggtcgtgcccctctctagagataatgagcattgcatgtctaagttataaaaaattaccacatattttttttgtcacacttgtttgaagtgcagtttatctatctttatacatatatttaaactttactctacgaataatataatctatagtactacaataatatcagtgttttagagaatcatataaatgaacagttagacatggtctaaaggacaattgagtattttgacaacaggactctacagttttatctttttagtgtgcatgtgttctcctttttttttgcaaatagcttcacctatataatacttcatccattttattagtacatccatttagggtttagggttaatggtttttatagactaatttttttagtacatctattttattctattttagcctctaaattaagaaaactaaaactctattttagtttttttatttaataatttagatataaaatagaataaaataaagtgactaaaaattaaacaaataccctttaagaaattaaaaaaactaaggaaacatttttcttgtttcgagtagataatgccagcctgttaaacgccgtcgacgagtctaacggacaccaaccagcgaaccagcagcgtcgcgtcgggccaagcgaagcagacggcacggcatctctgtcgctgcctctggacccctctcgagagttccgctccaccgttggacttgctccgctgtcggcatccagaaattgcgtggcggagcggcagacgtgagccggcacggcaggcggcctcctcctcctctcacggcaccggcagctacgggggattcctttcccaccgctccttcgctttcccttcctcgcccgccgtaataaatagacaccccctccacaccctctttccccaacctcgtgttgttcggagcgcacacacacacaaccagatctcccccaaatccacccgtcggcacctccgcttcaaggtacgccgctcgtcctcccccccccccctctctaccttctctagatcggcgttccggtccatgcatggttagggcccggtagttctacttctgttcatgtttgtgttagatccgtgtttgtgttagatccgtgctgctagcgttcgtacacggatgcgacctgtacgtcagacacgttctgattgctaacttgccagtgtttctctttggggaatcctgggatggctctagccgttccgcagacgggatcgatttcatgattttttttgtttcgttgcatagggtttggtttgcccttttcctttatttcaatatatgccgtgcacttgtttgtcgggtcatcttttcatgcttttttttgtcttggttgtgatgatgtggtctggttgggcggtcgttctagatcggagtagaattctgtttcaaactacctggtggatttattaattttggatctgtatgtgtgtgccatacatattcatagttacgaattgaagatgatggatggaaatatcgatctaggataggtatacatgttgatgcgggttttactgatgcatatacagagatgctttttgttcgcttggttgtgatgatgtggtgtggttgggcggtcgttcattcgttctagatcggagtagaatactgtttcaaactacctggtgtatttattaattttggaactgtatgtgtgtgtcatacatcttcatagttacgagtttaagatggatggaaatatcgatctaggataggtatacatgttgatgtgggttttactgatgcatatacatgatggcatatgcagcatctattcatatgctctaaccttgagtacctatctattataataaacaagtatgttttataattattttgatcttgatatacttggatgatggcatatgcagcagctatatgtggatttttttagccctgccttcatacgctatttatttgcttggtactgtttcttttgtcgatgctcaccctgttgtttggtgttacttctgcaggtcgactctagaggatcaattcgctagcataacttcgtatagcatacattatacgaagttatccagatccacgttaccaagcggccgcacactgatagtttaaactgaaggcgggaaacgacaatctgatcatgagcggagaattaagggagtcacgttatgacccccgccgatgacgcgggacaagccgttttacgtttggaactgacagaaccgcaacgattgaaggagccactcagccgcgggtttctggagtttaatgagctaagcacatacgtcagaaaccattattgcgcgttcaaaagtcgcctaaggtcactatcagctagcaaatatttcttgtcaaaaatgctccactgacgttccataaattcccctcggtatccaattagagtctcatattcactcccatggcggccaatgcgggcggcggtggagcgggaggaggcagcggcagcggcagcgtggctgcgccggcggtgtgccgccccagcggctcgcggtggacgccgacgccggagcagatcaggatgctgaaggagctctactacggctgcggcatccggtcgcccagctcggagcagatccagcgcatcaccgccatgctgcggcagcacggcaagatcgagggcaagaacgtcttctactggttccagaaccacaaggcccgcgagcgccagaagcgccgcctcaccagcctcgacgtcaacgtgcccgccgccggcgcggccgacgccaccaccagccaactcggcgtcctctcgctgtcgtcgccgccgccttcaggcgcggcgcctccctcgcccaccctcggcttctacgccgccggcaatggcggcggatcggctgtgctgctggacacgagttccgactggggcagcagcggcgctgctatggccaccgagacatgcttcctgcaggactacatgggcgtgacggacacgggcagctcgtcgcagtggccacgcttctcgtcgtcggacacgataatggcggcggccgcggcgcgggcggcgacgacgcgggcgcccgagacgctccctctcttcccgacctgcggcgacgacggcggcagcggtagcagcagctacttgccgttctggggtgccgcgtccacaactgccggcgccacttcttccgttgcgatccaacagcaacaccagctgcaggagcagtacagcttttacagcaacagcaacagcacccagctggccggcaccggcaaccaagacgtatcggcaacagcagcagcagccgccgccctggagctgagcctcagctcatggtgctccccttaccctgctgcagggagtatgtgagagcaacgcgagctgccactgctcttcactgatgtctctggaatggaaggaggaggaagtgagaacagatcattcgacaaagcagcattagtccgttgatcggtggaagaccactcgtcagtgttgagttgaatgtttgatcaataaaatacggcaatgctgtaagggttgttttttatgccattgataatacactgtactgttcagttgttgaactctatttcttagccatgccaagtgcttttcttattttgaataacattacagcaaaaagttgaaagacaaaaaaaaaaacccccgaacagagtgctttgggtcccaagcttctttagactgtgttcggcgttccccctaaatttctccccctatatctcactcacttgtcacatcagcgttctctttccccctatatctccacgctctacagcagttccacctatatcaaacctctataccccaccacaacaatattatatactttcatcttcaactaactcatgtaccttccaatttttttctactaataattatttacgtgcacagaaacttagcaaggagagagagagcgggaatttaaatgctcggcgttaggcttttagtccgctaggtggctagaccgaggttaggacgctagttcactaggggcctagtggtgttttaagacgtcacggtcactacgaatcgaccgaagcttgcatgggccgcatcgagcagctggcttgtggggaccagacaaaaaaggaatggtgcagaattgttaggcgcacctaccaaaagcatctttgcctttattgcaaagataaagcagattcctctagtacaagtggggaacaaaataacgtggaaaagagctgtcctgacagcccactcactaatgcgtatgacgaacgcagtgacgaccacaaaactcgagcaacgagatcatgagccaatcaaagaggagtgatgtagacctaaagcaataatggagccatgacgtaagggcttacgcccatacgaaataattaaaggctgatgtgacctgtcggtctctcagaacctttactttttatgtttggcgtgtatttttaaatttccacggcaatgacgatgtgaccgtcgacccactaaaacattgctttgtcaaaagctaaaaaagatgatgcccgacagccacttgtgtgaagcatgagaagccggtccctccactaagaaaattagtgaagcatcttccagtggtccctccactcacagctcaatcagtgagcaacaggacgaaggaaatgacgtaagccatgacgtctaatcccagggccagcttgcatgcctgcagtgcagcgtgacccggtcgtgcccctctctagagataatgagcattgcatgtctaagttataaaaaattaccacatattttttttgtcacacttgtttgaagtgcagtttatctatctttatacatatatttaaactttactctacgaataatataatctatagtactacaataatatcagtgttttagagaatcatataaatgaacagttagacatggtctaaaggacaattgagtattttgacaacaggactctacagttttatctttttagtgtgcatgtgttctcctttttttttgcaaatagcttcacctatataatacttcatccattttattagtacatccatttagggtttagggttaatggtttttatagactaatttttttagtacatctattttattctattttagcctctaaattaagaaaactaaaactctattttagtttttttatttaataatttagatataaaatagaataaaataaagtgactaaaaattaaacaaataccctttaagaaattaaaaaaactaaggaaacatttttcttgtttcgagtagataatgccagcctgttaaacgccgtcgacgagtctaacggacaccaaccagcgaaccagcagcgtcgcgtcgggccaagcgaagcagacggcacggcatctctgtcgctgcctctggacccctctcgagagttccgctccaccgttggacttgctccgctgtcggcatccagaaattgcgtggcggagcggcagacgtgagccggcacggcaggcggcctcctcctcctctcacggcaccggcagctacgggggattcctttcccaccgctccttcgctttcccttcctcgcccgccgtaataaatagacaccccctccacaccctctttccccaacctcgtgttgttcggagcgcacacacacacaaccagatctcccccaaatccacccgtcggcacctccgcttcaaggtacgccgctcgtcctcccccccccccctctctaccttctctagatcggcgttccggtccatgcatggttagggcccggtagttctacttctgttcatgtttgtgttagatccgtgtttgtgttagatccgtgctgctagcgttcgtacacggatgcgacctgtacgtcagacacgttctgattgctaacttgccagtgtttctctttggggaatcctgggatggctctagccgttccgcagacgggatcgatttcatgattttttttgtttcgttgcatagggtttggtttgcccttttcctttatttcaatatatgccgtgcacttgtttgtcgggtcatcttttcatgcttttttttgtcttggttgtgatgatgtggtctggttgggcggtcgttctagatcggagtagaattctgtttcaaactacctggtggatttattaattttggatctgtatgtgtgtgccatacatattcatagttacgaattgaagatgatggatggaaatatcgatctaggataggtatacatgttgatgcgggttttactgatgcatatacagagatgctttttgttcgcttggttgtgatgatgtggtgtggttgggcggtcgttcattcgttctagatcggagtagaatactgtttcaaactacctggtgtatttattaattttggaactgtatgtgtgtgtcatacatcttcatagttacgagtttaagatggatggaaatatcgatctaggataggtatacatgttgatgtgggttttactgatgcatatacatgatggcatatgcagcatctattcatatgctctaaccttgagtacctatctattataataaacaagtatgttttataattattttgatcttgatatacttggatgatggcatatgcagcagctatatgtggatttttttagccctgccttcatacgctatttatttgcttggtactgtttcttttgtcgatgctcaccctgttgtttggtgttacttctgcaggtcgactttaacttagcctaggatccatggccactgtgaacaactggctcgctttctccctctccccgcaggagctgccgccctcccagacgacggactccacactcatctcggccgccaccgccgaccatgtctccggcgatgtctgcttcaacatcccccaagattggagcatgaggggatcagagctttcggcgctcgtcgcggagccgaagctggaggacttcctcggcggcatctccttctccgagcagcatcacaaggccaactgcaacatgatacccagcactagcagcacagtttgctacgcgagctcaggtgctagcaccggctaccatcaccagctgtaccaccagcccaccagctcagcgctccacttcgcggactccgtaatggtggcttcctcggccggtgtccacgacggcggtgccatgctcagcgcggccgccgctaacggtgtcgctggcgctgccagtgccaacggcggcggcatcgggctgtccatgattaagaactggctgcggagccaaccggcgcccatgcagccgagggtggcggcggctgagggcgcgcaggggctctctttgtccatgaacatggcggggacgacccaaggcgctgctggcatgccacttctcgctggagagcgcgcacgggcgcccgagagtgtatcgacgtcagcacagggtggagccgtcgtcgtcacggcgccgaaggaggatagcggtggcagcggtgttgccggcgctctagtagccgtgagcacggacacgggtggcagcggcggcgcgtcggctgacaacacggcaaggaagacggtggacacgttcgggcagcgcacgtcgatttaccgtggcgtgacaaggcatagatggactgggagatatgaggcacatctttgggataacagttgcagaagggaagggcaaactcgtaagggtcgtcaagtctatttaggtggctatgataaagaggagaaagctgctagggcttatgatcttgctgctctgaagtactggggtgccacaacaacaacaaattttccagtgagtaactacgaaaaggagctcgaggacatgaagcacatgacaaggcaggagtttgtagcgtctctgagaaggaagagcagtggtttctccagaggtgcatccatttacaggggagtgactaggcatcaccaacatggaagatggcaagcacggattggacgagttgcagggaacaaggatctttacttgggcaccttcagcacccaggaggaggcagcggaggcgtacgacatcgcggcgatcaagttccgcggcctcaacgccgtcaccaacttcgacatgagccgctacgacgtgaagagcatcctggacagcagcgccctccccatcggcagcgccgccaagcgcctcaaggaggccgaggccgcagcgtccgcgcagcaccaccacgccggcgtggtgagctacgacgtcggccgcatcgcctcgcagctcggcgacggcggagccctggcggcggcgtacggcgcgcactaccacggcgccgcctggccgaccatcgcgttccagccgggcgccgccagcacaggcctgtaccacccgtacgcgcagcagccaatgcgcggcggcgggtggtgcaagcaggagcaggaccacgcggtgatcgcggccgcgcacagcctgcaggacctccaccacctgaacctgggcgcggccggcgcgcacgactttttctcggcagggcagcaggccgccgccgctgcgatgcacggcctgggtagcatcgacagtgcgtcgctcgagcacagcaccggctccaactccgtcgtctacaacggcggggtcggcgacagcaacggcgccagcgccgtcggcggcagtggcggtggctacatgatgccgatgagcgctgccggagcaaccactacatcggcaatggtgagccacgagcaggtgcatgcacgggcctacgacgaagccaagcaggctgctcagatggggtacgagagctacctggtgaacgcggagaacaatggtggcggaaggatgtctgcatgggggactgtcgtgtctgcagccgcggcggcagcagcaagcagcaacgacaacatggccgccgacgtcgggcatggcggcgcgcagctcttcagtgtctggaacgacacttaagcgtacctagtggtacctgacatcttatagtctgcaacctctcgtgtctgaattcctatctttatcaagtgttattgcttccacgactataggacagctttcgtcgaaagcttttgctcatgtgatctcgaaggattcatctagtctgatttttcgtgacttgtatcggttttattggattcatccaacatatatcaataaaaaatgagttgtgtttcctttcttcctagttcagttaaaattatttccctcctgcgcttgtgctgtaattgtctgtgtacctgttgtttgtgactgtgttagttcccttggatatgatttcgtatttgatatgtacatggagatagcttagcttcattattggagtatgaagttagtatgacatagtcactctcctggaaaattgacactgcaaaccatatttttattctgaaccacaaatcctagtcagtccgctggcatatgccgtccgtttgctgaatccagaacgtgggtttggagatgtacggctgagatgcctctatgcgaaggggatttcgtggtgaaacgagatgggagtagagcaacgcccgtggaagatgcttcaaacttccacacttttgagcaacgatcggcagtagtaaggtagacgatttcaagatcaaagcatatgaagataaacaacatcaacaacaaaatttgttggggttctatagagagaaacagagctacatacatacactgttttgtatctaccatctgagatgatgaaaagatgaaaaactaaagaatgccccggcgccaacgccaggacacgccgcgcgcgcgtcacccgagccatctcttgacccagccggcgctgtatatttacacacgttgcagcatcgatcaccacctgttcgatcgcgtcgccgtcaccggcgcgccgcgacttattgaactagtctagggcgcggctaacaacctagcttagattgccttgtctaaacccttaggctaacgcgccactctagaaggccgatctcccccgaacgcgccagatccgatatcgatgggccctggccgaagcttggtcacccgcaccttgctagttggatattacctcttctcttcaaagtatccttgaacgctcaccggttatcaaatctctacactatagctctgtagtcttgctagatagttagttctttagctctctctagaggttcacaaactcaatacaacacacagtggagtagggtattacgctccggcggcccgaaccactctaaatccttgtgtcctcgtgtgctcttccaccattaatgactgtaattgcagggacacgaagagttgtagcgcttttgccaacaagatccgctatatgctagtagagtggaacctgcacagcaacaagcatccaataatctgagaataagaattatgtgtggtgatggttctcatctctgcaactcgccattttcgcgagagaaccaaatccaagttggtgaagatcatgatttgggctcatgggctggcatagtagctattacctttgcaattgtggttcgaatctatccgatattctccttttcagggagagctaatgcttatgcttattgggtattttggtttgacactgcttcacgcccaaaaaaaggcaactatgtctgagttggatatggcccaaaaaaaggcagctatgtctgagttggatatggaagtcttctttcgtttagggtgaagtaagaccaagctcatgagcttattatcttaggtcggaacaaattagttgataggcatggcacatttatcaaattataatgattttaacagaaaagcaacacctctttttcagcagcaccagctttgcaagctgcaattgacactccaagcatagtatttgctccaaactcagcctgcatttcgcacaatatcatatctatttccatttggataaaatatattttccagaaatatgggaacagaatcaagatacagaaaaaagttgtggtagtagtggtaagtggaaacacaagtacagtgaaaagatagcattatttctgaacagtcaaattaaccgaaataagtagtatcacatactgcccctaaattgactacacccaatgtaaagaattgcttgagcatattgagccatcagttgtttgtttgtgtaacggatttgacaatgcagagttcaggagcaaaaaaccgcaaaggagagaaagagggaaaggatctcctagtatcccaccttgtggcgcgccctgtcaagtgcatgatggcctggtcgatctgcgtctgctgctgcggttccatcccaacgagtgcctccgacaccttgtcgttgatcacccgcaccgcgtaggcgacccccctggcgaggaacttccgcctctcggaggccccggccgcgtcggcggcggcgccctcgagcgcgcccacgctagccgtagatgctcggtgcacggccttgttggtgtgcaactcgacctcaacggccggtgcgctacgcccgtcaaggatctggcgcgcccgcaccctcgtgatcacggtgggcgcctcccgcctcatgtggccgacgatgaaaagcgccgggttaggggccttggcgcgcaccgccgtattcagggcctcctcgctcttgcgcgagagcaggtgcttccccaggtactcctgcactgacaaggctgccacagcggtggaatttgtcctcacgacttcgccacgtcgtcctcacctccctggcttcccacgactccgccgtatcgaggtgctcggtgggtcgtcttaatccgaagtccgaactaggaagacgagacagagaggtctgaggaatgggcctcgtttgatgttgagctgaattatttttccagcataagcccaggtcttggtccatgaacaaaattactagaaacccagcccagtactacgatctaaaagagggactgccactggatagctctctctagcattctccacgctccaatacagcggcgtcgtgtctatccgggtctatccgcgaacacgtgagaactctccagaaactgctttctcctccacttcatctctctcgctttccctctataaaaagaccccttctaggaattgagggagacagcaagcaccaagcagcgatccgaagctcaatcaattcactcaaacctcttccccaaatcttcgattagatcttcgttgacaagaagactagaaccgaacctgacatgtccaacctgctcacggttcaccagaaccttccggctcttccagtggacgcgacgtccgatgaagtcaggaagaacctcatggacatgttccgcgacaggcaagcgttcagcgagcacacctggaagatgctgctctccgtctgccgctcctgggctgcatggtgcaagctgaacaacaggaagtggttccccgctgagcccgaggacgtgagggattaccttctgtacctgcaagcgcgaggtttgtttctgcttctacctttgatatatatataataattatcattaattagtagtaatataatatttcaaatatttttttcaaaataaaagaatgtagtatatagcaattgcttttctgtagtttataagtgtgtatattttaatttataacttttctaatatatgaccaaaacatggtgatgcctaggtctggcagtgaagaccatccagcaacaccttggacaactgaacatgcttcacaggcgctccggcctcccgcgccccagcgactcgaacgccgtgagcctcgtcatgcgccgcatcaggaaggaaaacgtcgatgccggcgaaagggcaaagcaggccctcgcgttcgagaggaccgatttcgaccaggtccgcagcctgatggagaacagcgacaggtgccaggacattaggaacctggcgttcctcggaattgcatacaacacgctcctcaggatcgcggaaattgcccgcattcgcgtgaaggacattagccgcaccgacggcggcaggatgcttatccacattggcaggaccaagacgctcgtttccaccgcaggcgtcgaaaaggccctcagcctcggagtgaccaagctcgtcgaacgctggatctccgtgtccggcgtcgcggacgacccaaacaactacctcttctgccgcgtccgcaagaacggggtggctgcccctagcgccaccagccaactcagcacgagggccttggaaggtattttcgaggccacccaccgcctgatctacggcgcgaaggatgacagcggtcaacgctacctcgcatggtccgggcactccgcccgcgttggagctgctagggacatggcccgcgccggtgtttccatccccgaaatcatgcaggcgggtggatggacgaacgtgaacattgtcatgaactacattcgcaaccttgacagcgagacgggcgcaatggttcgcctcctggaagatggtgactgaggtacccaacctagacttgtccatcttctggattggccaacttaattaatgtatgaaataaaaggatgcacacatagtgacatgctaatcactataatgtgggcatcaaagttgtgtgttatgtgtaattactagttatctgaataaaagagaaagagatcatccatatttcttatcctaaatgaatgtcacgtgtctttataattctttgatgaaccagatgcatttcattaaccaaatccatatacatataaatattaatcatatataattaatatcaattgggttagcaaaacaaatctagtctaggtgtgttttgcgatccgatatcgacgtctaaaaacggcccctaactaacgcttagttgcccgctagattagtcccccgttagtgcctagttagacacacgacgaactaggggctagtgccaccttgctagttggatattacctcttctcttcaaagtatccttgaacgctcaccggttatcaaatctctacactatagctctgtagtcttgctagatagttagttctttagctctcgcacgataacttcgtatagcatacattatacgaagttattcgccgcctagaagcccgatctcccggttaaaaccaaaatccagtggcgagctctcgactttaacttagcctaggatccatgatgatgatgagcagcggccgggcgggcggcggggccaccgcggggcgatacccgttcacggcgtcgcagtggcaggagctggagcaccaggcgctcatctacaagtgcctggcgtccggcaagcccatcccttcctacctcatgccgccgctccgccgcatcctcgactccgccctcgccacgtcgccgtccctcgcctacccgccgcaaccctcactgggctggggctgcttcgggatgggcttcacccggaaggccgacgaggacccggagcccgggcggtgccggcgcacggacggcaagaagtggcgctgctccaaggaggcgtacccggactccaagtactgcgagaagcacatgcaccggggcaagaaccgttcaagaaagcctgtggaaatgtccttggccacgccggccccggcgccggcccccgccgccgccacaaccgccaccgccacctcatccccggcgccgtcctaccaccgcccggcccacgacgccacgccgtctccgtaccacgcgctgtatggaggcggcggcggcggcggcggtagcccttactcggcgtcggcacgcccaggagcaaccggaggcggcggcgcgtaccaccacgcgcagcatgtgagccccttccacctccacctcgagaccacccacccgcacccgccgccgccctacaactactccgccgaccagagggactacgcgtacgggcacgcggccgccaaggaggtcggcgagcacgccttcttctcggacggcgcgggcgagcgggtcgaccggcaggccgcggcggggcagtggcagttcaggcagctcggggtggagacgaagccgggccccacgccgctgttccccgtcgccgggtacgggcacggcgcggcgtcgccgtacggcgtggagatgggcaaggacgacgacgagcaggaggagaggcgccgccagcactgcttcgttcttggagccgacctgcggctggagcggccgtcgtcgggccatggccatggccatgaccatgacgacgccgccgccgcgcagaagccgctccggcccttcttcgacgagtggccgcaccagaagggggacaaggccgggtcgtggatggggctcgacggcgagacgcagctctccatgtccatccccatggccgccaccgacctccccgtcacctcccgcttccgtaacgacgagtgaggtaccgttaacagatctactaactatctatactgtaataatgttgtatagccgccggatagctagctagtttagtcattcagcggcgatgggtaataataaagtgtcatccatccatcaccatgcgtggcaacgtgagcaatgacctgattgaacaaattgaaatgaaaagaagaaatatgttatatgtcaacgagatttcctcataatgccactgacgacgtgtgtccaagaaatgtatcagtgatacgtatattcacaatttttttatgacttatactcacaatttgtttttttactacttatactcacaatttgttgtgcgtaccataacaatttcgatcgaatatatatcagaaagttgacgaaagtaagctcactcaaaaagttaaatgggctgcggaagctgcgtcaggcccaagttttggctattctatccggtatccacgattttgatggctgagggacatatgttcgcttcgaattcctgcccttaaggccaattgttcaagattcattcaacaattgaaacatctcccatgattaaatcagtataaggttgctatggtcttgcttgacaaagtttttttttgagggaatttcaactaaatttttgagtgaaactatcaaatactgattttaaaaaatttttataaaaggaagcgcagagataaaaggccatctatgctacaaaagtacccaaaaatgtaatcctaaagtatgaattgcattttttttttgtttggacgaaaggaaaggagtattaccacaagaatgatatcatcttcatatttagatcttttttgggtaaagcttgagattctctaaatatagagaaatcagaagaaaaaaaaaccgtgttttggtggttttgatttctagcctccacaataactttgacggcgtcgacaagtctaacggacaccaagcagcgaaccaccagcgccgagccaagcgaagcagacggccgagacgttgacaccttcggcgcggcatctctcgagagttccgctccggcgctccacctccaccgctggcggtttcttattccgttccgttccgcctcctgctctgctcctctccacaccacacggcacgaaaccgttacggcaccggcagcacccagcacgggagaggggattcctttcccaccgttccttccctttccgccccgccgctataaatagccagccccatccccagcttttttccccaatctcatctcctctctcctgttgttcggagcacacgcacaatccgatcgatccccaaatccccttcgtctctcctcgcgagcctcgtggatcccagcttcaaggtacggcgatcgatcatcccccctccttctctctaccttcttttctctagactacatcggatggcgatccatggttagggcctgctagtttcccttcctgttttgtcgatggctgcgaggcacaatagatctgatggcgttatgacggctaacttgtcatgttgttgcgatttatagtccctttaggagatcagtttaatttctcggatggttcgagatcggtggtccatggttagtaccctaagatccgcgctgttagggttcgtagatggaggcgacctgttctgattgttaacttgtcagtacctgggaaatcctgggatggttctagctcgtccgcagatgagatcgatttcatgatcctctgtatcttgtttcgttgcctaggttccgtctaatctatccgtggtatgatgtagatgttttgatcgtgctaactacgtcttgtaaagttaattgtcaggtcataatttttagcatgcctttttttttgtttggttttgtctaattgggctgtcgttctagatcagagtagaagactgttccaaactacctgctggatttattgaacttggatctgtatgtgtgtcacatatcttcataaattcatgattaagatggattgaaatatcttttatctttttggtatggatagttctatatgttggtgtggctttgttagatgtatacatgcttagatacatgaagcaacgtgctgctactgtttagtaattgctgttcatttgtctaataaacagataaggatatgtatttatgttgctgttggttttgctggtactttgttggatacaaatgcttcaatacagaaaacagcatgctgctacgatttaccatttatctaatcttatcatatgtctaatctaataaacaaacatgcttttaaattatcttcatatgcttggatgatggcatacacagcggctatgtgtggttttttaaatacccagcatcatgggcatgcatgacactgctttaatatgctttttatttgcttgagactgtttcttttgtttatactgaccctttagttcggtgactcttctgcaggtcgactttaacttagcctaggatccatggcccagtccaagcacggcctgaccaaggagatgaccatgaagtaccgcatggagggctgcgtggacggccacaagttcgtgatcaccggcgagggcatcggctaccccttcaagggcaagcaggccatcaacctgtgcgtggtggagggcggccccttgcccttcgccgaggacatcttgtccgccgccttcatgtacggcaaccgcgtgttcaccgagtacccccaggacatcgtcgactacttcaagaactcctgccccgccggctacacctgggaccgctccttcctgttcgaggacggcgccgtgtgcatctgcaacgccgacatcaccgtgagcgtggaggagaactgcatgtaccacgagtccaagttctacggcgtgaacttccccgccgacggccccgtgatgaagaagatgaccgacaactgggagccctcctgcgagaagatcatccccgtgcccaagcagggcatcttgaagggcgacgtgagcatgtacctgctgctgaaggacggtggccgcttgcgctgccagttcgacaccgtgtacaaggccaagtccgtgccccgcaagatgcccgactggcacttcatccagcacaagctgacccgcgaggaccgcagcgacgccaagaaccagaagtggcacctgaccgagcacgccatcgcctccggctccgccttgccctccggactcagatctcgatagggtaccaatggccagttaacagatccagctgctgctgttctagggttcacaagtctgcctatttgtcttccccaatggagctatggttgtctggtctggtccttggtcgtgtcccgtttcattgtgtactatttacctgtaatgtgtatccttaagtctggtttgatggtgtctgaaacgttttgctgtggtagagcagcatggaagaactataatgaataagtgatccctaatcattgtgtccaaattttgcttctgctatacccttttgtgctgtttcttatgttttgcttaaaaatttgatctgacaaacaaatttgtctaaattatgctcttgttctgactgtgtactgtacacatttgtattgctaccggtttggcacatagttttctctttgattgcagatcaaacccttctgattgcagattgcttggctatggctgatgtgctcactgttcttctttagcttgtatattgctgatggtggcttggctacggctgaaaaagttgctgctgcgccgacttggcaactgttgctccagtaatgctttgtcctctcttcctagccgccgacttggcacttggcagctgttgctcctgtaatgcgttgttatctcttatctcttgagatgtactatgattttgaggctgtttgacttgtgccagattgccagtgctgatgctatattatctcaggtttttatgctagtatatgttttactgtgtgctgcctgtgtcgagttacgtaatctattgaaccgctatgcgtgttgatgccctgttgttgcttgccagattgatgcccctgttgcttgcagcttgcaagctgtagtgaaatcctaaaattcgaaaccaaatctattctgaacttttgaagatctgtgatgtccggaagaaaagattcaaacagataaacgggactctccagaatctataaaataaatgatcgacaaacgctttgctttggtaggcttcctagttagttagcggaccgaagcttcggtgaattcaggtgactcttagcgatccgacggcgtcttcaccgccccgccgccgcccgagccggacttgtcgctgccgccgccgctgctcatcttgcgcgcttgtgtccctccctcagtccctgcgttcgcggatcgcgggcgggtgcgacccgtttggactccggccggtagccttcgtgccgacctcgctcggtccaccggtttgtcggggacccacatgtcagtgaaggtacgcgtccacgtccacagaccctactaccccagacgagtccaaatcgctgttccctcacactctcgtgtaccagcgcgcggcggaaagcacctttccaacaaccgccgacacgtcggtcccacgtcggcatgctccaccggtcagtgtttggcgtgtacggctcccggcgacgaacgagtgtggcctaagctttcctactcccatcccatctgagccacacatctctctcacgccacgcgcacaaaacagccaggctcccacgcgcatcaaccggctctccctttccgtgccactcgcccccaagccccaaaccctcgccgccgcctccgagacagccgccgccacctaggccatggccaccgccgccgccgcgtctaccgcgctcactggcgccactaccgctgcgcccaaggcgaggcgccgggcgcacctcctggccacccgccgcgccctcgccgcgcccatcaggtgctcagcggcgtcacccgccatgccgatggctcccccggccaccccgctccggccgtggggccccaccgagccccgcaagggtgctgacatcctcgtcgagtccctcgagcgctgcggcgtccgcgacgtcttcgcctaccccggcggcgcgtcgatggagatccaccaggcactcacccgctcccccgtcatcgccaaccacctcttccgccacgagcaaggggaggcctttgccgcctccggctacgcgcgctcctcgggccgcgtcggcgtctgcatcgccacctccggccccggcgccaccaacctagtctccgcgctcgccgacgcgctgctcgattccgtcccgatggtcgccatcacgggacaggtggcgcgacgcatgattggcaccgacgccttccaggagacgcccatcgtcgaggtcacgcgctccatcaccaagcacaactacctggtcctcgacgtcgacgacatcccccgcgtcgtgcaggaggctttcttcctcgcctcctctggtcgaccagggccggtgcttgtcgacatccccaaggacatccagcagcagatggcggtgcctgtctgggacaagcccatgagtctgcctgggtacattgcgcgccttcccaagccccctgcgactgagttgcttgagcaggtgctgcgtcttgttggtgaatcgcggcgccctgttctttatgtgggcggtggctgcgcagcatctggtgaggagttgcgacgctttgtggagctgactggaatcccggtcacaactactcttatgggcctcggcaacttccccagcgacgacccactgtctctgcgcatgctaggtatgcatgggacggtgtatgcaaattatgcagtggataaggccgatctgttgcttgcacttggtgtgcggtttgatgatcgcgtgacagggaagattgaggcttttgcaagcagggctaagattgtgcacgttgatattgatccggctgagattggcaagaacaagcagccacatgtgtccatctgtgcagatgttaagcttgctttgcagggcatgaatgctcttcttgaaggaagcacatcaaagaagagctttgactttggctcatggaacgatgagttggatcagcagaagagggaattcccccttgggtataaaacatctaatgaggagatccagccacaatatgctattcaggttcttgatgagctgacgaaaggcgaggccatcatcggcacaggtgttgggcagcaccagatgtgggcggcacagtactacacttacaagcggccaaggcagtggttgtcttcagctggtcttggggctatgggatttggtttgccggctgctgctggtgcttctgtggcaaacccaggtgtcactgttgttgacatcgatggagatggtagctttctcatgaacgttcaggagctagctatgatccgaattgagaacctcccagtgaaggtctttgtgctaaacaaccagcacctggggatggtggtgcagttggaggacaggttctataaggccaacagagcgcacacatacttgggaaacccagagaatgaaagtgagatatatccagatttcgtgacgatcgccaaagggttcaacattccagccgtccgtgtgacaaagaagaacgaagtccgcgcagcgataaagaagatgctcgagactccagggccgtacctcttggatataatcgtcccacaccaggagcatgtgttgcctatgatccctagtggtggggctttcaaggatatgatcctggatggtgatggcaggactgtgtactgacttcgaataggtacccggggatcctctagtgccgtgggtcgtttaagctgccgctgtacctgtgtcgtctggtgccttctggtgtacctgggaggttgtcgtctatcaagtatctgtggttggtgtcatgagtcagtgagtcccaatactgttcgtgtcctgtgtgcattatacccaaaactgttatgggcaaatcatgaataagcttgatgttcgaacttaaaagtctctgctcaatatggtattatggttgtttttgttcgtctcctaatatttgcctgggatcaaattttattggctggtgttcatttgacctccatgttcttgctaggctccattttttactctacagccataatatgtttgattgtttggtttgttctttgttgtacacctggttctgtcgagcttagttttcgacactggcttacagcttaacatgttgctattttattgggttctgattgctattttattgggttctgattgctagtttttgctgaatccaaaaaccatgttatttatttaagcgatccaggttattattatgatggtggctaagtttttttttttccaagggtaaattttctggattctccagtgtttctgtggcctgtttctgtggccgaattcaatcactagagtcgacctgcatgattccgatgacttcgtaggttcctagctcaagccgctcgtgtccaagcgtcacttacgattagctaatgattacggcatctaggaccgactagctagctagctaagagctcggtaccgagctcgaattcattccgattaatcgtggcctcttgctcttcaggatgaagagctatgtttaaacgtgcaagcgctactagacaattcagtacattaaaaacgtccgcaatgtgttattaagttgtctaagcgtcaatttgtttacaccacaatatatcctgcca

SEQ ID NO: 89 - DNA, 20318 bp, Artificial sequence
  PHP98393
gtttacccgccaatatatcctgtcaaacactgcggccgcacttgaccgcggatggagccggagctgtggtgaggccatcgacgggaggtgggggagaacacagtctcagtgttctttgtgagtccgcaaggtttttagcttttctgtattaattaaggttgctgttggctgtagaatacggtcgtggaagagctgtatcggtagctactacgtaagctattatatactggaagtctggagctcgtcgatctccggtcgtcttcctccatttctcctcgtcttgctttgactgctgctaccatttgcttctgttttctgatgaagcatgccatgtcggccaccagtgtttgtgtggtttttgcagggaatggctttcaagtgctgtgattgaatggccctcgtcgtcctcggctgagctcacatggacgcgtcatgtgagtgagatatatgatcatatgatgagtggggttcgggtgagtgcgtacttgaagtaggatcccgctttcactcattcattcattggcctttaaaccgggaaattttcgcgaggagatggagggaagcaagcagggtgacgagtgcagagtgccgcgagcgctttgtcaaaaggcaccgccgtaggcaaaaaaatcaatggccctgactgactcgatggtagtactactgtagagactagagagggttgctccccatatcttcgtgtgacttttactccagcattgcatttccgtcattgagacgttaattaatagcagctttcgggacagatgactgtggccatgtttcgtcacggccgcttcgtgccagctgggggtactatagtactgtgattttgttagtaaaaactttcattaggccaccattgacgaccgggccttcgcttttgctgcgctaattaaccatttcccggcgaccgaagggaacatgaacatgccccgacacatgagggcatgaggactagtgttctccctgtcgttcgttgacttgactagtgatagtttaaacgctcttcaactggaagagcggttactaccggttcactagctagctgctaatcgagctagttaccctatgaggtgacatgaagcgctcacggttactatgacggttagcttcacgactgttggtggcagtagcgtacgacttagctatagttccggacttacctagcatcgagcagctggcttgtggggaccagacaaaaaaggaatggtgcagaattgttaggcgcacctaccaaaagcatctttgcctttattgcaaagataaagcagattcctctagtacaagtggggaacaaaataacgtggaaaagagctgtcctgacagcccactcactaatgcgtatgacgaacgcagtgacgaccacaaaactcgagcaacgagatcatgagccaatcaaagaggagtgatgtagacctaaagcaataatggagccatgacgtaagggcttacgcccatacgaaataattaaaggctgatgtgacctgtcggtctctcagaacctttactttttatgtttggcgtgtatttttaaatttccacggcaatgacgatgtgaccgtcgacccactaaaacattgctttgtcaaaagctaaaaaagatgatgcccgacagccacttgtgtgaagcatgagaagccggtccctccactaagaaaattagtgaagcatcttccagtggtccctccactcacagctcaatcagtgagcaacaggacgaaggaaatgacgtaagccatgacgtctaatcccagggccagcttgcatgcctgcagtgcagcgtgacccggtcgtgcccctctctagagataatgagcattgcatgtctaagttataaaaaattaccacatattttttttgtcacacttgtttgaagtgcagtttatctatctttatacatatatttaaactttactctacgaataatataatctatagtactacaataatatcagtgttttagagaatcatataaatgaacagttagacatggtctaaaggacaattgagtattttgacaacaggactctacagttttatctttttagtgtgcatgtgttctcctttttttttgcaaatagcttcacctatataatacttcatccattttattagtacatccatttagggtttagggttaatggtttttatagactaatttttttagtacatctattttattctattttagcctctaaattaagaaaactaaaactctattttagtttttttatttaataatttagatataaaatagaataaaataaagtgactaaaaattaaacaaataccctttaagaaattaaaaaaactaaggaaacatttttcttgtttcgagtagataatgccagcctgttaaacgccgtcgacgagtctaacggacaccaaccagcgaaccagcagcgtcgcgtcgggccaagcgaagcagacggcacggcatctctgtcgctgcctctggacccctctcgagagttccgctccaccgttggacttgctccgctgtcggcatccagaaattgcgtggcggagcggcagacgtgagccggcacggcaggcggcctcctcctcctctcacggcaccggcagctacgggggattcctttcccaccgctccttcgctttcccttcctcgcccgccgtaataaatagacaccccctccacaccctctttccccaacctcgtgttgttcggagcgcacacacacacaaccagatctcccccaaatccacccgtcggcacctccgcttcaaggtacgccgctcgtcctcccccccccccctctctaccttctctagatcggcgttccggtccatgcatggttagggcccggtagttctacttctgttcatgtttgtgttagatccgtgtttgtgttagatccgtgctgctagcgttcgtacacggatgcgacctgtacgtcagacacgttctgattgctaacttgccagtgtttctctttggggaatcctgggatggctctagccgttccgcagacgggatcgatttcatgattttttttgtttcgttgcatagggtttggtttgcccttttcctttatttcaatatatgccgtgcacttgtttgtcgggtcatcttttcatgcttttttttgtcttggttgtgatgatgtggtctggttgggcggtcgttctagatcggagtagaattctgtttcaaactacctggtggatttattaattttggatctgtatgtgtgtgccatacatattcatagttacgaattgaagatgatggatggaaatatcgatctaggataggtatacatgttgatgcgggttttactgatgcatatacagagatgctttttgttcgcttggttgtgatgatgtggtgtggttgggcggtcgttcattcgttctagatcggagtagaatactgtttcaaactacctggtgtatttattaattttggaactgtatgtgtgtgtcatacatcttcatagttacgagtttaagatggatggaaatatcgatctaggataggtatacatgttgatgtgggttttactgatgcatatacatgatggcatatgcagcatctattcatatgctctaaccttgagtacctatctattataataaacaagtatgttttataattattttgatcttgatatacttggatgatggcatatgcagcagctatatgtggatttttttagccctgccttcatacgctatttatttgcttggtactgtttcttttgtcgatgctcaccctgttgtttggtgttacttctgcaggtcgactctagaggatcaattcgctagcataacttcgtatagcatacattatacgaagttatccagatccaccatggccactgtgaacaactggctcgctttctccctctccccgcaggagctgccgccctcccagacgacggactccacactcatctcggccgccaccgccgaccatgtctccggcgatgtctgcttcaacatcccccaagattggagcatgaggggatcagagctttcggcgctcgtcgcggagccgaagctggaggacttcctcggcggcatctccttctccgagcagcatcacaaggccaactgcaacatgatacccagcactagcagcacagtttgctacgcgagctcaggtgctagcaccggctaccatcaccagctgtaccaccagcccaccagctcagcgctccacttcgcggactccgtaatggtggcttcctcggccggtgtccacgacggcggtgccatgctcagcgcggccgccgctaacggtgtcgctggcgctgccagtgccaacggcggcggcatcgggctgtccatgattaagaactggctgcggagccaaccggcgcccatgcagccgagggtggcggcggctgagggcgcgcaggggctctctttgtccatgaacatggcggggacgacccaaggcgctgctggcatgccacttctcgctggagagcgcgcacgggcgcccgagagtgtatcgacgtcagcacagggtggagccgtcgtcgtcacggcgccgaaggaggatagcggtggcagcggtgttgccggcgctctagtagccgtgagcacggacacgggtggcagcggcggcgcgtcggctgacaacacggcaaggaagacggtggacacgttcgggcagcgcacgtcgatttaccgtggcgtgacaaggcatagatggactgggagatatgaggcacatctttgggataacagttgcagaagggaagggcaaactcgtaagggtcgtcaagtctatttaggtggctatgataaagaggagaaagctgctagggcttatgatcttgctgctctgaagtactggggtgccacaacaacaacaaattttccagtgagtaactacgaaaaggagctcgaggacatgaagcacatgacaaggcaggagtttgtagcgtctctgagaaggaagagcagtggtttctccagaggtgcatccatttacaggggagtgactaggcatcaccaacatggaagatggcaagcacggattggacgagttgcagggaacaaggatctttacttgggcaccttcagcacccaggaggaggcagcggaggcgtacgacatcgcggcgatcaagttccgcggcctcaacgccgtcaccaacttcgacatgagccgctacgacgtgaagagcatcctggacagcagcgccctccccatcggcagcgccgccaagcgcctcaaggaggccgaggccgcagcgtccgcgcagcaccaccacgccggcgtggtgagctacgacgtcggccgcatcgcctcgcagctcggcgacggcggagccctggcggcggcgtacggcgcgcactaccacggcgccgcctggccgaccatcgcgttccagccgggcgccgccagcacaggcctgtaccacccgtacgcgcagcagccaatgcgcggcggcgggtggtgcaagcaggagcaggaccacgcggtgatcgcggccgcgcacagcctgcaggacctccaccacctgaacctgggcgcggccggcgcgcacgactttttctcggcagggcagcaggccgccgccgctgcgatgcacggcctgggtagcatcgacagtgcgtcgctcgagcacagcaccggctccaactccgtcgtctacaacggcggggtcggcgacagcaacggcgccagcgccgtcggcggcagtggcggtggctacatgatgccgatgagcgctgccggagcaaccactacatcggcaatggtgagccacgagcaggtgcatgcacgggcctacgacgaagccaagcaggctgctcagatggggtacgagagctacctggtgaacgcggagaacaatggtggcggaaggatgtctgcatgggggactgtcgtgtctgcagccgcggcggcagcagcaagcagcaacgacaacatggccgccgacgtcgggcatggcggcgcgcagctcttcagtgtctggaacgacactggctccggcgagggtcgcggttccctcctgacctgcggcgacgtggaggaaaaccccggtccgatggcggccaatgcgggcggcggtggagcgggaggaggcagcggcagcggcagcgtggctgcgccggcggtgtgccgccccagcggctcgcggtggacgccgacgccggagcagatcaggatgctgaaggagctctactacggctgcggcatccggtcgcccagctcggagcagatccagcgcatcaccgccatgctgcggcagcacggcaagatcgagggcaagaacgtcttctactggttccagaaccacaaggcccgcgagcgccagaagcgccgcctcaccagcctcgacgtcaacgtgcccgccgccggcgcggccgacgccaccaccagccaactcggcgtcctctcgctgtcgtcgccgccgccttcaggcgcggcgcctccctcgcccaccctcggcttctacgccgccggcaatggcggcggatcggctgtgctgctggacacgagttccgactggggcagcagcggcgctgctatggccaccgagacatgcttcctgcaggactacatgggcgtgacggacacgggcagctcgtcgcagtggccacgcttctcgtcgtcggacacgataatggcggcggccgcggcgcgggcggcgacgacgcgggcgcccgagacgctccctctcttcccgacctgcggcgacgacggcggcagcggtagcagcagctacttgccgttctggggtgccgcgtccacaactgccggcgccacttcttccgttgcgatccaacagcaacaccagctgcaggagcagtacagcttttacagcaacagcaacagcacccagctggccggcaccggcaaccaagacgtatcggcaacagcagcagcagccgccgccctggagctgagcctcagctcatggtgctccccttaccctgctgcagggagtatgtgagaggtaccgacaaagcagcattagtccgttgatcggtggaagaccactcgtcagtgttgagttgaatgtttgatcaataaaatacggcaatgctgtaagggttgttttttatgccattgataatacactgtactgttcagttgttgaactctatttcttagccatgccaagtgcttttcttattttgaataacattacagcaaaaagttgaaagacaaaaaaaaaaacccccgaacagagtgctttgggtcccaagcttctttagactgtgttcggcgttccccctaaatttctccccctatatctcactcacttgtcacatcagcgttctctttccccctatatctccacgctctacagcagttccacctatatcaaacctctataccccaccacaacaatattatatactttcatcttcaactaactcatgtaccttccaatttttttctactaataattatttacgtgcacagaaacttagcaaggagagagagagcgggaatttaaatgctcggcgttaggcttttagtccgctaggtggctagaccgaggttaggacgctagttcactaggggcctagtggtgttttaagagtcaccaccttgctagttggatattacctcttctcttcaaagtatccttgaacgctcaccggttatcaaatctctacactatagctctgtagtcttgctagatagttagttctttagctctctctagaggttcacaaactcaatacaacacacagtggagtagggtattacgctccggcggcccgaaccactctaaatccttgtgtcctcgtgtgctcttccaccattaatgactgtaattgcagggacacgaagagttgtagcgcttttgccaacaagatccgctatatgctagtagagtggaacctgcacagcaacaagcatccaataatctgagaataagaattatgtgtggtgatggttctcatctctgcaactcgccattttcgcgagagaaccaaatccaagttggtgaagatcatgatttgggctcatgggctggcatagtagctattacctttgcaattgtggttcgaatctatccgatattctccttttcagggagagctaatgcttatgcttattgggtattttggtttgacactgcttcacgcccaaaaaaaggcaactatgtctgagttggatatggcccaaaaaaaggcagctatgtctgagttggatatggaagtcttctttcgtttagggtgaagtaagaccaagctcatgagcttattatcttaggtcggaacaaattagttgataggcatggcacatttatcaaattataatgattttaacagaaaagcaacacctctttttcagcagcaccagctttgcaagctgcaattgacactccaagcatagtatttgctccaaactcagcctgcatttcgcacaatatcatatctatttccatttggataaaatatattttccagaaatatgggaacagaatcaagatacagaaaaaagttgtggtagtagtggtaagtggaaacacaagtacagtgaaaagatagcattatttctgaacagtcaaattaaccgaaataagtagtatcacatactgcccctaaattgactacacccaatgtaaagaattgcttgagcatattgagccatcagttgtttgtttgtgtaacggatttgacaatgcagagttcaggagcaaaaaaccgcaaaggagagaaagagggaaaggatctcctagtatcccaccttgtggcgcgccctgtcaagtgcatgatggcctggtcgatctgcgtctgctgctgcggttccatcccaacgagtgcctccgacaccttgtcgttgatcacccgcaccgcgtaggcgacccccctggcgaggaacttccgcctctcggaggccccggccgcgtcggcggcggcgccctcgagcgcgcccacgctagccgtagatgctcggtgcacggccttgttggtgtgcaactcgacctcaacggccggtgcgctacgcccgtcaaggatctggcgcgcccgcaccctcgtgatcacggtgggcgcctcccgcctcatgtggccgacgatgaaaagcgccgggttaggggccttggcgcgcaccgccgtattcagggcctcctcgctcttgcgcgagagcaggtgcttccccaggtactcctgcactgacaaggctgccacagcggtggaatttgtcctcacgacttcgccacgtcgtcctcacctccctggcttcccacgactccgccgtatcgaggtgctcggtgggtcgtcttaatccgaagtccgaactaggaagacgagacagagaggtctgaggaatgggcctcgtttgatgttgagctgaattatttttccagcataagcccaggtcttggtccatgaacaaaattactagaaacccagcccagtactacgatctaaaagagggactgccactggatagctctctctagcattctccacgctccaatacagcggcgtcgtgtctatccgggtctatccgcgaacacgtgagaactctccagaaactgctttctcctccacttcatctctctcgctttccctctataaaaagaccccttctaggaattgagggagacagcaagcaccaagcagcgatccgaagctcaatcaattcactcaaacctcttccccaaatcttcgattagatcttcgttgacaagaagactagaaccgaacctgacatgtccaacctgctcacggttcaccagaaccttccggctcttccagtggacgcgacgtccgatgaagtcaggaagaacctcatggacatgttccgcgacaggcaagcgttcagcgagcacacctggaagatgctgctctccgtctgccgctcctgggctgcatggtgcaagctgaacaacaggaagtggttccccgctgagcccgaggacgtgagggattaccttctgtacctgcaagcgcgaggtttgtttctgcttctacctttgatatatatataataattatcattaattagtagtaatataatatttcaaatatttttttcaaaataaaagaatgtagtatatagcaattgcttttctgtagtttataagtgtgtatattttaatttataacttttctaatatatgaccaaaacatggtgatgcctaggtctggcagtgaagaccatccagcaacaccttggacaactgaacatgcttcacaggcgctccggcctcccgcgccccagcgactcgaacgccgtgagcctcgtcatgcgccgcatcaggaaggaaaacgtcgatgccggcgaaagggcaaagcaggccctcgcgttcgagaggaccgatttcgaccaggtccgcagcctgatggagaacagcgacaggtgccaggacattaggaacctggcgttcctcggaattgcatacaacacgctcctcaggatcgcggaaattgcccgcattcgcgtgaaggacattagccgcaccgacggcggcaggatgcttatccacattggcaggaccaagacgctcgtttccaccgcaggcgtcgaaaaggccctcagcctcggagtgaccaagctcgtcgaacgctggatctccgtgtccggcgtcgcggacgacccaaacaactacctcttctgccgcgtccgcaagaacggggtggctgcccctagcgccaccagccaactcagcacgagggccttggaaggtattttcgaggccacccaccgcctgatctacggcgcgaaggatgacagcggtcaacgctacctcgcatggtccgggcactccgcccgcgttggagctgctagggacatggcccgcgccggtgtttccatccccgaaatcatgcaggcgggtggatggacgaacgtgaacattgtcatgaactacattcgcaaccttgacagcgagacgggcgcaatggttcgcctcctggaagatggtgactgaggtacccaacctagacttgtccatcttctggattggccaacttaattaatgtatgaaataaaaggatgcacacatagtgacatgctaatcactataatgtgggcatcaaagttgtgtgttatgtgtaattactagttatctgaataaaagagaaagagatcatccatatttcttatcctaaatgaatgtcacgtgtctttataattctttgatgaaccagatgcatttcattaaccaaatccatatacatataaatattaatcatatataattaatatcaattgggttagcaaaacaaatctagtctaggtgtgttttgcgatccgatatcgacgtctaaaaacggcccctaactaacgcttagttgcccgctagattagtcccccgttagtgcctagttagacacacgacgaactaggggctagtgccaccttgctagttggatattacctcttctcttcaaagtatccttgaacgctcaccggttatcaaatctctacactatagctctgtagtcttgctagatagttagttctttagctctcgcacgataacttcgtatagcatacattatacgaagttattcgccgcctagaagcccgatctcccggttaaaaccaaaatccagtggcgagctctcgactttaacttagcctaggatccatgatgatgatgagcagcggccgggcgggcggcggggccaccgcggggcgatacccgttcacggcgtcgcagtggcaggagctggagcaccaggcgctcatctacaagtgcctggcgtccggcaagcccatcccttcctacctcatgccgccgctccgccgcatcctcgactccgccctcgccacgtcgccgtccctcgcctacccgccgcaaccctcactgggctggggctgcttcgggatgggcttcacccggaaggccgacgaggacccggagcccgggcggtgccggcgcacggacggcaagaagtggcgctgctccaaggaggcgtacccggactccaagtactgcgagaagcacatgcaccggggcaagaaccgttcaagaaagcctgtggaaatgtccttggccacgccggccccggcgccggcccccgccgccgccacaaccgccaccgccacctcatccccggcgccgtcctaccaccgcccggcccacgacgccacgccgtctccgtaccacgcgctgtatggaggcggcggcggcggcggcggtagcccttactcggcgtcggcacgcccaggagcaaccggaggcggcggcgcgtaccaccacgcgcagcatgtgagccccttccacctccacctcgagaccacccacccgcacccgccgccgccctacaactactccgccgaccagagggactacgcgtacgggcacgcggccgccaaggaggtcggcgagcacgccttcttctcggacggcgcgggcgagcgggtcgaccggcaggccgcggcggggcagtggcagttcaggcagctcggggtggagacgaagccgggccccacgccgctgttccccgtcgccgggtacgggcacggcgcggcgtcgccgtacggcgtggagatgggcaaggacgacgacgagcaggaggagaggcgccgccagcactgcttcgttcttggagccgacctgcggctggagcggccgtcgtcgggccatggccatggccatgaccatgacgacgccgccgccgcgcagaagccgctccggcccttcttcgacgagtggccgcaccagaagggggacaaggccgggtcgtggatggggctcgacggcgagacgcagctctccatgtccatccccatggccgccaccgacctccccgtcacctcccgcttccgtaacgacgagtgaggtaccgttaacagatctactaactatctatactgtaataatgttgtatagccgccggatagctagctagtttagtcattcagcggcgatgggtaataataaagtgtcatccatccatcaccatgcgtggcaacgtgagcaatgacctgattgaacaaattgaaatgaaaagaagaaatatgttatatgtcaacgagatttcctcataatgccactgacgacgtgtgtccaagaaatgtatcagtgatacgtatattcacaatttttttatgacttatactcacaatttgtttttttactacttatactcacaatttgttgtgcgtaccataacaatttcgatcgaatatatatcagaaagttgacgaaagtaagctcactcaaaaagttaaatgggctgcggaagctgcgtcaggcccaagttttggctattctatccggtatccacgattttgatggctgagggacatatgttcgcttcgaattcctgcccttaaggccaattgttcaagattcattcaacaattgaaacatctcccatgattaaatcagtataaggttgctatggtcttgcttgacaaagtttttttttgagggaatttcaactaaatttttgagtgaaactatcaaatactgattttaaaaaatttttataaaaggaagcgcagagataaaaggccatctatgctacaaaagtacccaaaaatgtaatcctaaagtatgaattgcattttttttttgtttggacgaaaggaaaggagtattaccacaagaatgatatcatcttcatatttagatcttttttgggtaaagcttgagattctctaaatatagagaaatcagaagaaaaaaaaaccgtgttttggtggttttgatttctagcctccacaataactttgacggcgtcgacaagtctaacggacaccaagcagcgaaccaccagcgccgagccaagcgaagcagacggccgagacgttgacaccttcggcgcggcatctctcgagagttccgctccggcgctccacctccaccgctggcggtttcttattccgttccgttccgcctcctgctctgctcctctccacaccacacggcacgaaaccgttacggcaccggcagcacccagcacgggagaggggattcctttcccaccgttccttccctttccgccccgccgctataaatagccagccccatccccagcttttttccccaatctcatctcctctctcctgttgttcggagcacacgcacaatccgatcgatccccaaatccccttcgtctctcctcgcgagcctcgtggatcccagcttcaaggtacggcgatcgatcatcccccctccttctctctaccttcttttctctagactacatcggatggcgatccatggttagggcctgctagtttcccttcctgttttgtcgatggctgcgaggcacaatagatctgatggcgttatgacggctaacttgtcatgttgttgcgatttatagtccctttaggagatcagtttaatttctcggatggttcgagatcggtggtccatggttagtaccctaagatccgcgctgttagggttcgtagatggaggcgacctgttctgattgttaacttgtcagtacctgggaaatcctgggatggttctagctcgtccgcagatgagatcgatttcatgatcctctgtatcttgtttcgttgcctaggttccgtctaatctatccgtggtatgatgtagatgttttgatcgtgctaactacgtcttgtaaagttaattgtcaggtcataatttttagcatgcctttttttttgtttggttttgtctaattgggctgtcgttctagatcagagtagaagactgttccaaactacctgctggatttattgaacttggatctgtatgtgtgtcacatatcttcataaattcatgattaagatggattgaaatatcttttatctttttggtatggatagttctatatgttggtgtggctttgttagatgtatacatgcttagatacatgaagcaacgtgctgctactgtttagtaattgctgttcatttgtctaataaacagataaggatatgtatttatgttgctgttggttttgctggtactttgttggatacaaatgcttcaatacagaaaacagcatgctgctacgatttaccatttatctaatcttatcatatgtctaatctaataaacaaacatgcttttaaattatcttcatatgcttggatgatggcatacacagcggctatgtgtggttttttaaatacccagcatcatgggcatgcatgacactgctttaatatgctttttatttgcttgagactgtttcttttgtttatactgaccctttagttcggtgactcttctgcaggtcgactttaacttagcctaggatccatggcccagtccaagcacggcctgaccaaggagatgaccatgaagtaccgcatggagggctgcgtggacggccacaagttcgtgatcaccggcgagggcatcggctaccccttcaagggcaagcaggccatcaacctgtgcgtggtggagggcggccccttgcccttcgccgaggacatcttgtccgccgccttcatgtacggcaaccgcgtgttcaccgagtacccccaggacatcgtcgactacttcaagaactcctgccccgccggctacacctgggaccgctccttcctgttcgaggacggcgccgtgtgcatctgcaacgccgacatcaccgtgagcgtggaggagaactgcatgtaccacgagtccaagttctacggcgtgaacttccccgccgacggccccgtgatgaagaagatgaccgacaactgggagccctcctgcgagaagatcatccccgtgcccaagcagggcatcttgaagggcgacgtgagcatgtacctgctgctgaaggacggtggccgcttgcgctgccagttcgacaccgtgtacaaggccaagtccgtgccccgcaagatgcccgactggcacttcatccagcacaagctgacccgcgaggaccgcagcgacgccaagaaccagaagtggcacctgaccgagcacgccatcgcctccggctccgccttgccctccggactcagatctcgatagggtaccaatggccagttaacagatccagctgctgctgttctagggttcacaagtctgcctatttgtcttccccaatggagctatggttgtctggtctggtccttggtcgtgtcccgtttcattgtgtactatttacctgtaatgtgtatccttaagtctggtttgatggtgtctgaaacgttttgctgtggtagagcagcatggaagaactataatgaataagtgatccctaatcattgtgtccaaattttgcttctgctatacccttttgtgctgtttcttatgttttgcttaaaaatttgatctgacaaacaaatttgtctaaattatgctcttgttctgactgtgtactgtacacatttgtattgctaccggtttggcacatagttttctctttgattgcagatcaaacccttctgattgcagattgcttggctatggctgatgtgctcactgttcttctttagcttgtatattgctgatggtggcttggctacggctgaaaaagttgctgctgcgccgacttggcaactgttgctccagtaatgctttgtcctctcttcctagccgccgacttggcacttggcagctgttgctcctgtaatgcgttgttatctcttatctcttgagatgtactatgattttgaggctgtttgacttgtgccagattgccagtgctgatgctatattatctcaggtttttatgctagtatatgttttactgtgtgctgcctgtgtcgagttacgtaatctattgaaccgctatgcgtgttgatgccctgttgttgcttgccagattgatgcccctgttgcttgcagcttgcaagctgtagtgaaatcctaaaattcgaaaccaaatctattctgaacttttgaagatctgtgatgtccggaagaaaagattcaaacagataaacgggactctccagaatctataaaataaatgatcgacaaacgctttgctttggtaggcttcctagttagttagcggaccgaagcttcggtgaattcaggtgactcttagcgatccgacggcgtcttcaccgccccgccgccgcccgagccggacttgtcgctgccgccgccgctgctcatcttgcgcgcttgtgtccctccctcagtccctgcgttcgcggatcgcgggcgggtgcgacccgtttggactccggccggtagccttcgtgccgacctcgctcggtccaccggtttgtcggggacccacatgtcagtgaaggtacgcgtccacgtccacagaccctactaccccagacgagtccaaatcgctgttccctcacactctcgtgtaccagcgcgcggcggaaagcacctttccaacaaccgccgacacgtcggtcccacgtcggcatgctccaccggtcagtgtttggcgtgtacggctcccggcgacgaacgagtgtggcctaagctttcctactcccatcccatctgagccacacatctctctcacgccacgcgcacaaaacagccaggctcccacgcgcatcaaccggctctccctttccgtgccactcgcccccaagccccaaaccctcgccgccgcctccgagacagccgccgccacctaggccatggccaccgccgccgccgcgtctaccgcgctcactggcgccactaccgctgcgcccaaggcgaggcgccgggcgcacctcctggccacccgccgcgccctcgccgcgcccatcaggtgctcagcggcgtcacccgccatgccgatggctcccccggccaccccgctccggccgtggggccccaccgagccccgcaagggtgctgacatcctcgtcgagtccctcgagcgctgcggcgtccgcgacgtcttcgcctaccccggcggcgcgtcgatggagatccaccaggcactcacccgctcccccgtcatcgccaaccacctcttccgccacgagcaaggggaggcctttgccgcctccggctacgcgcgctcctcgggccgcgtcggcgtctgcatcgccacctccggccccggcgccaccaacctagtctccgcgctcgccgacgcgctgctcgattccgtcccgatggtcgccatcacgggacaggtggcgcgacgcatgattggcaccgacgccttccaggagacgcccatcgtcgaggtcacgcgctccatcaccaagcacaactacctggtcctcgacgtcgacgacatcccccgcgtcgtgcaggaggctttcttcctcgcctcctctggtcgaccagggccggtgcttgtcgacatccccaaggacatccagcagcagatggcggtgcctgtctgggacaagcccatgagtctgcctgggtacattgcgcgccttcccaagccccctgcgactgagttgcttgagcaggtgctgcgtcttgttggtgaatcgcggcgccctgttctttatgtgggcggtggctgcgcagcatctggtgaggagttgcgacgctttgtggagctgactggaatcccggtcacaactactcttatgggcctcggcaacttccccagcgacgacccactgtctctgcgcatgctaggtatgcatgggacggtgtatgcaaattatgcagtggataaggccgatctgttgcttgcacttggtgtgcggtttgatgatcgcgtgacagggaagattgaggcttttgcaagcagggctaagattgtgcacgttgatattgatccggctgagattggcaagaacaagcagccacatgtgtccatctgtgcagatgttaagcttgctttgcagggcatgaatgctcttcttgaaggaagcacatcaaagaagagctttgactttggctcatggaacgatgagttggatcagcagaagagggaattcccccttgggtataaaacatctaatgaggagatccagccacaatatgctattcaggttcttgatgagctgacgaaaggcgaggccatcatcggcacaggtgttgggcagcaccagatgtgggcggcacagtactacacttacaagcggccaaggcagtggttgtcttcagctggtcttggggctatgggatttggtttgccggctgctgctggtgcttctgtggcaaacccaggtgtcactgttgttgacatcgatggagatggtagctttctcatgaacgttcaggagctagctatgatccgaattgagaacctcccagtgaaggtctttgtgctaaacaaccagcacctggggatggtggtgcagttggaggacaggttctataaggccaacagagcgcacacatacttgggaaacccagagaatgaaagtgagatatatccagatttcgtgacgatcgccaaagggttcaacattccagccgtccgtgtgacaaagaagaacgaagtccgcgcagcgataaagaagatgctcgagactccagggccgtacctcttggatataatcgtcccacaccaggagcatgtgttgcctatgatccctagtggtggggctttcaaggatatgatcctggatggtgatggcaggactgtgtactgacttcgaataggtacccggggatcctctagtgccgtgggtcgtttaagctgccgctgtacctgtgtcgtctggtgccttctggtgtacctgggaggttgtcgtctatcaagtatctgtggttggtgtcatgagtcagtgagtcccaatactgttcgtgtcctgtgtgcattatacccaaaactgttatgggcaaatcatgaataagcttgatgttcgaacttaaaagtctctgctcaatatggtattatggttgtttttgttcgtctcctaatatttgcctgggatcaaattttattggctggtgttcatttgacctccatgttcttgctaggctccattttttactctacagccataatatgtttgattgtttggtttgttctttgttgtacacctggttctgtcgagcttagttttcgacactggcttacagcttaacatgttgctattttattgggttctgattgctattttattgggttctgattgctagtttttgctgaatccaaaaaccatgttatttatttaagcgatccaggttattattatgatggtggctaagtttttttttttccaagggtaaattttctggattctccagtgtttctgtggcctgtttctgtggccgaattcaatcactagagtcgacctgcatgattccgatgacttcgtaggttcctagctcaagccgctcgtgtccaagcgtcacttacgattagctaatgattacggcatctaggaccgactagctagctagctaagagctcggtaccgagctcgaattcattccgattaatcgtggcctcttgctcttcaggatgaagagctatgtttaaacgtgcaagcgctactagacaattcagtacattaaaaacgtccgcaatgtgttattaagttgtctaagcgtcaatttgtttacaccacaatatatcctgcca

SEQ ID NO: 90 - DNA, 19912 bp, Artificial sequence
  PHP98407
gtttacccgccaatatatcctgtcaaacactgatagtttaaactgaaggcgggaaacgacaatctgatcatgagcggagaattaagggagtcacgttatgacccccgccgatgacgcgggacaagccgttttacgtttggaactgacagaaccgcaacgttgaaggagccactcagcaagctggtacgattgtaatacgactcactatagggcgaattgagcgctgtttaaacgctcttcaactggaagagcggttacgctgtttaaacgctcttcaactggaagagcggttactaccggttcactagctagctgctaatcgagctagttaccctatgaggtgacatgaagcgctcacggttactatgacggttagcttcacgactgttggtggcagtagcgtacgacttagctatagttccggacttacccttaagcgatttaaatctgcggttaccgaattcgagctcggtacctagtacccttgtacttttggtttcacctgcatagagaaaacccacaagaatatgacagtctgatttgtcagtctcattctcaagcaacatttctctatccgttactttcatggtgaataacacaatccatcatcaatactttgtgttactcagaaactgaaagttattccgagtcttgcatatctttggacctactcgtttttctaccattattgctgattgttaagctctcgctacttgaatcggcattgttggagtgggaaggttcaaaaaattggagttatgactagttgtctctttctatgtacgatggagaaaatgaataaacaactgagaaaatggctcttgtttagttgatgatgctcttaagctttccactggttgccatatatgatttgggcatttcactttgatcttaatgggccttgtaaagcccaagactcatgattatctttagttgatgctcttaattaggtgtgggcaaataattcaaactgtatgtacccgaccaaaaccaaagcaaaaataatcgaaccaaaccgaaaatttaaaaataaccgaatgaaaactaaatcctataactgaaagaactgaaaccgaatcaaaatatttaatgtaaccaaaaatatccgaaatataattatattgtcaaaaatattaataatttctagattaaataattaaaaatacttaaaaatttatataaaatagtaaaaatactcgaaaataaccacaaatattcaaaaacaaccgaaatatcccaaaatattcaaagcaaaataaccgaatggataccaaattttaaaaccgaaaaaactggaacaaaaccaaaatcgaaccaaaatttcaaaaatcgaataaatactaaactttagaacaaaaaaaaacgataaccgaatgtatacgaaccaaagccgaattagataaccgaacgtccaggactactcttaatctttccgccacttatgatttgggctattactttgtttataatgagccttttcaagctcaagttcatgattgtccgtgagatgagaaactgacttgttggattcgaaaccctagctagtattggttaatacttaatacataaatgacctgcattgacatcatcatccaagaaaataaaaattgtatgcttgagatatttagttttcctagctaggttttctttattttagtaccgaatctttaggtgtgccacgttaatttagacccattttttcatacttaccaactgagtctagtttaatcatgactataatcgtataaaatgattcagtcgacgtcattgcgaacgtatataaaatcatccaaattgacgtcattccaaagaggtaagcatgcttatctaagagtccgagcatactaaacaagacgacattttatttgcactccaaatcaaattttgtattgcctaaagaaaaacaatcaaactcaagtttcttaaaattaatttcattcaaactaatcactttcaatatctcacatattattcatgccatttctatttgtctaaacatgatttaaaaaaaaaagtaaaatacaaagattactatgcaaaaactctataaaaaaaaattcaaatttcttatttatttgtgacatcaaattttcaaaataatttttttaattatcggttgatccggtcagtcgataaaaacataaactttcagcgaccgttaaaactttcctactaccgatttagagaaaatcttagcttgaaacgtaattgtaacctgccttcatgcaagtcgcaagatatgtcatcctaagttgtatatgttttctcaaaagatgtatttacttgagaaaatacgtttcaacgttgatggacaaccaattaagaatcaagcacctttcgtaatcaatttaggcttatcgtctaaggtatactgatttacgacagttgactagacttataaggaacaaaataatagaatagtttctaaacacttcacctaatcatagagactaagatggtaattcgtaaacgacaaagcctagtgacactgtccattgtaaaattccacatcatattagtattaaacatatacatgtagtttcctgaacacatgtagtatcaaacacacttcgtggcttcttcctcgaaacctgcggccgcgctatagttccggacttacccttaagataacttcgtatagcatacattatacgaagttatgggcccacgcgtgaagagcggttaccagagctggtcacctttgtccaccaagatggaactgtcttcggccagaatggccatctggattcagcaggcctagaaggccatttatcgctatcaactttgtatagaaaagttgcccgacattccggcctagtgcttagctaacgggaaacccgcttaacgattagttagtggacggggcccgggaagcttggcgcgcctctgttaatgaacgtaaggagcttctggatgacggctgggacttctttgacaaagagacagagctctaagtgtcttcttttcagtagattatcggtgctagaataaaagagatatgaagggattctgggttctgctctatgtagagtaaagcttggatctttgatctaatctaccgttagtataaaacatctattgagctctcttttatttttcttctcagtgtatagtttgcttattgtttttttggtgtttttttccacctctttgtggtactgacataaacaaagactatcgttttgtcatagaattttgagattttgaagaaaagttggataatttagtatactttttaactgactttataaaacgaattagcttcaattagagcttcacaattctcggattttactgaatgacaagttaacaatttaagctagaaaaaaatatgctctaagcctggacatgttgttagtcatggccagcgtatgtgtacattaggtaaatgaaaacaaaaacaaaaactttgaaggtttctgttaagaaaggaactaatttagcaataagagacatgatattacaagctcaacactgtcgctatatctaccagaagccaacaaatcttccagtgcgtaccattggagccacttttcaggctcattagacaaaagtagcacatataatgtaaagacgaaacgatgataaagagactcacaaggacataatttcaatacagaagaagtttgatgtcattactcattagaaagaaaggtataacacaggaacggaaacatagttgaacaattattcatcaggggctttacaaggccccaaaacacaaaccaccaaagttttaaatgaaacgagacatgaacttcttctgattcataacagagataagtttggtaccgtggccaattcgaatatccatggatccgaattccgcggccgcttgtaaccgttaacgcaagtttgtacaaaaaagcaggctccggccagagttacccggaccgaagcttgcatgcctgcagtgcagcgtgacccggtcgtgcccctctctagagataatgagcattgcatgtctaagttataaaaaattaccacatattttttttgtcacacttgtttgaagtgcagtttatctatctttatacatatatttaaactttactctacgaataatataatctatagtactacaataatatcagtgttttagagaatcatataaatgaacagttagacatggtctaaaggacaattgagtattttgacaacaggactctacagttttatctttttagtgtgcatgtgttctcctttttttttgcaaatagcttcacctatataatacttcatccattttattagtacatccatttagggtttagggttaatggtttttatagactaatttttttagtacatctattttattctattttagcctctaaattaagaaaactaaaactctattttagtttttttatttaataatttagatataaaatagaataaaataaagtgactaaaaattaaacaaataccctttaagaaattaaaaaaactaaggaaacatttttcttgtttcgagtagataatgccagcctgttaaacgccgtcgacgagtctaacggacaccaaccagcgaaccagcagcgtcgcgtcgggccaagcgaagcagacggcacggcatctctgtcgctgcctctggacccctctcgagagttccgctccaccgttggacttgctccgctgtcggcatccagaaattgcgtggcggagcggcagacgtgagccggcacggcaggcggcctcctcctcctctcacggcaccggcagctacgggggattcctttcccaccgctccttcgctttcccttcctcgcccgccgtaataaatagacaccccctccacaccctctttccccaacctcgtgttgttcggagcgcacacacacacaaccagatctcccccaaatccacccgtcggcacctccgcttcaaggtacgccgctcgtcctcccccccccccctctctaccttctctagatcggcgttccggtccatgcatggttagggcccggtagttctacttctgttcatgtttgtgttagatccgtgtttgtgttagatccgtgctgctagcgttcgtacacggatgcgacctgtacgtcagacacgttctgattgctaacttgccagtgtttctctttggggaatcctgggatggctctagccgttccgcagacgggatcgatttcatgattttttttgtttcgttgcatagggtttggtttgcccttttcctttatttcaatatatgccgtgcacttgtttgtcgggtcatcttttcatgcttttttttgtcttggttgtgatgatgtggtctggttgggcggtcgttctagatcggagtagaattctgtttcaaactacctggtggatttattaattttggatctgtatgtgtgtgccatacatattcatagttacgaattgaagatgatggatggaaatatcgatctaggataggtatacatgttgatgcgggttttactgatgcatatacagagatgctttttgttcgcttggttgtgatgatgtggtgtggttgggcggtcgttcattcgttctagatcggagtagaatactgtttcaaactacctggtgtatttattaattttggaactgtatgtgtgtgtcatacatcttcatagttacgagtttaagatggatggaaatatcgatctaggataggtatacatgttgatgtgggttttactgatgcatatacatgatggcatatgcagcatctattcatatgctctaaccttgagtacctatctattataataaacaagtatgttttataattattttgatcttgatatacttggatgatggcatatgcagcagctatatgtggatttttttagccctgccttcatacgctatttatttgcttggtactgtttcttttgtcgatgctcaccctgttgtttggtgttacttctgcaggtcgactttaacttagcctaggatccatgatgatgatgagcagcggccgggcgggcggcggggccaccgcggggcgatacccgttcacggcgtcgcagtggcaggagctggagcaccaggcgctcatctacaagtgcctggcgtccggcaagcccatcccttcctacctcatgccgccgctccgccgcatcctcgactccgccctcgccacgtcgccgtccctcgcctacccgccgcaaccctcactgggctggggctgcttcgggatgggcttcacccggaaggccgacgaggacccggagcccgggcggtgccggcgcacggacggcaagaagtggcgctgctccaaggaggcgtacccggactccaagtactgcgagaagcacatgcaccggggcaagaaccgttcaagaaagcctgtggaaatgtccttggccacgccggccccggcgccggcccccgccgccgccacaaccgccaccgccacctcatccccggcgccgtcctaccaccgcccggcccacgacgccacgccgtctccgtaccacgcgctgtatggaggcggcggcggcggcggcggtagcccttactcggcgtcggcacgcccaggagcaaccggaggcggcggcgcgtaccaccacgcgcagcatgtgagccccttccacctccacctcgagaccacccacccgcacccgccgccgccctacaactactccgccgaccagagggactacgcgtacgggcacgcggccgccaaggaggtcggcgagcacgccttcttctcggacggcgcgggcgagcgggtcgaccggcaggccgcggcggggcagtggcagttcaggcagctcggggtggagacgaagccgggccccacgccgctgttccccgtcgccgggtacgggcacggcgcggcgtcgccgtacggcgtggagatgggcaaggacgacgacgagcaggaggagaggcgccgccagcactgcttcgttcttggagccgacctgcggctggagcggccgtcgtcgggccatggccatggccatgaccatgacgacgccgccgccgcgcagaagccgctccggcccttcttcgacgagtggccgcaccagaagggggacaaggccgggtcgtggatggggctcgacggcgagacgcagctctccatgtccatccccatggccgccaccgacctccccgtcacctcccgcttccgtaacgacgagtgaggtaccgttaacagatctactaactatctatactgtaataatgttgtatagccgccggatagctagctagtttagtcattcagcggcgatgggtaataataaagtgtcatccatccatcaccatgcgtggcaacgtgagcaatgacctgattgaacaaattgaaatgaaaagaagaaatatgttatatgtcaacgagatttcctcataatgccactgacgacgtgtgtccaagaaatgtatcagtgatacgtatattcacaatttttttatgacttatactcacaatttgtttttttactacttatactcacaatttgttgtgcgtaccataacaatttcgatcgaatatatatcagaaagttgacgaaagtaagctcactcaaaaagttaaatgggctgcggaagctgcgtcaggcccaagttttggctattctatccggtatccacgattttgatggctgagggacatatgttcgcttaagcttcggtccgggcctagaaggccgatctcccgggcacccagctttcttgtacaaagtggccgttaacggatcggccagaatggcccggaccgggttaccgaattcgagctcggtaccctggttcacaaactcaatacaacacacagtggagtagggtattacgctccggcggcccgaaccactctaaatccttgtgtcctcgtgtgctcttccaccattaatgactgtaattgcagggacacgaagagttgtagcgcttttgccaacaagatccgctatatgctagtagagtggaacctgcacagcaacaagcatccaataatctgagaataagaattatgtgtggtgatggttctcatctctgcaactcgccattttcgcgagagaaccaaatccaagttggtgaagatcatgatttgggctcatgggctggcatagtagctattacctttgcaattgtggttcgaatctatccgatattctccttttcagggagagctaatgcttatgcttattgggtattttggtttgacactgcttcacgcccaaaaaaaggcaactatgtctgagttggatatggcccaaaaaaaggcagctatgtctgagttggatatggaagtcttctttcgtttagggtgaagtaagaccaagctcatgagcttattatcttaggtcggaacaaattagttgataggcatggcacatttatcaaattataatgattttaacagaaaagcaacacctctttttcagcagcaccagctttgcaagctgcaattgacactccaagcatagtatttgctccaaactcagcctgcatttcgcacaatatcatatctatttccatttggataaaatatattttccagaaatatgggaacagaatcaagatacagaaaaaagttgtggtagtagtggtaagtggaaacacaagtacagtgaaaagatagcattatttctgaacagtcaaattaaccgaaataagtagtatcacatactgcccctaaattgactacacccaatgtaaagaattgcttgagcatattgagccatcagttgtttgtttgtgtaacggatttgacaatgcagagttcaggagcaaaaaaccgcaaaggagagaaagagggaaaggatctcctagtatcccaccttgtggcgcgccctgtcaagtgcatgatggcctggtcgatctgcgtctgctgctgcggttccatcccaacgagtgcctccgacaccttgtcgttgatcacccgcaccgcgtaggcgacccccctggcgaggaacttccgcctctcggaggccccggccgcgtcggcggcggcgccctcgagcgcgcccacgctagccgtagatgctcggtgcacggccttgttggtgtgcaactcgacctcaacggccggtgcgctacgcccgtcaaggatctggcgcgcccgcaccctcgtgatcacggtgggcgcctcccgcctcatgtggccgacgatgaaaagcgccgggttaggggccttggcgcgcaccgccgtattcagggcctcctcgctcttgcgcgagagcaggtgcttccccaggtactcctgcactgacaaggctgccacagcggtggaatttgtcctcacgacttcgccacgtcgtcctcacctccctggcttcccacgactccgccgtatcgaggtgctcggtgggtcgtcttaatccgaagtccgaactaggaagacgagacagagaggtctgaggaatgggcctcgtttgatgttgagctgaattatttttccagcataagcccaggtcttggtccatgaacaaaattactagaaacccagcccagtactacgatctaaaagagggactgccactggatagctctctctagcattctccacgctccaatacagcggcgtcgtgtctatccgggtctatccgcgaacacgtgagaactctccagaaactgctttctcctccacttcatctctctcgctttccctctataaaaagaccccttctaggaattgagggagacagcaagcaccaagcagcgatccgaagctcaatcaattcactcaaacctcttccccaaatcttcgattagatcttcgttgacaagaagactagaaccgaacctgacatgtccaacctgctcacggttcaccagaaccttccggctcttccagtggacgcgacgtccgatgaagtcaggaagaacctcatggacatgttccgcgacaggcaagcgttcagcgagcacacctggaagatgctgctctccgtctgccgctcctgggctgcatggtgcaagctgaacaacaggaagtggttccccgctgagcccgaggacgtgagggattaccttctgtacctgcaagcgcgaggtttgtttctgcttctacctttgatatatatataataattatcattaattagtagtaatataatatttcaaatatttttttcaaaataaaagaatgtagtatatagcaattgcttttctgtagtttataagtgtgtatattttaatttataacttttctaatatatgaccaaaacatggtgatgcctaggtctggcagtgaagaccatccagcaacaccttggacaactgaacatgcttcacaggcgctccggcctcccgcgccccagcgactcgaacgccgtgagcctcgtcatgcgccgcatcaggaaggaaaacgtcgatgccggcgaaagggcaaagcaggccctcgcgttcgagaggaccgatttcgaccaggtccgcagcctgatggagaacagcgacaggtgccaggacattaggaacctggcgttcctcggaattgcatacaacacgctcctcaggatcgcggaaattgcccgcattcgcgtgaaggacattagccgcaccgacggcggcaggatgcttatccacattggcaggaccaagacgctcgtttccaccgcaggcgtcgaaaaggccctcagcctcggagtgaccaagctcgtcgaacgctggatctccgtgtccggcgtcgcggacgacccaaacaactacctcttctgccgcgtccgcaagaacggggtggctgcccctagcgccaccagccaactcagcacgagggccttggaaggtattttcgaggccacccaccgcctgatctacggcgcgaaggatgacagcggtcaacgctacctcgcatggtccgggcactccgcccgcgttggagctgctagggacatggcccgcgccggtgtttccatccccgaaatcatgcaggcgggtggatggacgaacgtgaacattgtcatgaactacattcgcaaccttgacagcgagacgggcgcaatggttcgcctcctggaagatggtgactgaggtacccaacctagacttgtccatcttctggattggccaacttaattaatgtatgaaataaaaggatgcacacatagtgacatgctaatcactataatgtgggcatcaaagttgtgtgttatgtgtaattactagttatctgaataaaagagaaagagatcatccatatttcttatcctaaatgaatgtcacgtgtctttataattctttgatgaaccagatgcatttcattaaccaaatccatatacatataaatattaatcatatataattaatatcaattgggttagcaaaacaaatctagtctaggtgtgttttgcgatccgatatcgaattggccacggtaccagctgctgctgttctagggttcacaagtctgcctatttgtcttccccaatggagctatggttgtctggtctggtccttggtcgtgtcccgtttcattgtgtactatttacctgtaatgtgtatccttaagtctggtttgatggtgtctgaaacgttttgctgtggtagagcagcatggaagaactataatgaataagtgatccctaatcattgtgtccaaattttgcttctgctatacccttttgtgctgtttcttatgttttgcttaaaaatttgatctgacaaacaaatttgtctaaattatgctcttgttctgactgtgtactgtacacatttgtattgctaccggtttggcacatagttttctctttgattgcagatcaaacccttctgattgcagattgcttggctatggctgatgtgctcactgttcttctttagcttgtatattgctgatggtggcttggctacggctgaaaaagttgctgctgcgccgacttggcaactgttgctccagtaatgctttgtcctctcttcctagccgccgacttggcacttggcagctgttgctcctgtaatgcgttgttatctcttatctcttgagatgtactatgattttgaggctgtttgacttgtgccagattgccagtgctgatgctatattatctcaggtttttatgctagtatatgttttactgtgtgctgcctgtgtcgagttacgtaatctattgaaccgctatgcgtgttgatgccctgttgttgcttgccagattgatgcccctgttgcttgcagcttgcaagctgtagtgaaatcctaaaattccaaaccaaatctattctgaacttttgaagatctgtgatgtccggaagaaaagattcaaacagataaacgggactctccagaatctataaaataaatgatcgacaaacgctttgctttggtaggcttcaagcttggtcacccggtccgggcctagaaggccagcttcggccgccccgggcaactttattatacaaagttgatagataaatcagatatctggttcctaaggacccggcggaccgattaaactgattcggtccgacgcgttacctaataacttcgtatagcatacattatacgaagttattagctaactaactagtaagcttaagccatgggtcgacggatccgttaactagcgtggcatttggcaccgccgcacactatgcgagctaggagtgctagtttacagatgaaactatgaaaccaagaaaacacaattgtccgtagctagcgcgtggcgtcgtgtcaagcttcacacagtatcttcgttcttcactataaatcgcgcctgttgttcgtgagacccaccaccgtggataacagtcccctaataataagcgatcaacagcactgctgatggctgaacaccgaggcgccgccgcgcgtaaccatccgccggagcagcccgtcgtgccggcgaacgacgccttccccgaccgcgcccagcagctctgcctcgacgccgggcgcgcgctcgcgatgtgcggcgtgctcgtcgccgtccctcccgcattttacgcgtcgacgtcgcggacgacaccgcacttgccttcgtcggcttcgtcctctggatcatcggtgcgtggctgtgcctcctggcgctcacgcccttggctccacgggcggtgagggcgggcggggccgccgccagcaccttgctgatcaggtgcctgtccctttcatgaactactagcgcccgcgcccgcggccgccgggcacaagagaacacatcgatgttcgctgcgtacgtcagcaataaggcactctttgtcagtagtcgagtgcatatgttgggtgtttgccctgggagatttcaagtgttgtggccattatcccgcaggataaaaaatcggcggcttttggattgatacggaaaataacgatgtttcatgctcgtgttgtgtgtgtgacatcttgtcagccaagtttttaaccgttgctactccccctctgtgggctcagtgtgtggaccggaatacgtcgtacataggccgtagcctaagcccaatatgccgtttttcaggttggcctgtgtgacgacaagcgggtctcaaaagcccatcacgcaactggcctgcaattattggaggagagcgcgtcgagttggttccagaggctgcgtggtggggccggactctgcgacgacctctcgttcgcgtccgatttggttgccgtgagccgtgacgtaacgcctccttccgttcctccctatataagttccacccccgggtccggtttccccaagccccagtgacccccgatcccgatcgcgaaatctccgcacccgccggcaagggaccgaagcaagcctctctcccgaccgtcgcatcaaggtacgcgtccgctcgatctgtcctcttccttctcgatttgacttgctgtggtgcccgatcacgggatcagaatcgcaccagtgtagatttcgcatgttctaagatgtgttagtttccaggctaatccagttctcttgacgcccgatccgatcgagctccgtgtttatttcagcctaatcgtagtattcccctaaaatttcctcattagggggttcgcaagattgttggtcgacaggttcacttatgctcgatcgcttacttttagtcgattcatgctgcgtactattgttgccccccgtggttttatcttttctcgtgtgaaatccagtagatatagtagatatcgtagcattaggttttaattcaatcgattgattattgtatcatcaaaattgagaagttcgaatcatgcctatcatgctgcctcaaccgaaatcctgtatattgaagtttcaattcaattgattgatcattcattagattcaaccaaaatctagaaggttagatgacgcatgtcatgctgcctgcgtagtttacctttgatctgtttatgattaccttatcagtaggatatttgtgattttgggaagtagcactaactgattcatgctgacatgatgttccctttcagattatactgttgagtcctatctaattgatgctttgtatgctatatgaatacgtcatggtaaattagcagttaattagcatattagcaattgggcgtacctcatcaggattgctcttgtagatgtgtgtggtgatgtttcttgttcaattcatgttctgctttaaaagtatgtgttctctgtttgttaattaagattcatggttataatgatttggacctaattaatcagggttgcccttttagatgcgtggttacttgttgagttcatttttttcctgctatagttgtatgcgtttgttcattcatggttagatttgatttgtttcttctctattccatgccttccatatacttcaattgtagcttaacatgagatttctgtatatgcaggtcgaccgccggggatccacacgacaccatggcccagtccaagcacggcctgaccaaggagatgaccatgaagtaccgcatggagggctgcgtggacggccacaagttcgtgatcaccggcgagggcatcggctaccccttcaagggcaagcaggccatcaacctgtgcgtggtggagggcggccccttgcccttcgccgaggacatcttgtccgccgccttcatgtacggcaaccgcgtgttcaccgagtacccccaggacatcgtcgactacttcaagaactcctgccccgccggctacacctgggaccgctccttcctgttcgaggacggcgccgtgtgcatctgcaacgccgacatcaccgtgagcgtggaggagaactgcatgtaccacgagtccaagttctacggcgtgaacttccccgccgacggccccgtgatgaagaagatgaccgacaactgggagccctcctgcgagaagatcatccccgtgcccaagcagggcatcttgaagggcgacgtgagcatgtacctgctgctgaaggacggtggccgcttgcgctgccagttcgacaccgtgtacaaggccaagtccgtgccccgcaagatgcccgactggcacttcatccagcacaagctgacccgcgaggaccgcagcgacgccaagaaccagaagtggcacctgaccgagcacgccatcgcctccggctccgccttgccctccggactcagatctcgatagagtcaacctagacttgtccatcttctggattggccaacttaattaatgtatgaaataaaaggatgcacacatagtgacatgctaatcactataatgtgggcatcaaagttgtgtgttatgtgtaattactagttatctgaataaaagagaaagagatcatccatatttcttatcctaaatgaatgtcacgtgtctttataattctttgatgaaccagatgcatttcattaaccaaatccatatacatataaatattaatcatatataattaatatcaattgggttagcaaaacaaatctagtctaggtgtgttttgcgaattgcggcgcccttactttaacgcctctaaccaacacccctttatctttataaggaacaataaacagaatttgccccactgttctaaatcacctaataatatccccagctaaaaacaataaaggtttcctagaattaagacaagcatgactgttcctccaggagggtttggaacattgttgcagtcttgcagatacgggcgaagggtgagaaacagagcggagggctggaggtgacctcggtagtcgacgccggagttgagcttgacaacgacggggcggcccctgatggacttgaggaagtccgatggcgtcttcaccgtcccgccggcgcccgaggcgggcctgtcgctgccgccgccgccgctgctcatcttgcgcgctgtgcccccggcggtgtccctgtgttgcggatcgcgggtgggccaggtggatgcgagggcgacccgtttggactccggccggagccgccggatccctggtcggtgtcagtgccgtttactctgggccccacgtgtcagtaccgtctgtagatgacaacaacccgtcgtccacagtcatgtccaaaatatcctttcttcttttttttcgattcggatatctatcttccttttttttttccaaaaatcttcttgacgcaccagcgcgcacgtttgtggtaaacgccgacacgtcggtcccacgtcgatagaccccacccaccagtgagtagcgtgtacgtattcgggggtgacggacgtgtcgccgtcgtcttgctagtcccattcccatctgagccacacatctctgaacaaaaaaaaggagggaggcctccacgcacatccccctccgtgccacccgccccaaaccctcgcgccgcctccgagacagccgccgcaaccatggccaccgccgccgccgcgtctaccgcgctcactggcgccactaccgctgcgcccaaggcgaggcgccgggcgcacctcctggccacccgccgcgccctcgccgcgcccatcaggtgctcagcggcgtcacccgccatgccgatggctcccccggccaccccgctccggccgtggggccccaccgagccccgcaagggtgctgacatcctcgtcgagtccctcgagcgctgcggcgtccgcgacgtcttcgcctaccccggcggcgcgtccatggagatccaccaggcactcacccgctcccccgtcatcgccaaccacctcttccgccacgagcaaggggaggcctttgccgcctccggctacgcgcgctcctcgggccgcgtcggcgtctgcatcgccacctccggccccggcgccaccaacctagtctccgcgctcgccgacgcgctgctcgattccgtccccatggtcgccatcacgggacaggtggcgcgacgcatgattggcaccgacgccttccaggagacgcccatcgtcgaggtcacccgctccatcaccaagcacaactacctggtcctcgacgtcgacgacatcccccgcgtcgtgcaggaggctttcttcctcgcctcctctggtcgaccagggccggtgcttgtcgacatccccaaggacatccagcagcagatggcggtgcctgtctgggacaagcccatgagtctgcctgggtacattgcgcgccttcccaagccccctgcgactgagttgcttgagcaggtgctgcgtcttgttggtgaatcgcggcgccctgttctttatgtgggcggtggctgcgcagcatctggtgaggagttgcgacgctttgtggagctgactggaatcccggtcacaactactcttatgggcctcggcaacttccccagcgacgacccactgtctctgcgcatgctaggtatgcatgggacggtgtatgcaaattatgcagtggataaggccgatctgttgcttgcacttggtgtgcggtttgatgatcgcgtgacagggaagattgaggcttttgcaagcagggctaagattgtgcacgttgatattgatccggctgagattggcaagaacaagcagccacatgtgtccatctgtgcagatgttaagcttgctttgcagggcatgaatgctcttcttgaaggaagcacatcaaagaagagctttgactttggctcatggaacgatgagttggatcagcagaagagggaattcccccttgggtataaaacatctaatgaggagatccagccacaatatgctattcaggttcttgatgagctgacgaaaggcgaggccatcatcggcacaggtgttgggcagcaccagatgtgggcggcacagtactacacttacaagcggccaaggcagtggttgtcttcagctggtcttggggctatgggatttggtttgccggctgctgctggtgcttctgtggcaaacccaggtgtcactgttgttgacatcgatggagatggtagctttctcatgaacgttcaggagctagctatgatccgaattgagaacctcccagtgaaggtctttgtgctaaacaaccagcacctggggatggtggtgcagttggaggacaggttctataaggccaacagagcgcacacatacttgggaaacccagagaatgaaagtgagatatatccagatttcgtgacgatcgccaaagggttcaacattccagcggtccgtgtgacaaagaagaacgaagtccgcgcagcgataaagaagatgctcgagactccagggccgtacctcttggatataatcgtcccacaccaggagcatgtgttgcctatgatccctagtggtggggctttcaaggatatgatcctggatggtgatggcaggactgtgtactgactagctagtcagttaacagatctgccagatcctcggtgtacaaataacccgtcttatcctatgagacgggccggcgtcagtgtgttctggaggaatttttatgtcagagcctttttctttgtgtgcttgatgtagatgccaagggaagcttattggctgttgaagcttgatgcaaaataaattatggaactctgttttttgtttatctaataataactagcaaatatgcttccattgcattgaaactaacagccttttgtgtttccaagttttattttgtgacaatgtcatctatttcaattagttgtggaatcggaaacttgcaggactaacttggaaactccaatccctcagcatcctggactttttcctggtgtaatccatgtagatattattttaatcatcattttagttctggaggtttttccatctccggttttgctcccctttcttcaaaaaaaaaaaaaaaatgccgtaggcgccgcaacgcccacctgttgttcaaactcatgggcacgagtggctcgaagattttatacaacaattgctgtagtttcaccgttgctggtgaagaagcatttttttaaaaaaatatagtggtattcattttaattagtttagttgtgcagcgagcaaaatttggacatgctctgctcggaatctgatcgacctagacacagattagcagcagtagctttgtcatctgttccaagagttgcgatctgatagaagaaaaaaaaaccttcccttcaatgtaaaaccgaaactaacaagaaagaagcacagtgccgtttaggcaagtatggagtacgtattaagcatgtagaaggccatgcatgaaccactaacaagaaagaagcgcagtgccattcaggcaagcataagcatgtagattggcatgcatgaacaactaacagtagatcgtctctggtctgattagaagttttttgggaagccaagaaatcatgtacaactggttccatctcaaattccgtggcaaaaagaggcctaagcaacatacctcgagtagatcacattcaagcttggtcacccggtccgtcaatattctgattccgatgacttcgtaggttcctagctcaagccgctcgtgtccaagcgtcacttacgattagctaatgattacggcatctaggaccgactagtggcgcgccgactagctagctaaggtaccgagctcgaattcattccgattaatcgtggcctcttgctcttcaggatgaagagctatgtttaaacgtgcaagcgctactagacaattcagtacattaaaaacgtccgcaatgtgttattaagttgtctaagcgtcaatttgtttacaccacaatatatcctgcca

SEQ ID NO: 91 - DNA, 31289 bp, Artificial sequence
  PHP98784
gtttacccgccaatatatcctgtcaaacactgcggccgcacttgaccgcggatggagccggagctgtggtgaggccatcgacgggaggtgggggagaacacagtctcagtgttctttgtgagtccgcaaggtttttagcttttctgtattaattaaggttgctgttggctgtagaatacggtcgtggaagagctgtatcggtagctactacgtaagctattatatactggaagtctggagctcgtcgatctccggtcgtcttcctccatttctcctcgtcttgctttgactgctgctaccatttgcttctgttttctgatgaagcatgccatgtcggccaccagtgtttgtgtggtttttgcagggaatggctttcaagtgctgtgattgaatggccctcgtcgtcctcggctgagctcacatggacgcgtcatgtgagtgagatatatgatcatatgatgagtggggttcgggtgagtgcgtacttgaagtaggatcccgctttcactcattcattcattggcctttaaaccgggaaattttcgcgaggagatggagggaagcaagcagggtgacgagtgcagagtgccgcgagcgctttgtcaaaaggcaccgccgtaggcaaaaaaatcaatggccctgactgactcgatggtagtactactgtagagactagagagggttgctccccatatcttcgtgtgacttttactccagcattgcatttccgtcattgagacgttaattaatagcagctttcgggacagatgactgtggccatgtttcgtcacggccgcttcgtgccagctgggggtactatagtactgtgattttgttagtaaaaactttcattaggccaccattgacgaccgggccttcgcttttgctgcgctaattaaccatttcccggcgaccgaagggaacatgaacatgccccgacacatgagggcatgaggactagtgttctccctgtcgttcgttgacttgactagtgatagtttaaacgctcttcaactggaagagcggttactaccggttcactagctagctgctaatcgagctagttaccctatgaggtgacatgaagcgctcacggttactatgacggttagcttcacgactgttggtggcagtagcgtacgacttagctatagttccggacttacctagctaataacttcgtatagcatacattatacgaagttatggttaccgagctgttaccaagcggccgcacactgatagtttaaactgaaggcgggaaacgacaatctgatcatgagcggagaattaagggagtcacgttatgacccccgccgatgacgcgggacaagccgttttacgtttggaactgacagaaccgcaacgattgaaggagccactcagccgcgggtttctggagtttaatgagctaagcacatacgtcagaaaccattattgcgcgttcaaaagtcgcctaaggtcactatcagctagcaaatatttcttgtcaaaaatgctccactgacgttccataaattcccctcggtatccaattagagtctcatattcactcccatggcggccaatgcgggcggcggtggagcgggaggaggcagcggcagcggcagcgtggctgcgccggcggtgtgccgccccagcggctcgcggtggacgccgacgccggagcagatcaggatgctgaaggagctctactacggctgcggcatccggtcgcccagctcggagcagatccagcgcatcaccgccatgctgcggcagcacggcaagatcgagggcaagaacgtcttctactggttccagaaccacaaggcccgcgagcgccagaagcgccgcctcaccagcctcgacgtcaacgtgcccgccgccggcgcggccgacgccaccaccagccaactcggcgtcctctcgctgtcgtcgccgccgccttcaggcgcggcgcctccctcgcccaccctcggcttctacgccgccggcaatggcggcggatcggctgtgctgctggacacgagttccgactggggcagcagcggcgctgctatggccaccgagacatgcttcctgcaggactacatgggcgtgacggacacgggcagctcgtcgcagtggccacgcttctcgtcgtcggacacgataatggcggcggccgcggcgcgggcggcgacgacgcgggcgcccgagacgctccctctcttcccgacctgcggcgacgacggcggcagcggtagcagcagctacttgccgttctggggtgccgcgtccacaactgccggcgccacttcttccgttgcgatccaacagcaacaccagctgcaggagcagtacagcttttacagcaacagcaacagcacccagctggccggcaccggcaaccaagacgtatcggcaacagcagcagcagccgccgccctggagctgagcctcagctcatggtgctccccttaccctgctgcagggagtatgtgagagcaacgcgagctgccactgctcttcactgatgtctctggaatggaaggaggaggaagtgagaacagatcattcgacaaagcagcattagtccgttgatcggtggaagaccactcgtcagtgttgagttgaatgtttgatcaataaaatacggcaatgctgtaagggttgttttttatgccattgataatacactgtactgttcagttgttgaactctatttcttagccatgccaagtgcttttcttattttgaataacattacagcaaaaagttgaaagacaaaaaaaaaaacccccgaacagagtgctttgggtcccaagcttctttagactgtgttcggcgttccccctaaatttctccccctatatctcactcacttgtcacatcagcgttctctttccccctatatctccacgctctacagcagttccacctatatcaaacctctataccccaccacaacaatattatatactttcatcttcaactaactcatgtaccttccaatttttttctactaataattatttacgtgcacagaaacttagcaaggagagagagagcgggaatttaaatgctcggcgttaggcttttagtccgctaggtggctagaccgaggttaggacgctagttcactaggggcctagtggtgttttaagacgtcacggtcactacgaatcgaccgaagcttgcatgggccgcatcgagcagctggcttgtggggaccagacaaaaaaggaatggtgcagaattgttaggcgcacctaccaaaagcatctttgcctttattgcaaagataaagcagattcctctagtacaagtggggaacaaaataacgtggaaaagagctgtcctgacagcccactcactaatgcgtatgacgaacgcagtgacgaccacaaaactcgagcaacgagatcatgagccaatcaaagaggagtgatgtagacctaaagcaataatggagccatgacgtaagggcttacgcccatacgaaataattaaaggctgatgtgacctgtcggtctctcagaacctttactttttatgtttggcgtgtatttttaaatttccacggcaatgacgatgtgaccgtcgacccactaaaacattgctttgtcaaaagctaaaaaagatgatgcccgacagccacttgtgtgaagcatgagaagccggtccctccactaagaaaattagtgaagcatcttccagtggtccctccactcacagctcaatcagtgagcaacaggacgaaggaaatgacgtaagccatgacgtctaatcccagggccagcttgcatgcctgcagtgcagcgtgacccggtcgtgcccctctctagagataatgagcattgcatgtctaagttataaaaaattaccacatattttttttgtcacacttgtttgaagtgcagtttatctatctttatacatatatttaaactttactctacgaataatataatctatagtactacaataatatcagtgttttagagaatcatataaatgaacagttagacatggtctaaaggacaattgagtattttgacaacaggactctacagttttatctttttagtgtgcatgtgttctcctttttttttgcaaatagcttcacctatataatacttcatccattttattagtacatccatttagggtttagggttaatggtttttatagactaatttttttagtacatctattttattctattttagcctctaaattaagaaaactaaaactctattttagtttttttatttaataatttagatataaaatagaataaaataaagtgactaaaaattaaacaaataccctttaagaaattaaaaaaactaaggaaacatttttcttgtttcgagtagataatgccagcctgttaaacgccgtcgacgagtctaacggacaccaaccagcgaaccagcagcgtcgcgtcgggccaagcgaagcagacggcacggcatctctgtcgctgcctctggacccctctcgagagttccgctccaccgttggacttgctccgctgtcggcatccagaaattgcgtggcggagcggcagacgtgagccggcacggcaggcggcctcctcctcctctcacggcaccggcagctacgggggattcctttcccaccgctccttcgctttcccttcctcgcccgccgtaataaatagacaccccctccacaccctctttccccaacctcgtgttgttcggagcgcacacacacacaaccagatctcccccaaatccacccgtcggcacctccgcttcaaggtacgccgctcgtcctcccccccccccctctctaccttctctagatcggcgttccggtccatgcatggttagggcccggtagttctacttctgttcatgtttgtgttagatccgtgtttgtgttagatccgtgctgctagcgttcgtacacggatgcgacctgtacgtcagacacgttctgattgctaacttgccagtgtttctctttggggaatcctgggatggctctagccgttccgcagacgggatcgatttcatgattttttttgtttcgttgcatagggtttggtttgcccttttcctttatttcaatatatgccgtgcacttgtttgtcgggtcatcttttcatgcttttttttgtcttggttgtgatgatgtggtctggttgggcggtcgttctagatcggagtagaattctgtttcaaactacctggtggatttattaattttggatctgtatgtgtgtgccatacatattcatagttacgaattgaagatgatggatggaaatatcgatctaggataggtatacatgttgatgcgggttttactgatgcatatacagagatgctttttgttcgcttggttgtgatgatgtggtgtggttgggcggtcgttcattcgttctagatcggagtagaatactgtttcaaactacctggtgtatttattaattttggaactgtatgtgtgtgtcatacatcttcatagttacgagtttaagatggatggaaatatcgatctaggataggtatacatgttgatgtgggttttactgatgcatatacatgatggcatatgcagcatctattcatatgctctaaccttgagtacctatctattataataaacaagtatgttttataattattttgatcttgatatacttggatgatggcatatgcagcagctatatgtggatttttttagccctgccttcatacgctatttatttgcttggtactgtttcttttgtcgatgctcaccctgttgtttggtgttacttctgcaggtcgactttaacttagcctaggatccatggccactgtgaacaactggctcgctttctccctctccccgcaggagctgccgccctcccagacgacggactccacactcatctcggccgccaccgccgaccatgtctccggcgatgtctgcttcaacatcccccaagattggagcatgaggggatcagagctttcggcgctcgtcgcggagccgaagctggaggacttcctcggcggcatctccttctccgagcagcatcacaaggccaactgcaacatgatacccagcactagcagcacagtttgctacgcgagctcaggtgctagcaccggctaccatcaccagctgtaccaccagcccaccagctcagcgctccacttcgcggactccgtaatggtggcttcctcggccggtgtccacgacggcggtgccatgctcagcgcggccgccgctaacggtgtcgctggcgctgccagtgccaacggcggcggcatcgggctgtccatgattaagaactggctgcggagccaaccggcgcccatgcagccgagggtggcggcggctgagggcgcgcaggggctctctttgtccatgaacatggcggggacgacccaaggcgctgctggcatgccacttctcgctggagagcgcgcacgggcgcccgagagtgtatcgacgtcagcacagggtggagccgtcgtcgtcacggcgccgaaggaggatagcggtggcagcggtgttgccggcgctctagtagccgtgagcacggacacgggtggcagcggcggcgcgtcggctgacaacacggcaaggaagacggtggacacgttcgggcagcgcacgtcgatttaccgtggcgtgacaaggcatagatggactgggagatatgaggcacatctttgggataacagttgcagaagggaagggcaaactcgtaagggtcgtcaagtctatttaggtggctatgataaagaggagaaagctgctagggcttatgatcttgctgctctgaagtactggggtgccacaacaacaacaaattttccagtgagtaactacgaaaaggagctcgaggacatgaagcacatgacaaggcaggagtttgtagcgtctctgagaaggaagagcagtggtttctccagaggtgcatccatttacaggggagtgactaggcatcaccaacatggaagatggcaagcacggattggacgagttgcagggaacaaggatctttacttgggcaccttcagcacccaggaggaggcagcggaggcgtacgacatcgcggcgatcaagttccgcggcctcaacgccgtcaccaacttcgacatgagccgctacgacgtgaagagcatcctggacagcagcgccctccccatcggcagcgccgccaagcgcctcaaggaggccgaggccgcagcgtccgcgcagcaccaccacgccggcgtggtgagctacgacgtcggccgcatcgcctcgcagctcggcgacggcggagccctggcggcggcgtacggcgcgcactaccacggcgccgcctggccgaccatcgcgttccagccgggcgccgccagcacaggcctgtaccacccgtacgcgcagcagccaatgcgcggcggcgggtggtgcaagcaggagcaggaccacgcggtgatcgcggccgcgcacagcctgcaggacctccaccacctgaacctgggcgcggccggcgcgcacgactttttctcggcagggcagcaggccgccgccgctgcgatgcacggcctgggtagcatcgacagtgcgtcgctcgagcacagcaccggctccaactccgtcgtctacaacggcggggtcggcgacagcaacggcgccagcgccgtcggcggcagtggcggtggctacatgatgccgatgagcgctgccggagcaaccactacatcggcaatggtgagccacgagcaggtgcatgcacgggcctacgacgaagccaagcaggctgctcagatggggtacgagagctacctggtgaacgcggagaacaatggtggcggaaggatgtctgcatgggggactgtcgtgtctgcagccgcggcggcagcagcaagcagcaacgacaacatggccgccgacgtcgggcatggcggcgcgcagctcttcagtgtctggaacgacacttaagcgtacctagtggtacctgacatcttatagtctgcaacctctcgtgtctgaattcctatctttatcaagtgttattgcttccacgactataggacagctttcgtcgaaagcttttgctcatgtgatctcgaaggattcatctagtctgatttttcgtgacttgtatcggttttattggattcatccaacatatatcaataaaaaatgagttgtgtttcctttcttcctagttcagttaaaattatttccctcctgcgcttgtgctgtaattgtctgtgtacctgttgtttgtgactgtgttagttcccttggatatgatttcgtatttgatatgtacatggagatagcttagcttcattattggagtatgaagttagtatgacatagtcactctcctggaaaattgacactgcaaaccatatttttattctgaaccacaaatcctagtcagtccgctggcatatgccgtccgtttgctgaatccagaacgtgggtttggagatgtacggctgagatgcctctatgcgaaggggatttcgtggtgaaacgagatgggagtagagcaacgcccgtggaagatgcttcaaacttccacacttttgagcaacgatcggcagtagtaaggtagacgatttcaagatcaaagcatatgaagataaacaacatcaacaacaaaatttgttggggttctatagagagaaacagagctacatacatacactgttttgtatctaccatctgagatgatgaaaagatgaaaaactaaagaatgccccggcgccaacgccaggacacgccgcgcgcgcgtcacccgagccatctcttgacccagccggcgctgtatatttacacacgttgcagcatcgatcaccacctgttcgatcgcgtcgccgtcaccggcgcgccgcgacttattgaactagtctagggcgcggctaacaacctagcttagattgccttgtctaaacccttaggctaacgcgccactctagacaccttgctagttggatattacctcttctcttcaaagtatccttgaacgctcaccggttatcaaatctctacactatagctctgtagtcttgctagatagttagttctttagctctcgaattcgagctcggtaccctggttcacaaactcaatacaacacacagtggagtagggtattacgctccggcggcccgaaccactctaaatccttgtgtcctcgtgtgctcttccaccattaatgactgtaattgcagggacacgaagagttgtagcgcttttgccaacaagatccgctatatgctagtagagtggaacctgcacagcaacaagcatccaataatctgagaataagaattatgtgtggtgatggttctcatctctgcaactcgccattttcgcgagagaaccaaatccaagttggtgaagatcatgatttgggctcatgggctggcatagtagctattacctttgcaattgtggttcgaatctatccgatattctccttttcagggagagctaatgcttatgcttattgggtattttggtttgacactgcttcacgcccaaaaaaaggcaactatgtctgagttggatatggcccaaaaaaaggcagctatgtctgagttggatatggaagtcttctttcgtttagggtgaagtaagaccaagctcatgagcttattatcttaggtcggaacaaattagttgataggcatggcacatttatcaaattataatgattttaacagaaaagcaacacctctttttcagcagcaccagctttgcaagctgcaattgacactccaagcatagtatttgctccaaactcagcctgcatttcgcacaatatcatatctatttccatttggataaaatatattttccagaaatatgggaacagaatcaagatacagaaaaaagttgtggtagtagtggtaagtggaaacacaagtacagtgaaaagatagcattatttctgaacagtcaaattaaccgaaataagtagtatcacatactgcccctaaattgactacacccaatgtaaagaattgcttgagcatattgagccatcagttgtttgtttgtgtaacggatttgacaatgcagagttcaggagcaaaaaaccgcaaaggagagaaagagggaaaggatctcctagtatcccaccttgtggcgcgccctgtcaagtgcatgatggcctggtcgatctgcgtctgctgctgcggttccatcccaacgagtgcctccgacaccttgtcgttgatcacccgcaccgcgtaggcgacccccctggcgaggaacttccgcctctcggaggccccggccgcgtcggcggcggcgccctcgagcgcgcccacgctagccgtagatgctcggtgcacggccttgttggtgtgcaactcgacctcaacggccggtgcgctacgcccgtcaaggatctggcgcgcccgcaccctcgtgatcacggtgggcgcctcccgcctcatgtggccgacgatgaaaagcgccgggttaggggccttggcgcgcaccgccgtattcagggcctcctcgctcttgcgcgagagcaggtgcttccccaggtactcctgcactgacaaggctgccacagcggtggaatttgtcctcacgacttcgccacgtcgtcctcacctccctggcttcccacgactccgccgtatcgaggtgctcggtgggtcgtcttaatccgaagtccgaactaggaagacgagacagagaggtctgaggaatgggcctcgtttgatgttgagctgaattatttttccagcataagcccaggtcttggtccatgaacaaaattactagaaacccagcccagtactacgatctaaaagagggactgccactggatagctctctctagcattctccacgctccaatacagcggcgtcgtgtctatccgggtctatccgcgaacacgtgagaactctccagaaactgctttctcctccacttcatctctctcgctttccctctataaaaagaccccttctaggaattgagggagacagcaagcaccaagcagcgatccgaagctcaatcaattcactcaaacctcttccccaaatcttcgattagatcttcgttgacaagaagactagaaccgaacctgacatgtccaacctgctcacggttcaccagaaccttccggctcttccagtggacgcgacgtccgatgaagtcaggaagaacctcatggacatgttccgcgacaggcaagcgttcagcgagcacacctggaagatgctgctctccgtctgccgctcctgggctgcatggtgcaagctgaacaacaggaagtggttccccgctgagcccgaggacgtgagggattaccttctgtacctgcaagcgcgaggtttgtttctgcttctacctttgatatatatataataattatcattaattagtagtaatataatatttcaaatatttttttcaaaataaaagaatgtagtatatagcaattgcttttctgtagtttataagtgtgtatattttaatttataacttttctaatatatgaccaaaacatggtgatgcctaggtctggcagtgaagaccatccagcaacaccttggacaactgaacatgcttcacaggcgctccggcctcccgcgccccagcgactcgaacgccgtgagcctcgtcatgcgccgcatcaggaaggaaaacgtcgatgccggcgaaagggcaaagcaggccctcgcgttcgagaggaccgatttcgaccaggtccgcagcctgatggagaacagcgacaggtgccaggacattaggaacctggcgttcctcggaattgcatacaacacgctcctcaggatcgcggaaattgcccgcattcgcgtgaaggacattagccgcaccgacggcggcaggatgcttatccacattggcaggaccaagacgctcgtttccaccgcaggcgtcgaaaaggccctcagcctcggagtgaccaagctcgtcgaacgctggatctccgtgtccggcgtcgcggacgacccaaacaactacctcttctgccgcgtccgcaagaacggggtggctgcccctagcgccaccagccaactcagcacgagggccttggaaggtattttcgaggccacccaccgcctgatctacggcgcgaaggatgacagcggtcaacgctacctcgcatggtccgggcactccgcccgcgttggagctgctagggacatggcccgcgccggtgtttccatccccgaaatcatgcaggcgggtggatggacgaacgtgaacattgtcatgaactacattcgcaaccttgacagcgagacgggcgcaatggttcgcctcctggaagatggtgactgaggtacccaacctagacttgtccatcttctggattggccaacttaattaatgtatgaaataaaaggatgcacacatagtgacatgctaatcactataatgtgggcatcaaagttgtgtgttatgtgtaattactagttatctgaataaaagagaaagagatcatccatatttcttatcctaaatgaatgtcacgtgtctttataattctttgatgaaccagatgcatttcattaaccaaatccatatacatataaatattaatcatatataattaatatcaattgggttagcaaaacaaatctagtctaggtgtgttttgcgatccgatatcaggcctgacgtctaaaaacggcccctaactaacgcttagttgcccgctagattagtcccccgttagtgcctagttagacacacgacgaactaggggctagccaccttgctagttggatattacctcttctcttcaaagtatccttgaacgctcaccggttatcaaatctctacactatagctctgtagtcttgctagatagttagttctttagctctcgtgcgcacgataacttcgtatagcatacattatacgaagttataacagcggaccgggttaccgaattcctgcccaactttgtatagaaaagttgggccgaattcgagctcggtacggccagaatggcccggaccgaagcttgcatgcctgcagtgcagcgtgacccggtcgtgcccctctctagagataatgagcattgcatgtctaagttataaaaaattaccacatattttttttgtcacacttgtttgaagtgcagtttatctatctttatacatatatttaaactttactctacgaataatataatctatagtactacaataatatcagtgttttagagaatcatataaatgaacagttagacatggtctaaaggacaattgagtattttgacaacaggactctacagttttatctttttagtgtgcatgtgttctcctttttttttgcaaatagcttcacctatataatacttcatccattttattagtacatccatttagggtttagggttaatggtttttatagactaatttttttagtacatctattttattctattttagcctctaaattaagaaaactaaaactctattttagtttttttatttaataatttagatataaaatagaataaaataaagtgactaaaaattaaacaaataccctttaagaaattaaaaaaactaaggaaacatttttcttgtttcgagtagataatgccagcctgttaaacgccgtcgacgagtctaacggacaccaaccagcgaaccagcagcgtcgcgtcgggccaagcgaagcagacggcacggcatctctgtcgctgcctctggacccctctcgagagttccgctccaccgttggacttgctccgctgtcggcatccagaaattgcgtggcggagcggcagacgtgagccggcacggcaggcggcctcctcctcctctcacggcaccggcagctacgggggattcctttcccaccgctccttcgctttcccttcctcgcccgccgtaataaatagacaccccctccacaccctctttccccaacctcgtgttgttcggagcgcacacacacacaaccagatctcccccaaatccacccgtcggcacctccgcttcaaggtacgccgctcgtcctcccccccccccctctctaccttctctagatcggcgttccggtccatgcatggttagggcccggtagttctacttctgttcatgtttgtgttagatccgtgtttgtgttagatccgtgctgctagcgttcgtacacggatgcgacctgtacgtcagacacgttctgattgctaacttgccagtgtttctctttggggaatcctgggatggctctagccgttccgcagacgggatcgatttcatgattttttttgtttcgttgcatagggtttggtttgcccttttcctttatttcaatatatgccgtgcacttgtttgtcgggtcatcttttcatgcttttttttgtcttggttgtgatgatgtggtctggttgggcggtcgttctagatcggagtagaattctgtttcaaactacctggtggatttattaattttggatctgtatgtgtgtgccatacatattcatagttacgaattgaagatgatggatggaaatatcgatctaggataggtatacatgttgatgcgggttttactgatgcatatacagagatgctttttgttcgcttggttgtgatgatgtggtgtggttgggcggtcgttcattcgttctagatcggagtagaatactgtttcaaactacctggtgtatttattaattttggaactgtatgtgtgtgtcatacatcttcatagttacgagtttaagatggatggaaatatcgatctaggataggtatacatgttgatgtgggttttactgatgcatatacatgatggcatatgcagcatctattcatatgctctaaccttgagtacctatctattataataaacaagtatgttttataattattttgatcttgatatacttggatgatggcatatgcagcagctatatgtggatttttttagccctgccttcatacgctatttatttgcttggtactgtttcttttgtcgatgctcaccctgttgtttggtgttacttctgcaggtcgactttaacttagcctaggatccatggcaccgaagaagaagcgcaaggtgatggacaagaagtacagcatcggcctcgacatcggcaccaactcggtgggctgggccgtcatcacggacgaatataaggtcccgtcgaagaagttcaaggtcctcggcaatacagaccgccacagcatcaagaaaaacttgatcggcgccctcctgttcgatagcggcgagaccgcggaggcgaccaggctcaagaggaccgccaggagacggtacactaggcgcaagaacaggatctgctacctgcaggagatcttcagcaacgagatggcgaaggtggacgactccttcttccaccgcctggaggaatcattcctggtggaggaggacaagaagcatgagcggcacccaatcttcggcaacatcgtcgacgaggtaagtttctgcttctacctttgatatatatataataattatcattaattagtagtaatataatatttcaaatatttttttcaaaataaaagaatgtagtatatagcaattgcttttctgtagtttataagtgtgtatattttaatttataacttttctaatatatgaccaaaacatggtgatgtgcaggtggcctaccacgagaagtacccgacaatctaccacctccggaagaaactggtggacagcacagacaaggcggacctccggctcatctaccttgccctcgcgcatatgatcaagttccgcggccacttcctcatcgagggcgacctgaacccggacaactccgacgtggacaagctgttcatccagctcgtgcagacgtacaatcaactgttcgaggagaaccccataaacgctagcggcgtggacgccaaggccatcctctcggccaggctctcgaaatcaagaaggctggagaaccttatcgcgcagttgccaggcgaaaagaagaacggcctcttcggcaaccttattgcgctcagcctcggcctgacgccgaacttcaaatcaaacttcgacctcgcggaggacgccaagctccagctctcaaaggacacctacgacgacgacctcgacaacctcctggcccagataggagaccagtacgcggacctcttcctcgccgccaagaacctctccgacgctatcctgctcagcgacatccttcgggtcaacaccgaaattaccaaggcaccgctgtccgccagcatgattaaacgctacgacgagcaccatcaggacctcacgctgctcaaggcactcgtccgccagcagctccccgagaagtacaaggagatcttcttcgaccaatcaaaaaacggctacgcgggatatatcgacggcggtgccagccaggaagagttctacaagttcatcaaaccaatcctggagaagatggacggcaccgaggagttgctggtcaagctcaacagggaggacctcctcaggaagcagaggaccttcgacaacggctccatcccgcatcagatccacctgggcgaactgcatgccatcctgcggcgccaggaggacttctacccgttcctgaaggataaccgggagaagatcgagaagatcttgacgttccgcatcccatactacgtgggcccgctggctcgcggcaactcccggttcgcctggatgacccggaagtcggaggagaccatcacaccctggaactttgaggaggtggtcgataagggcgctagcgctcagagcttcatcgagcgcatgaccaacttcgataaaaacctgcccaatgaaaaagtcctccccaagcactcgctgctctacgagtacttcaccgtgtacaacgagctcaccaaggtcaaatacgtcaccgagggcatgcggaagccggcgttcctgagcggcgagcagaagaaggcgatagtggacctcctcttcaagaccaacaggaaggtgaccgtgaagcaattaaaagaggactacttcaagaaaatagagtgcttcgactccgtggagatctcgggcgtggaggatcggttcaacgcctcactcggcacgtatcacgacctcctcaagatcattaaagacaaggacttcctcgacaacgaggagaacgaggacatcctcgaggacatcgtcctcaccctgaccctgttcgaggaccgcgaaatgatcgaggagaggctgaagacctacgcgcacctgttcgacgacaaggtcatgaaacagctcaagaggcgccgctacactggttggggaaggctgtcccgcaagctcattaatggcatcagggacaagcagagcggcaagaccatcctggacttcctcaagtccgacgggttcgccaaccgcaacttcatgcagctcattcacgacgactcgctcacgttcaaggaagacatccagaaggcacaggtgagcgggcagggtgactccctccacgaacacatcgccaacctggccggctcgccggccattaaaaagggcatcctgcagacggtcaaggtcgtcgacgagctcgtgaaggtgatgggccggcacaagcccgaaaatatcgtcatagagatggccagggagaaccagaccacccaaaaagggcagaagaactcgcgcgagcggatgaaacggatcgaggagggcattaaagagctcgggtcccagatcctgaaggagcaccccgtggaaaatacccagctccagaatgaaaagctctacctctactacctgcagaacggccgcgacatgtacgtggaccaggagctggacattaatcggctatcggactacgacgtcgaccacatcgtgccgcagtcgttcctcaaggacgatagcatcgacaacaaggtgctcacccggtcggataaaaatcggggcaagagcgacaacgtgcccagcgaggaggtcgtgaagaagatgaaaaactactggcgccagctcctcaacgcgaaactgatcacccagcgcaagttcgacaacctgacgaaggcggaacgcggtggcttgagcgaactcgataaggcgggcttcataaaaaggcagctggtcgagacgcgccagatcacgaagcatgtcgcccagatcctggacagccgcatgaatactaagtacgatgaaaacgacaagctgatccgggaggtgaaggtgatcacgctgaagtccaagctcgtgtcggacttccgcaaggacttccagttctacaaggtccgcgagatcaacaactaccaccacgcccacgacgcctacctgaatgcggtggtcgggaccgccctgatcaagaagtacccgaagctggagtcggagttcgtgtacggcgactacaaggtctacgacgtgcgcaaaatgatcgccaagtccgagcaggagatcggcaaggccacggcaaaatacttcttctactcgaacatcatgaacttcttcaagaccgagatcaccctcgcgaacggcgagatccgcaagcgcccgctcatcgaaaccaacggcgagacgggcgagatcgtctgggataagggccgggatttcgcgacggtccgcaaggtgctctccatgccgcaagtcaatatcgtgaaaaagacggaggtccagacgggcgggttcagcaaggagtccatcctcccgaagcgcaactccgacaagctcatcgcgaggaagaaggattgggacccgaaaaaatatggcggcttcgacagcccgaccgtcgcatacagcgtcctcgtcgtggcgaaggtggagaagggcaagtcaaagaagctcaagtccgtgaaggagctgctcgggatcacgattatggagcggtcctccttcgagaagaacccgatcgacttcctagaggccaagggatataaggaggtcaagaaggacctgattattaaactgccgaagtactcgctcttcgagctggaaaacggccgcaagaggatgctcgcctccgcaggcgagttgcagaagggcaacgagctcgccctcccgagcaaatacgtcaatttcctgtacctcgctagccactatgaaaagctcaagggcagcccggaggacaacgagcagaagcagctcttcgtggagcagcacaagcattacctggacgagatcatcgagcagatcagcgagttctcgaagcgggtgatcctcgccgacgcgaacctggacaaggtgctgtcggcatataacaagcaccgcgacaaaccaatacgcgagcaggccgaaaatatcatccacctcttcaccctcaccaacctcggcgctccggcagccttcaagtacttcgacaccacgattgaccggaagcggtacacgagcacgaaggaggtgctcgatgcgacgctgatccaccagagcatcacagggctctatgaaacacgcatcgacctgagccagctgggcggagacaagagaccacgggaccgccacgatggcgagctgggaggccgcaagcgggcaaggtaggtaccgttaacctagacttgtccatcttctggattggccaacttaattaatgtatgaaataaaaggatgcacacatagtgacatgctaatcactataatgtgggcatcaaagttgtgtgttatgtgtaattactagttatctgaataaaagagaaagagatcatccatatttcttatcctaaatgaatgtcacgtgtctttataattctttgatgaaccagatgcatttcattaaccaaatccatatacatataaatattaatcatatataattaatatcaattgggttagcaaaacaaatctagtctaggtgtgttttgccccgggttaacggcaaacgctaattagtcactaggcccaggaaacactaactaagccctagcttatcctagcgcaacctagttaggtcttccccaagtttgtacaaaaaagcaggctccggccagaatggcccggaccgggttaccgaattcgagctcggtaccctgggatccgatatcgatgggccctggccgaagctttgagagtacaatgatgaacctagattaatcaatgccaaagtctgaaaaatgcaccctcagtctatgatccagaaaatcaagattgcttgaggccctgttcggttgttccggattagagccccggattaattcctagccggattacttctctaatttatatagattttgatgagctggaatgaatcctggcttattccggtacaaccgaacaggccctgaaggataccagtaatcgctgagctaaattggcatgctgtcagagtgtcagtattgcagcaaggtagtgagataaccggcatcatggtgccagtttgatggcaccattagggttagagatggtggccatgggcgcatgtcctggccaactttgtatgatatatggcagggtgaataggaaagtaaaattgtattgtaaaaagggatttcttctgtttgttagcgcatgtacaaggaatgcaagttttgagcgagggggcatcaaagatctggctgtgtttccagctgtttttgttagccccatcgaatccttgacataatgatcccgcttaaataagcaacctcgcttgtatagttccttgtgctctaacacacgatgatgataagtcgtaaaatagtggtgtccaaagaatttccaggcccagttgtaaaagctaaaatgctattcgaatttctactagcagtaagtcgtgtttagaaattatttttttatataccttttttccttctatgtacagtaggacacagtgtcagcgccgcgttgacggagaatatttgcaaaaaagtaaaagagaaagtcatagcggcgtatgtgccaaaaacttcgtcacagagagggccataagaaacatggcccacggcccaatacgaagcaccgcgacgaagcccaaacagcagtccgtaggtggagcaaagcgctgggtaatacgcaaacgttttgtcccaccttgactaatcacaagagtggagcgtaccttataaaccgagccgcaagcaccgaattgcccaaaacgctttcccgatgttttagagctagaaatagcaagttaaaataaggctagtccgttatcaacttgaaaaagtggcaccgagtcggtgctttttttttgcggccgcgaattcctgcagggccctcttgtcggaccagttgcccaccacgttggtgaggggcacccagctttcttgtacaaagtggccgttaacggatcggccagaatggcccggaccgggttaccgaattcgagctcggtaccctgggatccgatatcgatgggccctggccgaagctttgagagtacaatgatgaacctagattaatcaatgccaaagtctgaaaaatgcaccctcagtctatgatccagaaaatcaagattgcttgaggccctgttcggttgttccggattagagccccggattaattcctagccggattacttctctaatttatatagattttgatgagctggaatgaatcctggcttattccggtacaaccgaacaggccctgaaggataccagtaatcgctgagctaaattggcatgctgtcagagtgtcagtattgcagcaaggtagtgagataaccggcatcatggtgccagtttgatggcaccattagggttagagatggtggccatgggcgcatgtcctggccaactttgtatgatatatggcagggtgaataggaaagtaaaattgtattgtaaaaagggatttcttctgtttgttagcgcatgtacaaggaatgcaagttttgagcgagggggcatcaaagatctggctgtgtttccagctgtttttgttagccccatcgaatccttgacataatgatcccgcttaaataagcaacctcgcttgtatagttccttgtgctctaacacacgatgatgataagtcgtaaaatagtggtgtccaaagaatttccaggcccagttgtaaaagctaaaatgctattcgaatttctactagcagtaagtcgtgtttagaaattatttttttatataccttttttccttctatgtacagtaggacacagtgtcagcgccgcgttgacggagaatatttgcaaaaaagtaaaagagaaagtcatagcggcgtatgtgccaaaaacttcgtcacagagagggccataagaaacatggcccacggcccaatacgaagcaccgcgacgaagcccaaacagcagtccgtaggtggagcaaagcgctgggtaatacgcaaacgttttgtcccaccttgactaatcacaagagtggagcgtaccttataaaccgagccgcaagcaccgaattgcaatataaaattaccgatgttttagagctagaaatagcaagttaaaataaggctagtccgttatcaacttgaaaaagtggcaccgagtcggtgctttttttttgcggccgcgaattcctgcagggccctcttgtcggaccagttgcccaccacgttggtgaggggcaactttattatacaaagttgagctaactaactaggttaactcacttaagatgtactcgacaatggtgccctcataccggcatgtgtttcctagaaataatcaatatattgattgagatttatctcgatatatttctgaactatgttcatcatataaataactgaaaacatcaaatcgtaattttaaactcatgcttggtcaatacatagataatacaatattacttcatcatcccaatgatgtcctagcacaacctattgaatgttaatgtttggttgtgtgggggtgtgtttataacatagatgtgattatttgtgctttttgttgagtatatacatatatggtatgttgatttgatatagtgatggacacatgctttggccttggatattcaaatcacttgtacttgcacgaagcaaaacataatataagtttagaagtaaacttgtaactgtgtccaaacatgctcacacaaagtcatatcgcattatatttttttggtaaatattcaacacatgtattttttacaagaacccaaattttacagacaaatgcagcattgtagacatgtagaattctttgaagcatgtgaacttaacaacactaatgtcattaaatcaactggaccctatgagtaacaatttcgatattgcaaacaccaaattatggaacttatttgctgaaaaaattatgatcaatgtgaagtttaaattattataccataaatatatcaaagattttttttgaggaaggtaaaaattgcatggaatgggctgcccaacgtgatagctcacttttatgctaggtagcattaccaaagatgggaatgttctgatgaacaccaaacccactcaaataatatttatatttgggttgtttagttgtaaaagtgaagacccaagattaaagtaccaattgtcgatgccatacactagaagtgaagaatgttgttagcgttaggagtagatgtgtcaatggggaccgatactcgttatcgatgggccgcacgtaagcttgcatgcctgcagtgcagcgtgacccggtcgtgcccctctctagagataatgagcattgcatgtctaagttataaaaaattaccacatattttttttgtcacacttgtttgaagtgcagtttatctatctttatacatatatttaaactttactctacgaataatataatctatagtactacaataatatcagtgttttagagaatcatataaatgaacagttagacatggtctaaaggacaattgagtattttgacaacaggactctacagttttatctttttagtgtgcatgtgttctcctttttttttgcaaatagcttcacctatataatacttcatccattttattagtacatccatttagggtttagggttaatggtttttatagactaatttttttagtacatctattttattctattttagcctctaaattaagaaaactaaaactctattttagtttttttatttaataatttagatataaaatagaataaaataaagtgactaaaaattaaacaaataccctttaagaaattaaaaaaactaaggaaacatttttcttgtttcgagtagataatgccagcctgttaaacgccgtcgacgagtctaacggacaccaaccagcgaaccagcagcgtcgcgtcgggccaagcgaagcagacggcacggcatctctgtcgctgcctctggacccctctcgagagttccgctccaccgttggacttgctccgctgtcggcatccagaaattgcgtggcggagcggcagacgtgagccggcacggcaggcggcctcctcctcctctcacggcaccggcagctacgggggattcctttcccaccgctccttcgctttcccttcctcgcccgccgtaataaatagacaccccctccacaccctctttccccaacctcgtgttgttcggagcgcacacacacacaaccagatctcccccaaatccacccgtcggcacctccgcttcaaggtacgccgctcgtcctcccccccccccctctctaccttctctagatcggcgttccggtccatgcatggttagggcccggtagttctacttctgttcatgtttgtgttagatccgtgtttgtgttagatccgtgctgctagcgttcgtacacggatgcgacctgtacgtcagacacgttctgattgctaacttgccagtgtttctctttggggaatcctgggatggctctagccgttccgcagacgggatcgatttcatgattttttttgtttcgttgcatagggtttggtttgcccttttcctttatttcaatatatgccgtgcacttgtttgtcgggtcatcttttcatgcttttttttgtcttggttgtgatgatgtggtctggttgggcggtcgttctagatcggagtagaattctgtttcaaactacctggtggatttattaattttggatctgtatgtgtgtgccatacatattcatagttacgaattgaagatgatggatggaaatatcgatctaggataggtatacatgttgatgcgggttttactgatgcatatacagagatgctttttgttcgcttggttgtgatgatgtggtgtggttgggcggtcgttcattcgttctagatcggagtagaatactgtttcaaactacctggtgtatttattaattttggaactgtatgtgtgtgtcatacatcttcatagttacgagtttaagatggatggaaatatcgatctaggataggtatacatgttgatgtgggttttactgatgcatatacatgatggcatatgcagcatctattcatatgctctaaccttgagtacctatctattataataaacaagtatgttttataattattttgatcttgatatacttggatgatggcatatgcagcagctatatgtggatttttttagccctgccttcatacgctatttatttgcttggtactgtttcttttgtcgatgctcaccctgttgtttggtgttacttctgcaggtcgactctagaggatccaccatggttgaacaagatggattgcacgcaggttctccggccgcttgggtggagaggctattcggctatgactgggcacaacagacaatcggctgctctgatgccgccgtgttccggctgtcagcgcaggggcgcccggttctttttgtcaagaccgacctgtccggtgccctgaatgaactgcaggacgaggcagcgcggctatcgtggctggccacgacgggcgttccttgcgcagctgtgctcgacgttgtcactgaagcgggaagggactggctgctattgggcgaagtgccggggcaggatctcctgtcatctcaccttgctcctgccgagaaagtatccatcatggctgatgcaatgcggcggctgcatacgcttgatccggctacctgcccattcgaccaccaagcgaaacatcgcatcgagcgagcacgtactcggatggaagccggtcttgtcgatcaggatgatctggacgaagagcatcaggggctcgcgccagccgaactgttcgccaggctcaaggcgcgcatgcccgacggcgatgatctcgtcgtgacccatggcgatgcctgcttgccgaatatcatggtggaaaatggccgcttttctggattcatcgactgtggccggctgggtgtggcggaccgctatcaggacatagcgttggctacccgtgatattgctgaagagcttggcggcgaatgggctgaccgcttcctcgtgctttacggtatcgccgctcccgattcgcagcgcatcgccttctatcgccttcttgacgagttcttctgaggatccaccatggttaacctagacttgtccatcttctggattggccaacttaattaatgtatgaaataaaaggatgcacacatagtgacatgctaatcactataatgtgggcatcaaagttgtgtgttatgtgtaattactagttatctgaataaaagagaaagagatcatccatatttcttatcctaaatgaatgtcacgtgtctttataattctttgatgaaccagatgcatttcattaaccaaatccatatacatataaatattaatcatatataattaatatcaattgggttagcaaaacaaatctagtctaggtgtgttttgcgaatgcgaccttcttatgtgcttctagtctccaaatgtggttgatagttattttgctctaagatcaacagtaatgaagtataaatcatcgttgtggtgtgctactcggttaattgagcattaacacacacaaacatgacgaggatggtataatctccaaaaatgtgtactttgttaggtgggaccctatagccttgattaatgtgctatgttaggcatgcctggaaacgtgtgacgcatatgttttgtgaacctgttgatattatatgtgcttttatattaccatattttattaaaatactaatatttattactagtaagatataacattctatctagcttaaaaactaaccataaatattccataataactagatttaccaaactaatatactaaatatacataataaatacaaaattaacaagacaataatcaatatttatgagcttaatatatttagacattatggttggtcgacgataatcatgctaacttttcgtaattgcttgattgaaatatgcttagaataatgcctctttgttctacatggcaaatagggaccattatggtgtaacaccctgggaaccacaaacaccccgaaatgctactaaactacacaactaaccttcatatataaaatttcgacagcatctcctttgaaaatttgcatagacgtggaagcaacagagtataaacagatatcatgataagaaaacatactagacattaataatctgctagaaatgggaagaatcctaacttgacgactgcgtaactgactagagtcacacttagctgaccctagtcacttactgcccttaaggccaattgttcaagattcattcaacaattgaaacatctcccatgattaaatcagtataaggttgctatggtcttgcttgacaaagtttttttttgagggaatttcaactaaatttttgagtgaaactatcaaatactgattttaaaaaatttttataaaaggaagcgcagagataaaaggccatctatgctacaaaagtacccaaaaatgtaatcctaaagtatgaattgcattttttttttgtttggacgaaaggaaaggagtattaccacaagaatgatatcatcttcatatttagatcttttttgggtaaagcttgagattctctaaatatagagaaatcagaagaaaaaaaaaccgtgttttggtggttttgatttctagcctccacaataactttgacggcgtcgacaagtctaacggacaccaagcagcgaaccaccagcgccgagccaagcgaagcagacggccgagacgttgacaccttcggcgcggcatctctcgagagttccgctccggcgctccacctccaccgctggcggtttcttattccgttccgttccgcctcctgctctgctcctctccacaccacacggcacgaaaccgttacggcaccggcagcacccagcacgggagaggggattcctttcccaccgttccttccctttccgccccgccgctataaatagccagccccatccccagcttttttccccaatctcatctcctctctcctgttgttcggagcacacgcacaatccgatcgatccccaaatccccttcgtctctcctcgcgagcctcgtggatcccagcttcaaggtacggcgatcgatcatcccccctccttctctctaccttcttttctctagactacatcggatggcgatccatggttagggcctgctagtttcccttcctgttttgtcgatggctgcgaggcacaatagatctgatggcgttatgacggctaacttgtcatgttgttgcgatttatagtccctttaggagatcagtttaatttctcggatggttcgagatcggtggtccatggttagtaccctaagatccgcgctgttagggttcgtagatggaggcgacctgttctgattgttaacttgtcagtacctgggaaatcctgggatggttctagctcgtccgcagatgagatcgatttcatgatcctctgtatcttgtttcgttgcctaggttccgtctaatctatccgtggtatgatgtagatgttttgatcgtgctaactacgtcttgtaaagttaattgtcaggtcataatttttagcatgcctttttttttgtttggttttgtctaattgggctgtcgttctagatcagagtagaagactgttccaaactacctgctggatttattgaacttggatctgtatgtgtgtcacatatcttcataaattcatgattaagatggattgaaatatcttttatctttttggtatggatagttctatatgttggtgtggctttgttagatgtatacatgcttagatacatgaagcaacgtgctgctactgtttagtaattgctgttcatttgtctaataaacagataaggatatgtatttatgttgctgttggttttgctggtactttgttggatacaaatgcttcaatacagaaaacagcatgctgctacgatttaccatttatctaatcttatcatatgtctaatctaataaacaaacatgcttttaaattatcttcatatgcttggatgatggcatacacagcggctatgtgtggttttttaaatacccagcatcatgggcatgcatgacactgctttaatatgctttttatttgcttgagactgtttcttttgtttatactgaccctttagttcggtgactcttctgcaggtcgactttaacttagcctaggatccatggcccagtccaagcacggcctgaccaaggagatgaccatgaagtaccgcatggagggctgcgtggacggccacaagttcgtgatcaccggcgagggcatcggctaccccttcaagggcaagcaggccatcaacctgtgcgtggtggagggcggccccttgcccttcgccgaggacatcttgtccgccgccttcatgtacggcaaccgcgtgttcaccgagtacccccaggacatcgtcgactacttcaagaactcctgccccgccggctacacctgggaccgctccttcctgttcgaggacggcgccgtgtgcatctgcaacgccgacatcaccgtgagcgtggaggagaactgcatgtaccacgagtccaagttctacggcgtgaacttccccgccgacggccccgtgatgaagaagatgaccgacaactgggagccctcctgcgagaagatcatccccgtgcccaagcagggcatcttgaagggcgacgtgagcatgtacctgctgctgaaggacggtggccgcttgcgctgccagttcgacaccgtgtacaaggccaagtccgtgccccgcaagatgcccgactggcacttcatccagcacaagctgacccgcgaggaccgcagcgacgccaagaaccagaagtggcacctgaccgagcacgccatcgcctccggctccgccttgccctccggactcagatctcgatagggtaccaatggccagttaacagatccagctgctgctgttctagggttcacaagtctgcctatttgtcttccccaatggagctatggttgtctggtctggtccttggtcgtgtcccgtttcattgtgtactatttacctgtaatgtgtatccttaagtctggtttgatggtgtctgaaacgttttgctgtggtagagcagcatggaagaactataatgaataagtgatccctaatcattgtgtccaaattttgcttctgctatacccttttgtgctgtttcttatgttttgcttaaaaatttgatctgacaaacaaatttgtctaaattatgctcttgttctgactgtgtactgtacacatttgtattgctaccggtttggcacatagttttctctttgattgcagatcaaacccttctgattgcagattgcttggctatggctgatgtgctcactgttcttctttagcttgtatattgctgatggtggcttggctacggctgaaaaagttgctgctgcgccgacttggcaactgttgctccagtaatgctttgtcctctcttcctagccgccgacttggcacttggcagctgttgctcctgtaatgcgttgttatctcttatctcttgagatgtactatgattttgaggctgtttgacttgtgccagattgccagtgctgatgctatattatctcaggtttttatgctagtatatgttttactgtgtgctgcctgtgtcgagttacgtaatctattgaaccgctatgcgtgttgatgccctgttgttgcttgccagattgatgcccctgttgcttgcagcttgcaagctgtagtgaaatcctaaaattcgaaaccaaatctattctgaacttttgaagatctgtgatgtccggaagaaaagattaaaacagataaacgggactctccagaatctataaaataaatgatcgacaaacgctttgctttggtaggcttcctagttagttagcggaccgaagcttcggttgtttctgtggccgaattcaatcactagagtcgacctgcatgattccgatgacttcgtaggttcctagctcaagccgctcgtgtccaagcgtcacttacgattagctaatgattacggcatctaggaccgactagctagctagctaagagctcggtaccgagctcgaattcattccgattaatcgtggcctcttgctcttcaggatgaagagctatgtttaaacgtgcaagcgctactagacaattcagtacattaaaaacgtccgcaatgtgttattaagttgtctaagcgtcaatttgtttacaccacaatatatcctgcca

SEQ ID NO: 92 - DNA, 5488 bp, Artificial sequence
  PHP8418-0004
ggaagttcctattccgaagttcctattctctagaaagtataggaacttcagatccaccgggatccccgatcatgcaaaaactcattaactcagtgcaaaactatgcctggggcagcaaaacggcgttgactgaactttatggtatggaaaatccgtccagccagccgatggccgagctgtggatgggcgcacatccgaaaagcagttcacgagtgcagaatgccgccggagatatcgtttcactgcgtgatgtgattgagagtgataaatcgactctgctcggagaggccgttgccaaacgctttggcgaactgcctttcctgttcaaagtattatgcgcagcacagccactctccattcaggttcatccaaacaaacacaattctgaaatcggttttgccaaagaaaatgccgcaggtatcccgatggatgccgccgagcgtaactataaagatcctaaccacaagccggagctggtttttgcgctgacgcctttccttgcgatgaacgcgtttcgtgaattttccgagattgtctccctactccagccggtcgcaggtgcacatccggcgattgctcactttttacaacagcctgatgccgaacgtttaagcgaactgttcgccagcctgttgaatatgcagggtgaagaaaaatcccgcgcgctggcgattttaaaatcggccctcgatagccagcagggtgaaccgtggcaaacgattcgtttaatttctgaattttacccggaagacagcggtctgttctccccgctattgctgaatgtggtgaaattgaaccctggcgaagcgatgttcctgttcgctgaaacaccgcacgcttacctgcaaggcgtggcgctggaagtgatggcaaactccgataacgtgctgcgtgcgggtctgacgcctaaatacattgatattccggaactggttgccaatgtgaaattcgaagccaaaccggctaaccagttgttgacccagccggtgaaacaaggtgcagaactggacttcccgattccagtggatgattttgccttctcgctgcatgaccttagtgataaagaaaccaccattagccagcagagtgccgccattttgttctgcgtcgaaggcgatgcaacgttgtggaaaggttctcagcagttacagcttaaaccgggtgaatcagcgtttattgccgccaacgaatcaccggtgactgtcaaaggccacggccgtttagcgcgtgtttacaacaagctgtaagagcttactgaaaaaattaacatctcttgctaagctgggggtggaacctagacttgtccatcttctggattggccaacttaattaatgtatgaaataaaaggatgcacacatagtgacatgctaatcactataatgtgggcatcaaagttgtgtgttatgtgtaattactagttatctgaataaaagagaaagagatcatccatatttcttatcctaaatgaatgtcacgtgtctttataattctttgatgaaccagatgcatttcattaaccaaatccatatacatataaatattaatcatatataattaatatcaattgggttagcaaaacaaatctagtctaggtgtgttttgcgaatgcgaccttcttatgtgcttctagtctccaaatgtggttgatagttattttgctctaagatcaacagtaatgaagtataaatcatcgttgtggtgtgctactcggttaattgagcattaacacacacaaacatgacgaggatggtataatctccaaaaatgtgtactttgttaggtgggaccctatagccttgattaatgtgctatgttaggcatgcctggaaacgtgtgacgcatatgttttgtgaacctgttgatattatatgtgcttttatattaccatattttattaaaatactaatatttattactagtaagatataacattctatctagcttaaaaactaaccataaatattccataataactagatttaccaaactaatatactaaatatacataataaatacaaaattaacaagacaataatcaatatttatgagcttaatatatttagacattatggttggtcgacgataatcatgctaacttttcgtaattgcttgattgaaatatgcttagaataatgcctctttgttctacatggcaaatagggaccattatggtgtaacaccctgggaaccacaaacaccccgaaatgctactaaactacacaactaaccttcatatataaaatttcgacagcatctcctttgaaaatttgcatagacgtggaagcaacagagtataaacagatatcatgataagaaaacatactagacattaataatctgctagaaatgggaagaatccctgcagtgcagcgtgacccggtcgtgcccctctctagagataatgagcattgcatgtctaagttataaaaaattaccacatattttttttgtcacacttgtttgaagtgcagtttatctatctttatacatatatttaaactttactctacgaataatataatctatagtactacaataatatcagtgttttagagaatcatataaatgaacagttagacatggtctaaaggacaattgagtattttgacaacaggactctacagttttatctttttagtgtgcatgtgttctcctttttttttgcaaatagcttcacctatataatacttcatccattttattagtacatccatttagggtttagggttaatggtttttatagactaatttttttagtacatctattttattctattttagcctctaaattaagaaaactaaaactctattttagtttttttatttaataatttagatataaaatagaataaaataaagtgactaaaaattaaacaaataccctttaagaaattaaaaaaactaaggaaacatttttcttgtttcgagtagataatgccagcctgttaaacgccgtcgacgagtctaacggacaccaaccagcgaaccagcagcgtcgcgtcgggccaagcgaagcagacggcacggcatctctgtcgctgcctctggacccctctcgagagttccgctccaccgttggacttgctccgctgtcggcatccagaaattgcgtggcggagcggcagacgtgagccggcacggcaggcggcctcctcctcctctcacggcaccggcagctacgggggattcctttcccaccgctccttcgctttcccttcctcgcccgccgtaataaatagacaccccctccacaccctctttccccaacctcgtgttgttcggagcgcacacacacacaaccagatctcccccaaatccacccgtcggcacctccgcttcaaggtacgccgctcgtcctcccccccccccctctctaccttctctagatcggcgttccggtccatgcatggttagggcccggtagttctacttctgttcatgtttgtgttagatccgtgtttgtgttagatccgtgctgctagcgttcgtacacggatgcgacctgtacgtcagacacgttctgattgctaacttgccagtgtttctctttggggaatcctgggatggctctagccgttccgcagacgggatcgatttcatgattttttttgtttcgttgcatagggtttggtttgcccttttcctttatttcaatatatgccgtgcacttgtttgtcgggtcatcttttcatgcttttttttgtcttggttgtgatgatgtggtctggttgggcggtcgttctagatcggagtagaattctgtttcaaactacctggtggatttattaattttggatctgtatgtgtgtgccatacatattcatagttacgaattgaagatgatggatggaaatatcgatctaggataggtatacatgttgatgcgggttttactgatgcatatacagagatgctttttgttcgcttggttgtgatgatgtggtgtggttgggcggtcgttcattcgttctagatcggagtagaatactgtttcaaactacctggtgtatttattaattttggaactgtatgtgtgtgtcatacatcttcatagttacgagtttaagatggatggaaatatcgatctaggataggtatacatgttgatgtgggttttactgatgcatatacatgatggcatatgcagcatctattcatatgctctaaccttgagtacctatctattataataaacaagtatgttttataattattttgatcttgatatacttggatgatggcatatgcagcagctatatgtggatttttttagccctgccttcatacgctatttatttgcttggtactgtttcttttgtcgatgctcaccctgttgtttggtgttacttctgcaggtcgactttaacttagcctaggatccaccggtcgccaccatggcctcctccgagaacgtcatcaccgagttcatgcgcttcaaggtgcgcatggagggcaccgtgaacggccacgagttcgagatcgagggcgagggcgagggccgcccctacgagggccacaacaccgtgaagctgaaggtgacgaagggcggccccctgcccttcgcctgggacatcctgtccccccagttccagtacggctccaaggtgtacgtgaagcaccccgccgacatccccgactacaagaagctgtccttccccgagggcttcaagtgggagcgcgtgatgaacttcgaggacggcggcgtggcgaccgtgacccaggactcctccctgcaggacggctgcttcatctacaaggtgaagttcatcggcgtgaacttcccctccgacggccccgtgatgcagaagaagaccatgggctgggaggcctccaccgagcgcctgtacccccgcgacggcgtgctgaagggcgagacccacaaggccctgaagctgaaggacggcggccactacctggtggagttcaagtccatctacatggccaagaagcccgtgcagctgcccggctactactacgtggacgccaagctggacatcacctcccacaacgaggactacaccatcgtggagcagtacgagcgcaccgagggccgccaccacctgttcctgtagcggcccatggatattcgaacgcgtaggtaccacatggttaacctagacttgtccatcttctggattggccaacttaattaatgtatgaaataaaaggatgcacacatagtgacatgctaatcactataatgtgggcatcaaagttgtgtgttatgtgtaattactagttatctgaataaaagagaaagagatcatccatatttcttatcctaaatgaatgtcacgtgtctttataattctttgatgaaccagatgcatttcattaaccaaatccatatacatataaatattaatcatatataattaatatcaattgggttagcaaaacaaatctagtctaggtgtgttttgcgaatacgaagttcctattccgaagttcctattcttcaaaaagtataggaacttctgtacacca

SEQ ID NO: 93 - DNA, 18124 bp, Artificial sequence
  PHP54733
gtttacccgccaatatatcctgtcaaacactgatagtttaaactgaaggcgggaaacgacaatctgatcatgagcggagaattaagggagtcacgttatgacccccgccgatgacgcgggacaagccgttttacgtttggaactgacagaaccgcaacgttgaaggagccactcagcaagctggtacgattgtaatacgactcactatagggcgaattgagcgctgtttaaacgctcttcaactggaagagcggttactaccggctggatggcggggccttgatcgtgcaccgccggcgtccggactaactaactagtcgagctagttaccctatgaggtgacatgaagcgctcacggttactatgacggttagcttcacgactgttggtggcagtagcgtacgacttagctatagttccggacttacccttaagataacttcgtatagcatacattatacgaagttatgggcccaccggttacgtaacgcgtctatagtattttaaaattgcattaacaaacatgtcctaattggtactcctgagatactataccctcctgttttaaaatagttggcattatcgaattatcattttactttttaatgttttctcttcttttaatatattttatgaattttaatgtattttaaaatgttatgcagttcgctctggacttttctgctgcgcctacacttgggtgtactgggcctaaattcagcctgaccgaccgcctgcattgaataatggatgagcaccggtaaaatccgcgtacccaactttcgagaagaaccgagacgtggcgggccgggccaccgacgcacggcaccagcgactgcacacgtcccgccggcgtacgtgtacgtgctgttccctcactggccgcccaatccactcatgcatgcccacgtacacccctgccgtggcgcgcccagatcctaatcctttcgccgttctgcacttctgctgcctataaatggcggcatcgaccgtcacctgcttcaccaccggcgagccacatcgagaacacgatcgagcacacaagcacgaagactcgtttaggagaaaccacaaaccaccaagccgtgcaagcaccaggcttgggcacccgctccgggcttagaaggccagcttcaagtttgtacaaaaaagcaggcttcgaaggagatagaaccgatccaccatgtccaacctgctcacggttcaccagaaccttccggctcttccagtggacgcgacgtccgatgaagtcaggaagaacctcatggacatgttccgcgacaggcaagcgttcagcgagcacacctggaagatgctgctctccgtctgccgctcctgggctgcatggtgcaagctgaacaacaggaagtggttccccgctgagcccgaggacgtgagggattaccttctgtacctgcaagcgcgaggtttgtttctgcttctacctttgatatatatataataattatcattaattagtagtaatataatatttcaaatatttttttcaaaataaaagaatgtagtatatagcaattgcttttctgtagtttataagtgtgtatattttaatttataacttttctaatatatgaccaaaacatggtgatgcctaggtctggcagtgaagaccatccagcaacaccttggacaactgaacatgcttcacaggcgctccggcctcccgcgccccagcgactcgaacgccgtgagcctcgtcatgcgccgcatcaggaaggaaaacgtcgatgccggcgaaagggcaaagcaggccctcgcgttcgagaggaccgatttcgaccaggtccgcagcctgatggagaacagcgacaggtgccaggacattaggaacctggcgttcctcggaattgcatacaacacgctcctcaggatcgcggaaattgcccgcattcgcgtgaaggacattagccgcaccgacggcggcaggatgcttatccacattggcaggaccaagacgctcgtttccaccgcaggcgtcgaaaaggccctcagcctcggagtgaccaagctcgtcgaacgctggatctccgtgtccggcgtcgcggacgacccaaacaactacctcttctgccgcgtccgcaagaacggggtggctgcccctagcgccaccagccaactcagcacgagggccttggaaggtattttcgaggccacccaccgcctgatctacggcgcgaaggatgacagcggtcaacgctacctcgcatggtccgggcactccgcccgcgttggagctgctagggacatggcccgcgccggtgtttccatccccgaaatcatgcaggcgggtggatggacgaacgtgaacattgtcatgaactacattcgcaaccttgacagcgagacgggcgcaatggttcgcctcctggaagatggtgactgagctagacccagctttcttgtacaaagtggccgttaacggatgcagacttgtccatcttctggattggccaacttaattaatgtatgaaataaaaggatgcacacatagtgacatgctaatcactataatgtgggcatcaaagttgtgtgttatgtgtaattactagttatctgaataaaagagaaagagatcatccatatttcttatcctaaatgaatgtcacgtgtctttataattctttgatgaaccagatgcatttcattaaccaaatccatatacatataaatattaatcatatataattaatatcaattgggttagcaaaacaaatctagtctaggtgtgttttgcgaattgcggcaaggttgcgcccgccccagcttggtcagccgctccgggcttagaaggccgatctcgcgggcacccagctttcttctacaaagtggccgtttacggatcggctagaatgtcccgcaccggcttaccgatttgcacctcgctaccctgggttcgaccgaagctgaccgatgcttgcgcccgctcgcgaggccggccacactgatagtttaaactgaaggcgggaaacgacaatctgatcatgagcggagaattaagggagtcacgttatgacccccgccgatgacgcgggacaagccgttttacgtttggaactgacagaaccgcaacgattgaaggagccactcagccgcgggtttctggagtttaatgagctaagcacatacgtcagaaaccattattgcgcgttcaaaagtcgcctaaggtcactatcagctagcaaatatttcttgtcaaaaatgctccactgacgttccataaattcccctcggtatccaattagagtctcatattcactctcccggcggatctcgactctagaggatcgctcaggaaggccgctgagatagagccatggcggccaatgcgggcggcggtggagcgggaggaggcagcggcagcggcagcgtggctgcgccggcggtgtgccgccccagcggctcgcggtggacgccgacgccggagcagatcaggatgctgaaggagctctactacggctgcggcatccggtcgcccagctcggagcagatccagcgcatcaccgccatgctgcggcagcacggcaagatcgagggcaagaacgtcttctactggttccagaaccacaaggcccgcgagcgccagaagcgccgcctcaccagcctcgacgtcaacgtgcccgccgccggcgcggccgacgccaccaccagccaactcggcgtcctctcgctgtcgtcgccgccgccttcaggcgcggcgcctccctcgcccaccctcggcttctacgccgccggcaatggcggcggatcggctgtgctgctggacacgagttccgactggggcagcagcggcgctgctatggccaccgagacatgcttcctgcaggactacatgggcgtgacggacacgggcagctcgtcgcagtggccacgcttctcgtcgtcggacacgataatggcggcggccgcggcgcgggcggcgacgacgcgggcgcccgagacgctccctctcttcccgacctgcggcgacgacggcggcagcggtagcagcagctacttgccgttctggggtgccgcgtccacaactgccggcgccacttcttccgttgcgatccaacagcaacaccagctgcaggagcagtacagcttttacagcaacagcaacagcacccagctggccggcaccggcaaccaagacgtatcggcaacagcagcagcagccgccgccctggagctgagcctcagctcatggtgctccccttaccctgctgcagggagtatgtgagagcaacgcgagctgccactgctcttcactgatgtctctggaatggaaggaggaggaagtgagcatagcgttggtgcgttgctgtcaagggcgaattgtaccacatggttaacctagacttgtccatcttctggattggccaacttaattaatgtatgaaataaaaggatgcacacatagtgacatgctaatcactataatgtgggcatcaaagttgtgtgttatgtgtaattactagttatctgaataaaagagaaagagatcatccatatttcttatcctaaatgaatgtcacgtgtctttataattctttgatgaaccagatgcatttcattaaccaaatccatatacatataaatattaatcatatataattaatatcaattgggttagcaaaacaaatctagtctaggtgtgttttgcgggtaccatttaaattgcgcccgccacggccgtggaggtcgtattccggtcagcttgcatccctgcagtgcagcgtgacccggtcgtgcccctctctagagataatgagcattgcatgtctaagttataaaaaattaccacatattttttttgtcacacttgtttgaagtgcagtttatctatctttatacatatatttaaactttactctacgaataatataatctatagtactacaataatatcagtgttttagagaatcatataaatgaacagttagacatggtctaaaggacaattgagtattttgacaacaggactctacagttttatctttttagtgtgcatgtgttctcctttttttttgcaaatagcttcacctatataatacttcatccattttattagtacatccatttagggtttagggttaatggtttttatagactaatttttttagtacatctattttattctattttagcctctaaattaagaaaactaaaactctattttagtttttttatttaataatttagatataaaatagaataaaataaagtgactaaaaattaaacaaataccctttaagaaattaaaaaaactaaggaaacatttttcttgtttcgagtagataatgccagcctgttaaacgccgtcgacgagtctaacggacaccaaccagcgaaccagcagcgtcgcgtcgggccaagcgaagcagacggcacggcatctctgtcgctgcctctggacccctctcgagagttccgctccaccgttggacttgctccgctgtcggcatccagaaattgcgtggcggagcggcagacgtgagccggcacggcaggcggcctcctcctcctctcacggcaccggcagctacgggggattcctttcccaccgctccttcgctttcccttcctcgcccgccgtaataaatagacaccccctccacaccctctttccccaacctcgtgttgttcggagcgcacacacacacaaccagatctcccccaaatccacccgtcggcacctccgcttcaaggtacgccgctcgtcctcccccccccccctctctaccttctctagatcggcgttccggtccatgcatggttagggcccggtagttctacttctgttcatgtttgtgttagatccgtgtttgtgttagatccgtgctgctagcgttcgtacacggatgcgacctgtacgtcagacacgttctgattgctaacttgccagtgtttctctttggggaatcctgggatggctctagccgttccgcagacgggatcgatttcatgattttttttgtttcgttgcatagggtttggtttgcccttttcctttatttcaatatatgccgtgcacttgtttgtcgggtcatcttttcatgcttttttttgtcttggttgtgatgatgtggtctggttgggcggtcgttctagatcggagtagaattctgtttcaaactacctggtggatttattaattttggatctgtatgtgtgtgccatacatattcatagttacgaattgaagatgatggatggaaatatcgatctaggataggtatacatgttgatgcgggttttactgatgcatatacagagatgctttttgttcgcttggttgtgatgatgtggtgtggttgggcggtcgttcattcgttctagatcggagtagaatactgtttcaaactacctggtgtatttattaattttggaactgtatgtgtgtgtcatacatcttcatagttacgagtttaagatggatggaaatatcgatctaggataggtatacatgttgatgtgggttttactgatgcatatacatgatggcatatgcagcatctattcatatgctctaaccttgagtacctatctattataataaacaagtatgttttataattattttgatcttgatatacttggatgatggcatatgcagcagctatatgtggatttttttagccctgccttcatacgctatttatttgcttggtactgtttcttttgtcgatgctcaccctgttgtttggtgttacttctgcaggtcgactctagaggatccatggccactgtgaacaactggctcgctttctccctctccccgcaggagctgccgccctcccagacgacggactccacactcatctcggccgccaccgccgaccatgtctccggcgatgtctgcttcaacatcccccaagattggagcatgaggggatcagagctttcggcgctcgtcgcggagccgaagctggaggacttcctcggcggcatctccttctccgagcagcatcacaaggccaactgcaacatgatacccagcactagcagcacagtttgctacgcgagctcaggtgctagcaccggctaccatcaccagctgtaccaccagcccaccagctcagcgctccacttcgcggactccgtaatggtggcttcctcggccggtgtccacgacggcggtgccatgctcagcgcggccgccgctaacggtgtcgctggcgctgccagtgccaacggcggcggcatcgggctgtccatgattaagaactggctgcggagccaaccggcgcccatgcagccgagggtggcggcggctgagggcgcgcaggggctctctttgtccatgaacatggcggggacgacccaaggcgctgctggcatgccacttctcgctggagagcgcgcacgggcgcccgagagtgtatcgacgtcagcacagggtggagccgtcgtcgtcacggcgccgaaggaggatagcggtggcagcggtgttgccggcgctctagtagccgtgagcacggacacgggtggcagcggcggcgcgtcggctgacaacacggcaaggaagacggtggacacgttcgggcagcgcacgtcgatttaccgtggcgtgacaaggcatagatggactgggagatatgaggcacatctttgggataacagttgcagaagggaagggcaaactcgtaagggtcgtcaagtctatttaggtggctatgataaagaggagaaagctgctagggcttatgatcttgctgctctgaagtactggggtgccacaacaacaacaaattttccagtgagtaactacgaaaaggagctcgaggacatgaagcacatgacaaggcaggagtttgtagcgtctctgagaaggaagagcagtggtttctccagaggtgcatccatttacaggggagtgactaggcatcaccaacatggaagatggcaagcacggattggacgagttgcagggaacaaggatctttacttgggcaccttcagcacccaggaggaggcagcggaggcgtacgacatcgcggcgatcaagttccgcggcctcaacgccgtcaccaacttcgacatgagccgctacgacgtgaagagcatcctggacagcagcgccctccccatcggcagcgccgccaagcgcctcaaggaggccgaggccgcagcgtccgcgcagcaccaccacgccggcgtggtgagctacgacgtcggccgcatcgcctcgcagctcggcgacggcggagccctggcggcggcgtacggcgcgcactaccacggcgccgcctggccgaccatcgcgttccagccgggcgccgccagcacaggcctgtaccacccgtacgcgcagcagccaatgcgcggcggcgggtggtgcaagcaggagcaggaccacgcggtgatcgcggccgcgcacagcctgcaggacctccaccacctgaacctgggcgcggccggcgcgcacgactttttctcggcagggcagcaggccgccgccgctgcgatgcacggcctgggtagcatcgacagtgcgtcgctcgagcacagcaccggctccaactccgtcgtctacaacggcggggtcggcgacagcaacggcgccagcgccgtcggcggcagtggcggtggctacatgatgccgatgagcgctgccggagcaaccactacatcggcaatggtgagccacgagcaggtgcatgcacgggcctacgacgaagccaagcaggctgctcagatggggtacgagagctacctggtgaacgcggagaacaatggtggcggaaggatgtctgcatgggggactgtcgtgtctgcagccgcggcggcagcagcaagcagcaacgacaacatggccgccgacgtcgggcatggcggcgcgcagctcttcagtgtctggaacgacacttaagcgtacgtgccggcctggctctccgaaagggcgtattccagcacactggcggccgttactagacccaacctagacttgtccatcttctggattggccaacttaattaatgtatgaaataaaaggatgcacacatagtgacatgctaatcactataatgtgggcatcaaagttgtgtgttatgtgtaattactagttatctgaataaaagagaaagagatcatccatatttcttatcctaaatgaatgtcacgtgtctttataattctttgatgaaccagatgcatttcattaaccaaatccatatacatataaatattaatcatatataattaatatcaattgggttagcaaaacaaatctagtctaggtgtgttttgcgaatgcggcctccggatacgtaataacttcgtatagcatacattatacgaagttatacctggagctcgtttaaacgctcttcaactggaagagcggttaccagagctggtcacctttgtccaccaagatggaactggcgcgcctcattaattaagtcagcggccgctctagttgaagacacgttcatgtcttcatcgtaagaagacactcagtagtcttcggccagaatggccatctggattcagcaggcctagaaggccatttaaatcctgaggatctggtcttcctaaggacccgggatatcgctatcaactttgtatagaaaagttgggccgaattcgagctcggtacggccagaatggcccggaccgaagcttgcatgcctgcagtgcagcgtgacccggtcgtgcccctctctagagataatgagcattgcatgtctaagttataaaaaattaccacatattttttttgtcacacttgtttgaagtgcagtttatctatctttatacatatatttaaactttactctacgaataatataatctatagtactacaataatatcagtgttttagagaatcatataaatgaacagttagacatggtctaaaggacaattgagtattttgacaacaggactctacagttttatctttttagtgtgcatgtgttctcctttttttttgcaaatagcttcacctatataatacttcatccattttattagtacatccatttagggtttagggttaatggtttttatagactaatttttttagtacatctattttattctattttagcctctaaattaagaaaactaaaactctattttagtttttttatttaataatttagatataaaatagaataaaataaagtgactaaaaattaaacaaataccctttaagaaattaaaaaaactaaggaaacatttttcttgtttcgagtagataatgccagcctgttaaacgccgtcgacgagtctaacggacaccaaccagcgaaccagcagcgtcgcgtcgggccaagcgaagcagacggcacggcatctctgtcgctgcctctggacccctctcgagagttccgctccaccgttggacttgctccgctgtcggcatccagaaattgcgtggcggagcggcagacgtgagccggcacggcaggcggcctcctcctcctctcacggcaccggcagctacgggggattcctttcccaccgctccttcgctttcccttcctcgcccgccgtaataaatagacaccccctccacaccctctttccccaacctcgtgttgttcggagcgcacacacacacaaccagatctcccccaaatccacccgtcggcacctccgcttcaaggtacgccgctcgtcctcccccccccccctctctaccttctctagatcggcgttccggtccatgcatggttagggcccggtagttctacttctgttcatgtttgtgttagatccgtgtttgtgttagatccgtgctgctagcgttcgtacacggatgcgacctgtacgtcagacacgttctgattgctaacttgccagtgtttctctttggggaatcctgggatggctctagccgttccgcagacgggatcgatttcatgattttttttgtttcgttgcatagggtttggtttgcccttttcctttatttcaatatatgccgtgcacttgtttgtcgggtcatcttttcatgcttttttttgtcttggttgtgatgatgtggtctggttgggcggtcgttctagatcggagtagaattctgtttcaaactacctggtggatttattaattttggatctgtatgtgtgtgccatacatattcatagttacgaattgaagatgatggatggaaatatcgatctaggataggtatacatgttgatgcgggttttactgatgcatatacagagatgctttttgttcgcttggttgtgatgatgtggtgtggttgggcggtcgttcattcgttctagatcggagtagaatactgtttcaaactacctggtgtatttattaattttggaactgtatgtgtgtgtcatacatcttcatagttacgagtttaagatggatggaaatatcgatctaggataggtatacatgttgatgtgggttttactgatgcatatacatgatggcatatgcagcatctattcatatgctctaaccttgagtacctatctattataataaacaagtatgttttataattattttgatcttgatatacttggatgatggcatatgcagcagctatatgtggatttttttagccctgccttcatacgctatttatttgcttggtactgtttcttttgtcgatgctcaccctgttgtttggtgttacttctgcaggtcgactctagaggatccatggcccagtccaagcacggcctgaccaaggagatgaccatgaagtaccgcatggagggctgcgtggacggccacaagttcgtgatcaccggcgagggcatcggctaccccttcaagggcaagcaggccatcaacctgtgcgtggtggagggcggccccttgcccttcgccgaggacatcttgtccgccgccttcatgtacggcaaccgcgtgttcaccgagtacccccaggacatcgtcgactacttcaagaactcctgccccgccggctacacctgggaccgctccttcctgttcgaggacggcgccgtgtgcatctgcaacgccgacatcaccgtgagcgtggaggagaactgcatgtaccacgagtccaagttctacggcgtgaacttccccgccgacggccccgtgatgaagaagatgaccgacaactgggagccctcctgcgagaagatcatccccgtgcccaagcagggcatcttgaagggcgacgtgagcatgtacctgctgctgaaggacggtggccgcttgcgctgccagttcgacaccgtgtacaaggccaagtccgtgccccgcaagatgcccgactggcacttcatccagcacaagctgacccgcgaggaccgcagcgacgccaagaaccagaagtggcacctgaccgagcacgccatcgcctccggctccgccttgccctccggactcagatctcgatagagtcaacctagacttgtccatcttctggattggccaacttaattaatgtatgaaataaaaggatgcacacatagtgacatgctaatcactataatgtgggcatcaaagttgtgtgttatgtgtaattactagttatctgaataaaagagaaagagatcatccatatttcttatcctaaatgaatgtcacgtgtctttataattctttgatgaaccagatgcatttcattaaccaaatccatatacatataaatattaatcatatataattaatatcaattgggttagcaaaacaaatctagtctaggtgtgttttgcgaattgcggcaagcttgtttttctcagacagttttctaaaaaaagggcgtttctggggaagttcgagatggttcgtaaggtgttactggctcctgtgaaccaatacatgatactgccatgataagggttataattagtcaagcagagtaagaagaaacaacagtagcagtgactccgattcctgaagatgagtcatatttgtcttgtgctcctgctgtatgaaatggatcgcatgtgtatattcgtcgccgcgccgcactggtgtaacctgttgcctcagagtttgcttttagctggttctgttttaaaaataagtactgttttttggttggctgcaagccattctgaacttcagtttaccaattgtttttatgttgtggttgaatattttaattttttatttaatgtttggttctttttttatatatatttgcaaaaatgatacaagtggtcaagttttcatatagtatgggctctatttcctagagctctacctctaggaacgaattttgtggaggttttcttttggctagttaggcaaagtccccatatcttgcaggctaaatcaagaagaagctctgtcaaacagttttttttactgaaaagtgattaaagagtagtttctcctagatcacttcagagtttatcctagagaatcatgggaatcaaattcagttagaggatcatttcttacaaagaatcaactttcgtagagaatctaaagcagaaagagctttgacaaacttacccttagagcaattccaacattctcgcgtgagtttcttcgcgccgttgttttgcggtgacttcatctggacgtcccgcgacatagagacgcttgtattgatcatgagagcttgtgtggtcatacacaatataattgttaaagatgaaagagatgtggaccttaatgagcgattcgactttgatggtgaaaatgtgcaaccttctcatggtatttctactcgcacactagctgaatttattgaagctcataaaaagatccgagacaaagaaatacattttcaattgaaagaagacctaatcaagcacttatggaagcttggtcacccggtccgggcctagaaggccagcttcaagtttgtacaaaaaagcaggctccggccagaatggcccggaccgggttaccgaattcgagctcggtaccctgggatccgatatcgatgggccctggccgaagcttggtcacccggtccgggcctagaaggccgatctcccgggcacccagctttcttgtacaaagtggccgttaacggatcggccagaatggcccggaccgggttaccctgcccttaaggccaattgttcaagattcattcaacaattgaaacatctcccatgattaaatcagtataaggttgctatggtcttgcttgacaaagtttttttttgagggaatttcaactaaatttttgagtgaaactatcaaatactgattttaaaaaatttttataaaaggaagcgcagagataaaaggccatctatgctacaaaagtacccaaaaatgtaatcctaaagtatgaattgcattttttttttgtttggacgaaaggaaaggagtattaccacaagaatgatatcatcttcatatttagatcttttttgggtaaagcttgagattctctaaatatagagaaatcagaagaaaaaaaaaccgtgttttggtggttttgatttctagcctccacaataactttgacggcgtcgacaagtctaacggacaccaagcagcgaaccaccagcgccgagccaagcgaagcagacggccgagacgttgacaccttcggcgcggcatctctcgagagttccgctccggcgctccacctccaccgctggcggtttcttattccgttccgttccgcctcctgctctgctcctctccacaccacacggcacgaaaccgttacggcaccggcagcacccagcacgggagaggggattcctttcccaccgttccttccctttccgccccgccgctataaatagccagccccatccccagcttttttccccaatctcatctcctctctcctgttgttcggagcacacgcacaatccgatcgatccccaaatccccttcgtctctcctcgcgagcctcgtggatcccagcttcaaggtacggcgatcgatcatcccccctccttctctctaccttcttttctctagactacatcggatggcgatccatggttagggcctgctagtttcccttcctgttttgtcgatggctgcgaggcacaatagatctgatggcgttatgacggctaacttgtcatgttgttgcgatttatagtccctttaggagatcagtttaatttctcggatggttcgagatcggtggtccatggttagtaccctaagatccgcgctgttagggttcgtagatggaggcgacctgttctgattgttaacttgtcagtacctgggaaatcctgggatggttctagctcgtccgcagatgagatcgatttcatgatcctctgtatcttgtttcgttgcctaggttccgtctaatctatccgtggtatgatgtagatgttttgatcgtgctaactacgtcttgtaaagttaattgtcaggtcataatttttagcatgcctttttttttgtttggttttgtctaattgggctgtcgttctagatcagagtagaagactgttccaaactacctgctggatttattgaacttggatctgtatgtgtgtcacatatcttcataaattcatgattaagatggattgaaatatcttttatctttttggtatggatagttctatatgttggtgtggctttgttagatgtatacatgcttagatacatgaagcaacgtgctgctactgtttagtaattgctgttcatttgtctaataaacagataaggatatgtatttatgttgctgttggttttgctggtactttgttggatacaaatgcttcaatacagaaaacagcatgctgctacgatttaccatttatctaatcttatcatatgtctaatctaataaacaaacatgcttttaaattatcttcatatgcttggatgatggcatacacagcggctatgtgtggttttttaaatacccagcatcatgggcatgcatgacactgctttaatatgctttttatttgcttgagactgtttcttttgtttatactgaccctttagttcggtgactcttctgcaggtcgactttaacttagcctaggatccatgcaaaaactcattaactcagtgcaaaactatgcctggggcagcaaaacggcgttgactgaactttatggtatggaaaatccgtccagccagccgatggccgagctgtggatgggcgcacatccgaaaagcagttcacgagtgcagaatgccgccggagatatcgtttcactgcgtgatgtgattgagagtgataaatcgactctgctcggagaggccgttgccaaacgctttggcgaactgcctttcctgttcaaagtattatgcgcagcacagccactctccattcaggttcatccaaacaaacacaattctgaaatcggttttgccaaagaaaatgccgcaggtatcccgatggatgccgccgagcgtaactataaagatcctaaccacaagccggagctggtttttgcgctgacgcctttccttgcgatgaacgcgtttcgtgaattttccgagattgtctccctactccagccggtcgcaggtgcacatccggcgattgctcactttttacaacagcctgatgccgaacgtttaagcgaactgttcgccagcctgttgaatatgcagggtgaagaaaaatcccgcgcgctggcgattttaaaatcggccctcgatagccagcagggtgaaccgtggcaaacgattcgtttaatttctgaattttacccggaagacagcggtctgttctccccgctattgctgaatgtggtgaaattgaaccctggcgaagcgatgttcctgttcgctgaaacaccgcacgcttacctgcaaggcgtggcgctggaagtgatggcaaactccgataacgtgctgcgtgcgggtctgacgcctaaatacattgatattccggaactggttgccaatgtgaaattcgaagccaaaccggctaaccagttgttgacccagccggtgaaacaaggtgcagaactggacttcccgattccagtggatgattttgccttctcgctgcatgaccttagtgataaagaaaccaccattagccagcagagtgccgccattttgttctgcgtcgaaggcgatgcaacgttgtggaaaggttctcagcagttacagcttaaaccgggtgaatcagcgtttattgccgccaacgaatcaccggtgactgtcaaaggccacggccgtttagcgcgcgtttacaacaagctgtaaatcactagcgaacgcgtaggtacccgggccgtgggtcgtttaagctgccgctgtacctgtgtcgtctggtgccttctggtgtacctgggaggttgtcgtctatcaagtatctgtggttggtgtcatgagtcagtgagtcccaatactgttcgtgtcctgtgtgcattatacccaaaactgttatgggcaaatcatgaataagcttgatgttcgaacttaaaagtctctgctcaatatggtattatggttgtttttgttcgtctcctaatatttgcctgggatcaaattttattggctggtgttcatttgacctccatgttcttgctaggctccattttttactctacagccataatatgtttgattgtttggtttgttctttgttgtacacctggttctgtcgagcttagttttcgacactggcttacagcttaacatgttgctattttattgggttctgattgctattttattgggttctgattgctagtttttgctgaatccaaaaaccatgttatttatttaagcgatccaggttattattatgatggtggctaagtttttttttttccaagggtaaattttctggattctccagtgtttctgtggccgaattgggcaactttattatacaaagttgatagatatcggaccgattaaactttaattcggtccggtggcgccgctagcgtatacgaagttcctattccgaagttcctattctccagaaagtataggaacttctgtacacctgagctgattccgatgacttcgtaggttcctagctcaagccgctcgtgtccaagcgtcacttacgattagctaatgattacggcatctaggaccgactagctaactaactagtacgtagaattaattcattccgattaatcgtggcctcttgctcttcaggatgaagagctatgtttaaacgtgcaagcgctactagacaattcagtacattaaaaacgtccgcaatgtgttattaagttgtctaagcgtcaatttgtttacaccacaatatatcctgccac

SEQ ID NO: 94 - DNA, 2654 bp, Zea mays
ataattcaccggactgtccggtgtacaccggacagtgtccggtgctccaagaggacgcgactctggaacttggcagcctcgggaatccgtagcggctgctccactataatacaccggactgtccagtgcaactgcggggcaacggctacttcgcgccaacggtcgcctgcaacagcaattaatgcgtgccagagcgcgcaggcgtcaggcacgcccatgctggcgcaccggacactctacagtacatgtccggtgcgccaccggacttccaggcgggcccagaagtcagagctccaacggtcgaatcccaacggctttggtgacgtggctggcgcaccggacatgtccggtgtacaccattcaacagtcagccccaccaaacggctagtttggtggttggggccaccattcatagcatccaagttttccacttctcaaccacttacaagagctaggcattcaattctagacacaccaaagagatcaaatcctctccaattccacacaaggctttagtgattagcgagagagatttgccgtgttcttttgagctcttgcgcttggattgcttattttctttctcacttgttcttgtgatcaaaactccattgtaatcaaagcaagaggcaccaattgtgtggtggcccttgcggggaagttttgttcccggttttgatttgagaagagaagctcactcggtcggaggaaccgtttgagagagggtaagggttgaaagagacccggcctttgtggcctcctcaacggggagtaagtttgcgagaaccgaacctcggtaaaacaaatccacgtgtcacactcttcatttgcttgcgatttgttttgctccctctctctcggactcattattatttctaacggtaacccggcttgtagttgtgattaattgtgtaaatttcagtttcgccctattcacccccccctctaggcgactatcagttggttccttagtgtatgttatggtttgatcacatcctgatttgtcatgtgccatgagtttggttagcagatacatggctaatcctgatagaatgcattggaaagttgttaagtggattttcaagtacttatatggtacgtctaatgcttgtttgtagtttggcaagtcaaagagggacttgttggatatgttgattcagattatggagcagttttgtataagagaagatcattaatagattatgtattcacggttggtggatgtgtaattagctggagggtttgcctaattccgacagttgttttgtctactacagaggttgagtatattgcagcttgtgatgctagcaaataggtcgtttggttgaaaggtctatatgctgagttttatggagatacatattgcattacattgttctgtgacagttagagtgctatttgccttacaaaggattagatgtttcatgagaggataaagcacattgatattatcattatatatgggaaatagttgcaaaaggtaatttgagggtatgcaagattagtacacacttcaatccagcgatgactaaatctgttactgggtgctaagtttgagctttgctcgaacttagttggtataattgcttagccctagcggctatgttggcacgacattttgttccttctattatttagaaagttgcttacaaattttggctacaagatggaatttgtctcgaggtaagattgttgagtttgtgatccaaattctggataaggggtcgagttggtgagcgaagtggaggcccgtcgccagaggtttgagccgaccctaattagggtttctgttgcgccatcatcataaccatcttgtaagccgtcgtctaagtacgacgttctgtaaagactccaaattacagtgaaggtttcgtctgactggtatctgtggtttttcccttcgcagtgaaggattttctatgtaaatctatatgtcgtgatctgtaattgtggttgattacttcatttttatgcccgtcgactctgctaacaaatataaatttatgtttttactaagacttaaacatagttaagtattgctaacagaatataggaaaacgatgcttcattttgaaaaaataggaaaaataacacaaactgtataaggaagaaaaaaaatatatagttggatattgaagtaatagcgtagaccccattgccctaaacgaaaagcccaaactaaatatagattcattcggctccaatccaactcaatccagctcagaccaaccgcaactcaacccagcttttatataataatagaatcatcagtattatagctaaaaataaactaacagttacaaaactagtctatcaaacaagccgttactatatccactctttaactaggttagacccgtggatgcaccacaggccagacagttggcctaaatccggcacagctattgggccgatctggcccggacacgcttttagtcctgctagaccgtactcgtgccgggtcacagacctactgccgggcgaatccatttagatatgtgtacctgttaccccaactctagtcgtcggaaccccaaccgagttccccagtactccgcagtccgcacggccgcatccgtcaagatccgcgaagagcaacgaggcgaggcgaggggagggaaaacaagtgagtgagagagagagagagaggagggaaa

SEQ ID NO: 95 - DNA, 3808 bp, Zea mays
ggttaaagttactggtcatgtagaaaataagggctggactatccggcatgtggactacaaggacacctcggagaaggaagaggtcaggatccgtgggttcaagttcaacaagtctgagcagctagaggtgaactacaccgagccaggaaagcatagcttgagtgcgtgaaaagaaaacattcttgacctgactagcttcgtaccaaaatggaaatagctcacatctgggtcgcctcccagattctgggagggaggccaatgccagcgtagctgaaaccgttcttctccttcccccacgtacaacaaggagcaaagtgcttcaccaagcactcaacattctttatgtatatcttgtacagaactcctcttcagtgcaatcagagttcattgtttgtttgggatctgatgtttatgttacaattttttattttagaaaacttggcactgaatcaagtaataagtgtggtagtgtgtagaagtatagtaacgggctataagcctacttatgtggcattttttgtctgtgtggatgagagacattaaaaagtggaggtgggctctcatgcaagagtcagcttctatatgagctcttagataaaaggatgaaatagaaagatacactataatgatctaagagtcaactttgtagcctgctttagtatatgtgttcttattgttggctctacataatatggcaatgatttagagttcactgtaggagtggtataccggataacacatcttttttcgatagcatgtaaacaatggaataccctagttatatcataggaaatggagagcaataccctatgttgacatgagtctttgcaatccttttagggctggtttgttgacaaagaaattggagaggattgagggaagaaaattccttgcaaaggattttctctccccctcaggctcgtttgcttacttgtgaatggttcctctgctggattggaatgtttattttgtattaacattgattagctggaatagtttggaatgtttatttgtattaacattgattagctggaatagtttttgttctcaatccgatataaacgaatgggacctcaattctctctgattcctttattaccaaaccagccattagtgcctgtgtcttttaaaaagaacacctttgcaacttgggcaatggctgtggaaaggaattgtggtgactggtgatgatgagtaagcgctgacgcgataacgagatgccgtgacggataggcattatctccatataagggctagtttggcatccccatttttccatgagatttccaattttctaaaggaaaatgaactaattttccttgggaaaatgaggttttcaaactagccctaaaaagatcgggcaaagtttttttttccctgctcgatttggaacctgcatcgaaagtcttccagaatgaattaaagcctcgtgtttgacgctttttttaataactataggatgttcggcgtctctttatcggatgatgtagctagggttgttaataagatctagattttaggctataaaatgtaggatcgaatcggattagcgtcaaactatattcatatccattttgaactaaaatgaattaagagccctgtcctaatttattgtgaagaaacacctagatcgttattcattgccatccctagatggagctactgtttcttagatccaaaatgtacatccatggtgatatagctagtgtttctcagatccaaaatgtccaactttacaaaaaaaagtcttcatgaaaataaggccccgtttggtttcagggactaaagattagtccatccattttagtttcatttagtccctaaattaccaaacggtgaaactaaaacaaagactaaaatatttgtctctatcctccaatgtatgactaaaaataattaaaccatataaattctaccttttgtccctcctttgttttagttacactaacggcggaaaaatgataagagacattttagttcttttatgatttatttaatgtattttaaatacttttagtcggatagagactaattaaattttagtcctgactaaagcaaaccaaacgggccctgactcatgcacacggtttcctctttatccaagcttccaaaaaatacccacttccactttagattctccgagtcacagatccaacaatattgctccaaaaagaagtactcctaaatccttccagaaaaggtgagagtacatattaaacccgataataggccaataaccactgttatatctatagcctattcctgaacatcagaattagtgttataaacatgaaatgtgaaggagttattacagtgagagctaccgtcagtggtgtggtcgggtttgctagtgtatgaaaacagattagatgtgttaaaataaagtagagtgaaaattaatttaaatacaattctagttgattaagaacatctccaaacgaacgactagtaacagatttggtttatcattacatgtataattgcgtgcggattttagcacacatggaatgagaggcaaacacgggcccaggaacggcccacgggagagagaaaccctacccttcccttcgcggtggtggcatccgagacccgtccacaaccaccacagacacggtgcaacccccccccccccccccccccccccccctcttaaaagccgcctctcgccgccgcccgcaaaccctcatttttctctctcctgcgccgcgacgtccctcgccttcgccgccgaatccgagactccgatctcgggttcaccgcagcgcacagagcagccccgactcccggcccgatccgcgctctcctctccgtcgcttcaggtgttcgcctcctccagatctcttgctgtctcgcttgttacttttttgtttgcttttcggcgtccgatctggtgcgacggcgggtctgggtccatctggcggtgctacccgtgcggatctgcgccgattcggtgggaatattagtgattttgacggttctggattgacgcacgggtttgcgcacggaaatactacctttcccccctttctctgacatgcggctttcagctcaatacatgatttttcttacgtaggatttgattgattttgtatgtagatataagcgttttccggtgctaatatgcaaaattgctagttttggtcatataaaactgtcctgggaagctccgtagcttgtgtaccgtgcttgagtattggattcaagctgtttgagctgtgggatgctgcatgcttgatggtaatgaattattctattgtggtaagtcaatttttttgtgaaagtgactatgagatggtcgcaagggtttgctacaggataaggttaaaagactgccctgccctatgtactagacgagccattcataccgtgcgaactgctaaaagctgttgctcgatttatcgagtacttgcaattatatcagcctgctgttaagaaagtgtaaagcatcaattgtcttggtatggttctgtttagattctttataaactgaagattgagttgagcatgcattttgtataaattgtagagcttgaataatcattttaagagtacaactgattccctattgattctgttgtgaattacttgtcttctagcatggtgtttgtcttaaacatttctttgctacacacttttctcgttgtaatctgtaggacagtttgttctaagcttaaactgtgccattgctcattatattgtatacatccttttgatctaggttcatgattaaacctttctttgtatttgtttgtcatattgtcaacatgtgctgtaacttctgtgtattaacatgtttcttttgctgcag

SEQ ID NO: 96 - DNA, 2649 bp, Zea mays
aggaaaaagtgcaaagccaagtgctagtgccgcacagagggctgtcagtgccgctcataggggcgacagtgccgctcaagcaaaactatgcagaatctcacaaacttcacaagaagtttgcatagagggaaataagatgattcctcaagtatcaaccagaacaacacaaaaccccgagtgtagatcagattacccgaaagatttggggtttctagaacgaactcaaaatgagttcaactcggatcacgaccaaaaactgcaccaacagggtgtatgtagtgatccaaagagcgtatctcatcacccaacaatcgctaactgtactcacaattcaagaactcgatggttattccacaaatcaaaaagagaagggagggaacgagaatgaagacaaactcgaataaaaaatgcaacagacaaaattgagcacatgattcgaactactccatggatggatttgtccacccttcttttggatatagagttgaagatcacaagacatagatgtgaacaaaacacctgtggatctcagctaaactagagaatggaaactagagtttctaaacaagtgccaaatcaaaataaccaaagagatgattgtctactatggcccacccttctatttatagagggttatttacattgactaaactaccacgaggtacatagagcctatccactcttctggaggcaaaatggaccaactcccgagatattgatctgacggtcatacgctccaaaagaagttgcttcgcctcgacgcactctacacgatgatgacacatgccgccttcgattcctgctcgaaccgcaccgtcgagttttgaggcccatatcggtcagaacccgccatccgcaacgttgggtggttttgaggctcaaccaccaaaccgccttgagtaccgcaccgcatgcgcgtccgccacgtcctatacacgtgtcctgccagtccatgaccatgccggcgacacgatccaccctaatgtcctcacgacactgcgtgtctcaggtgtcagccaccacgactagtcaccccagtcccttggtcaagtcccaacgctcattcttcgtcgcacctggtccatcggcacaaacccgcatgaccttcacctttgtcgccgaccaccgtccctgtgctccgcacctacacaccataagccgacagacatggttgtacaacacatagctcgtactctggttagtcaaagaggcaaaagaagggctcaacaccactagccagacgtcaaaaccaaatcagatcactaaatcagcacgagtgctgaaatcaaagctagtttatccagaaagaggcaaacgacttaacacagctagcgaaagctccaaaaggctcaaatttctccccctagctgatttcccttgaaaagagcacaagaatctcaaagtctattccccaagaaaggagttccaaaaattcagaatccccaaaaatccagaaatttctcccccttgttaggagcccaagaaagtcaaaggctctcccctttattgacaaatgaactcatcaaacacatccaagggtagaaacaaaaattccccctcgacaagagatcccctgagaaaatgcagagatgcaaaagagagagtagaaaatgtaggagctttagaattataccagtcagagtgtaaagatgctctaagtgatgttgtgctatgtgtgcaacaataaatgcacgtgctagtagacgctcaaactgatccacctttcaaagattttttaaagagtgatcatagaccaaagagcagtttcaatttggaacccttgatgttttgtttcggcaagtgccatagtccttggagctcagtagttttttttctcttggagcagtggggggtgagggtgtccattaatttagtagagaagagatttggacgacatgttggttagatagaagcagaagaactttatataaaagtgacgtgagtgaaaaccatgacaacttgtactttataatagtagggagaggggtgggtactggccaacggctagcgggtgacgcggagtcttgtaggcggtggcggatgagcacgactattaatatagtagagaagagatttggacgatagaagtagaaggatttttatgtataattattgaaaaactgtgataactgatgttttataaagatatagacagatatagagatttacaaccaatattaaaagagtatatattttagggataaaaaattaaaaattaccggtgtatttttttaattgaagtcgaggagattgatgcaggaaattgaccttttacacggaccgcaaggctaaacttctgcatggttcggttgaaagcgcctacaaaggcgtccctaggcctcctagcccgtgccgcgcaacgtccggctcggacaccggaggctttctcacgcgtcccgatcgcctccgtccattaaggtccgtgttcgatcggatggctttcgatgacgagggttttgccccagacggtacaaatacggagcctcccaccccgcgccgccaccgcgctctttctctttcctcacgacgccgccgttgggagccctgcttcgggagagccccaacccttatcaaaccctaaatcaaaaactacccaaaaaaatccgcaaaatccagaaaaaaatcccaaaaatcaccacttgattggag

SEQ ID NO: 97 - DNA, 3186 bp, Zea mays
atcaatcacaccaaatggtaccgactgttctaatcagggtcgttcccttccggactaacgaccagcgctcctcctcccaatacaccaccataccacagaccgtacgcggcggcgccgccctggcctgcgacggagggggcgccgacgacatgccaaactatgagctgatgccctaagccttgttcctaccggcgaaacgcgatgaggaggccgatgcaaactcagatgagaacttattaccggtgatgtgggcgtaggccaacctgtcctcgagtcggggcggaatctgtggcaggcgatgacggtgatcaattttgacgaaggtggtcgaggctccacaaaaaaatgctacgctcagcaccaccacgcagctacgaagctccagcaccgccctcccgagtgttttgacggtgcaggccgggcttcctcggcggcgcacgtccggaacgatgatgtcacactacttccttctctcggtaccaggggtatgattgatgagaggaacacgagggggacgagcttcgacacatgaatttatggccacaaaaggggggtcgacagggacgcccgcgaaattcgcacgccggtcgtcggtgaactgcgggtgtttgttacgcgagctgggggatgacaacatgggtccacttgtcggcgtgcggcttggttaagcgcggagttgagcaggtgaggccacacgacagaggcagtcggccagcacgcgcacgcggaatggccgacccatggggcccacatggcggtgtttagacgggcgggcgcggtgcgcgcaatgggccaatgaggcaaggaaggagagatgggccagaatctggttttgcgacccaaaacagagttttaccccttttctttttttctattcttttatcttttctatttcaaatttcaactatccaattcaaatttaaatccctatttggattttttttagatttcaactctcaagtataattctaatgtgaatattgattctagtacttttaatattattttccccccattttctcattttagaagcaacaatttactattacaatttctgttatcattttctatttttcatttacaaactgaggtcaaattcaggttttcaataaatgcatgataaccacatcatcaacaagagatgtgccattctttatttgtttattagttacttaactaatttaatactctttgttggttataaataggaagggtcctaatgaagtttcaaaggtttcaacaattctcctaacttcattataaatatatttatttatttatttatttattttatatatttttgtcacttctaccaattttgacctttagagtttataatacaaaacagtgttttgtaagtaaatacacgtttttgttgaacctaatagggtttttaccatcgagtatcagactatccacactcatataactctaaatttctaccatatgagaatatattgtacttgtcagcaaaaaactttacttataccacaattttccgtagtcatatctgctatatatctcaactctataccaaccgcaacatattatatcatttttgtctctttcctctcacctactcgcccaactcctcctggcttggtgacttctgtgcctgcacgtccaatgccatatggagaacatagaagagatggagtaagcctctccctaccacccataccttttagggtagatcgctacaacgtttcagttgctgcaaagaagacccaatatcatcaggtcgctcaatgcggatagcctcaatctatccacattcatcctactctaaaaagaatactccatcttagtcattaatattttaaaatacaatagagtcctacatctacaactattctatatctcaactcgatataactactacattttgatgaatatatatcgaacacatccggttaattgtgggcttgtggcgttgtgttcatgtcgccgccccacaaccacaagctcggcgggtcggcctcattgctgcatagcgttcgaacttcgaaccgtacaaacagtatctgaccgtttcctgtcggttgctgtaaagtagcgtcacgtatagagtagctgcagcacatttcgtacatacctcgagtagcgtagcgcaccctagtgtgtcactgtggacagcctcagggtctgtttggttgggctgtggctgtgaaaaaagttgctgtgggctgtgagctgtggaaaaagctgctgtaggctgtaagctgttaaaaagctaaaaaccgtttggtagaaaccactaaaagtcgttaaaaatccttcgatatatgttttcatagttccatccgaaaagccactaaaagcaggtccagaggtgctttcagatttgcactacaagaaaatcggtttttagaaaaagctgcttcctggatccagccctttggttggcttttggcttttaggggggcaaaagccaaagtcaaaagttaaaccaaacacaccctcagtcacccattcacatctctaccctagtgcgcttcccttataaaacctagctcctcaagctccagacgcagtcgaccgccgcagaccgggagtagtcgacgcgccgtcactgaatcctcagatcacggctagccgtaatcacgccactctgctgactcccggcgaggtactctgacgcatgcgcgagcgcttctcttcttctcttttcgctgtgcttttagtctgttcgtttgatgcccagatctactaggtttgtgtgatgagccgagccgatttatgcactggatttttagtcaagtgttgtttccgcctccgctatctttagtgtctatgtctgaatttgggttcagtgattatcgagctataaattatagttgttgcgctgttctatactagatccagttaccgatctatgatattacggggttgagcgattcatgtgctggagtactagtccaagatttgcttccgtctcctcatctacctttagtatgtactctgtatataaacttaattgcagtttgcaactgattctcggccatatattacttccgttgcgttgttcattagatccatttccgatccctgatattacgtgggtggggggtacttcgactttgttttttccggattgtttgattactggtctattcccatacatatttgtttctcattgattttatataattttgatgtaagcagcagtgtaacattttccttcag

SEQ ID NO: 98 - DNA, 2792 bp, Zea mays
tgcaaatacccgtattttcggatacggattcaggtatttttatattcggggcgaatatgtgtaatacccggatactgcagcttcggattcgggacggatacggagcggggattactcggtaaatacccgaatattcggggtcggatacgggtacccgtttttctttttctgcataatattgttttaaaatcctaacttttacatatgaattcggatgaagataaagtttgtatgaaaattgtagagctcgaagagatctatagatttatagtacatcaattttttttatcatttttatatcaaattaatataaaattttgtatgaaaattgtagagattgaaataatgtccaaatttatatcaaaataatatactttatcatttttatgtggggggcttaaggttttcttcatgtgggaacttaaggttatctttttatagactatttattagtattggtaacttatttgtaatttttggtcagcgctacaatattttatggatttaattgtattttgatgattttctacgacaaaataataataataatacgtaaatagcctaaaaaatcttgaaattttacggaggcacaacatatgtccatatataaccataaaatgtttggatcataagatctataagatgtccatgtttcttacattttattcacttatttgtatgagttacatgtgaaatcactgtaattattcaagtttcaacataatcagtaccttacgttaccattttcatatgatgacttgagttatctttgtataaaatgtttattagtttttgtaacttatttgcaatttttgagtgaaactataatattttatgaatttttaatattgtggtgttggttctacaatgtccttgtgattagtaactttgaactgcatgatgtcaattttatcggtttcctttcctacatttgatctatcatatatacatgattatgtattgcttaatttatgtgtttgttggatagttgtacaattaatataatcagtacgaactatctgacaactatccggtacctatccgagtagtatctgttatccgtttcttacccgcccgggttattacccggtcccgtcttgtatccattccgaatcttaactacccgtatccggcctcgtatccgagacacatgcattagagtagaatacatgatgactcggtatccggctgtatctgtcccgttttcatccctagttatcctaccaaatttgagaaaatgactcatgatgcattatctcattttagatggagtgatttctcaaacaaacacccccttagatagtcaaagtgactattcaagtttcctcttccgggttactctattgttcgtcaaaatgactattcaaaccaaacactctctaaatgtaacaagtgactggataggctatagccgagggtgttcgtctagtagagggtttgtttggaattcgttttttttgtatttccgtgttttcctgcgaaattaaattggttcatataaaattcctacatggcttctaagaagctattatattttgaatcggtcttagctccaaaggagcaaaccctatttctccacctagcattacctcgtcctagctcttgaaatgctcaagtagtcaagtgtttacatgtagtgcagtcaatgtcaaggtaacgcaataaactaaggccatgttcattccacctaggattatataattcagcttatagattatataatcaccaaataacctatttatggattattatagatatctaaattatataatccacataataatgcgtgttgtttattttcctcttaacttatttaagttggattatataatcttgagggtaaataaacatggcctaaatttactacaacatggatagtagttagagacatttgtttttaaaccatgaaaaaaccctataaacttctaaaaagttctgctaaaattctaaatacaaattaatatacaacttcaaaaaaatgttcaaaggtcatatctccagcacttctaaaaatcatttatttagaaaaataaaaaacatagaaaaattacaaatcattctaattgatgccgtaatgtgtttcaaaaactttctacaacaaaagcttaaacacaaccatcaaaaatgtatgagacattaatgtatttcacgctattgactattgcatatatttgtcgtgtaaagttttatagcccatttatacatcaattataatgattttaatttttctagatttcttttgtacaattttctatttttctatagctaaataattttaacaaaatttctagtgatatttctattttttttatttttgtacacctagatttgtagaaagttagagacattgtttatagtttaaaaattgaaaaaatatttactgtatttttactaacgggtgaagtcgcatccaaaaccacttcagtccatggcaagaggtattttactaacggacggacatggcccagacatccggaagaggcccaagggcccataacgtccgtacccgcatccgacggttccaagcctaacacgcgtcatccatcgggagctcgctctagggttttgcttcgagaccgttcccacttcccatcgctcatataacaccgggcgccgccgcttccgtcctcttcctctcgctccgttgctcgcctcgggtcaaaccctaagcaggtacgcttccttgtgcgacggccatctcctcttgcggacggctcgatttctcaatctgttgtctatttcactgtatctgacctttctttgttttatttttgttgttgtttcttccacag

SEQ ID NO: 99 - DNA, 2488 bp, Zea mays
agatcacttcttgttgtatcttacaccaatttacaaaatttcttgatgtgttttatggcaacctcatgcgctgagagatacattcgttattatgaaacagatggacgatttacgctaaaattcgtactcatttacgttgttttggttcacgatttacgcttaaatccgtccgagccagaacccgtgcacgaccggtggcgcacgattttcgcgccgtaaatttgggctccattcgccattacgacacaaatatacaatttatggtaaaatttgtactaatttacaatgtttcggttcacgttttacgctgaaatccattcgagccagaacccgcgctcaatcggccacacgcgattttcacgccgtaattcgagcctcatttgttgttacgaaacagatatacgatttacgctaaattgtgtactcatttacgttgttttagctcacgttttacgctaaaatctatttgagccaaaacccgctcacggtcggacgcacgcgattattacgccgtaatttcgggacccatttgtggttacgaaacagatatacgatttacgctaaatttcgtactcatttacgctgttttggttcatgttttacgctaaaatctatccgagtcagaacccgatcacgatgggacgcgcgagatttttacgctgtaattgttgggccgcattcgccatttttacgctagtacgggacgtggctatacctggctggggcttcctggtccctatatatatatatagggaagaggtaatggaagccctgggcttcccctactaatggaagccccagccaggacgcggtcgatccagcacccgcgtgcttgcgtcagccatgccaggacgataagcgtaaggcaatatacgaatgcatatatatatatggataaagatgcgtaaaccatgcataaaggaatcttttgacgcccgaatcacgtggaacgaatatgacactgtggacagcgtttacgactgcataatgacatgtacttgacgacataaatcatgcagtatgtggttctggttctggctcgggcagattccagcgtaaaccgtgagctaaaacagcgtaaatgagtacgaaatttagcgtaaattctatatctgttttgtaacagcaaacgagatctaaaattacggcgtgaaaatcgcgtgcagccgatcgtgtgtgggtcctggctcgggctgattccagcgtaaaacatgagctaaaacagcgtaaatgagtacgaaatttagcgtaaatcctatatcttttttgtaacggcaaacggagcccaaaattacggcgtgaaaatcgcgtgcagacgatcgtgcgcgggttctggctcgggcggattccagcgtaaaacgtgagctaaaacagtgtaaatgaatacgaaatttagcgtaaatcctatatctgttttgtaacagcaaacagggcccaaaattacggcgtgaaaatcgcgtgcagccgatcgtgctagggttctggctcgggtggatttaatcataaaacgtgaaccgaaatagcgtaaatgaatacgaaatttacgtaaattatagacctgtttcgtaacagcgaatggggcccgaaaattacggcgtgaaaattgcgcacgttcgatcgtgcacggattctggctcggtcaaatttcaacgtaaaacgtgaacaaaaacagcgtaaatgagtacaaattttagcgtacatcatcaatttatttcgtaacgacgaatagggcctaaattacggcgaggcgtgggtcgaactcctccaggcagcgggtgatgcgggtgggcacgttcttcgacgacatgatgacgacgaggatgtccctaagcgccgctgactccttgacgcgcttgagcagctcgtacccagtcatcccaggcaccaccgccttcctgctgttgttggcctttggcgcaggggacggcgccacagacgctggagcggcagcggcggtggccatcgcagagacgaatgagacaaacgccgttgccatcgggcctagggtgcgctgccgccgtccggccgcttcgagaacgccgtcgccgcttgcgtgcccgccttgggagcgtcgctgtcgctcgttcctggtggagcgccgtcgtcggtcgcctgcctcggggcggcaccgctgctggctcccaggatcaccggcactcgcacgcccaagggaaccgccgctgccgctaaaacctaatctctggttgcgtgggggtgtttttataatggcggtgtgggactggataactgcgagcgcgtggtgggatcgtggccctatgcacgtaatatgcaggacgaaatctacgctatgggccatagatttgtataaattgttacaccacatcagcatactcgtattataatttggtcgtaaacagttagagctggatcgatctgggttccttcccggcggcacgatcgcccgccccaacggccttcgatccacctactagaagcttccggtctacgtacgtaaatatataatacg

SEQ ID NO: 100 - DNA, 2712 bp, Zea mays
attttcggcaatgttattaagaatattatgaagtatttaaataaatttttgtataattttttatgtacattattttctccctacaacaaaaaaggtgaaaaacatctgaatccgtattcggatagacatccaaattttatatgaattatttaaaaagatatagaatgaatttaatgtttatttttgtgaagattaatagtctcaatgctaaaaacaagaatataaatttacatagcaaattctatatgttagctgttcacaatcgaagaaagaagaccaaaaaatgacatccgaataaatatccggatccatccctacccactactactaagttaaggtggaccctccgggatgtcaatagtgaaagtcgcctaaaggggggtgaatagggcgaatctgaaatttacaaacttaatcacaactacaagccgggttagcgttagaaatataatcgagtccaagagagagggtgcaaaataaatcgcaagcgaataaatagtgtgacacgtggatttgttttactgaggttcggttcttgcaaacctactccccgttgaggtggtcacaaagaccgggtctctttcaaccctttccctctctcaaacggtcacttagaccgagtgggcttcttcttctcaaacaaatggaacacgaagttcccgcaaggaccaccacacgattggtgtctcttgcctcaattacaagtgagtttgatctcaagaaagaatgagaaagaaaagaagcgatccaagcgcaagagctcaaatgaacacaacaaatcactctctctaatcactaaagctttgtgtggagttgggagaagatttgatctctttggtgtgccttgtattgaatgctagctcttgtaatgtagttggaaggtgggaaacttggatgacttgaatgtgggggtggttggggtatttatagccccaaccaccaaactagccgtttggtggaggctgctgtcgcatgacgcaccggacagtccggtgcgccaccggatagtgtccggtgcgccagccacgtcaccaggccgttgggttccgaccgttggagctctgacttgtgggcccgcctgacatgtccggtgaattatagcggagcggattcccgaagctagcgggttcagagtcgctctcctctggagcaccggacagtccgttgaattatagcgaagcgtctctgagaatcccgaaggtgatgagttcagcttggagttccctggtgcaccggacagtccggtgcgccagaccagggcacacttcggttatcccttgctctctttgttgaacccttttcttggtctttttattggcttatgtgaacctttggcacctgtagaacttatagactagagcaaactagttagtccaattatttgtgttgggcaattcaaccaccaaaaccaattaggaaataggtgtaagcctaattccctttcaaatagggactccaatactcgctaaccgatgctaaatcccttattagggttaggatatcagacaaaaagtctccccattggtataaatatgagacaaaatattcacccattaggtaagcagaaatgggtttggaaagaaatcatccaaaaccaattaaccatgagtaatattcacctagtgaaattaaatgtgtgtcctaatagataataagcacaacaactaactcaatctctttcaactaacttaatctctttcaacccttttaagcacccatccacctagcctaggtggtcagccactagccgtcccatccactagtccatatgttttttttttgtgttttgctgttttgtatggttaaacatatttttttattaaatgtcagatttattggtagtgtattattgttaggtgccgtgtgactgttaatgtcatatgaaatataatttaatagtgttttccttgtcatggatgaggacccattgagaccctatatcagaataaggatgtgtatgagatgaatcttatatcataatagatataagtatgaaaatagggatgtgtataacttcatgagaccgtgtccaacaaggacctgtatgtggttctgtacgccaaatttacaggacgccgagctcctttgttggtccagcaacggacggtaaagcctccggtaaaataccggacgctgcctgcgcatgctacatttagcgtttcactgtgcgtccgctacgcagccggccagcaggggcatagtgctgatacgacaaggatggcccacatgcagctcgtgggaccaggagctcacaggaggaggcaacgacattggaacatgggtcgggcccacagttgtcaaaaaatatagaatataggatatagaggaggaaatttagagaacgctgctggagatggtagagatatagaggatgtaatattttagagtgtactgtaaaggacgaaaaatatttttttagaggatgaaatttaaaggacgttgctgaagatagcctgaggatgagtactagatgtctggagtctgaacctggtggagaattccccacagaaggagaaggaaaataaactagggtttagccggggccacacggcaggctccacggcgtggttatgtccgcctttattctccccccactcgtctgcttcgcctccacctatccgccgcctcccaatcatcctgcccccaaactcccaccccgcagcatccccacgccaccacacctcgtcgcgtcgcgtcgtcaccggcgtgaag

SEQ ID NO: 101 - DNA, 2509 bp, Zea mays
gctcgcatcgccatcccctcccctcccctgtctccaagccaggaatcccatccccaccccaatgtcgcagttctgctcgcgttggccggatctgtgaatgaagaacccacggttccacgacctcctcttcgtggaagcctaaaaggcatcacccccataagcgagagggaaaagacacattcctatatattctcttagtttgtccgctgttgtctagaaacatcatgtaatgaggctgggaaacgatcccacggagtgctcccgtgtccgtcgcctcggttcggcagaggccagcaaccgcggcacctggtccacagcagcagccaccacgactcgctagggctaggccgacctagatgatatgcagtgagctgatgggagggatgggcgagcaagaattggtacagtaaccgggagacgatcttgatttattccttatgtcatgaattcctttttatttacacccacactttctaactttcgtacaatgattcgtatatttaaaacaaggctaacttatgttctcatgctttacgaaccctggcatatgtcgcaaaaaatccttacctaaagaactaactctgcagcctcttcaagctctagatttcaattcttatggcctaagaagtgtttttttatttcataatataagctttcacaacaatctaattcttggagtcagattctataaatacccaacatttactaacctacatttttttttcaattggtgccatgaccatcacataatgttgatgagctattccctccaagttgctgattgcatgtggattaccatgcatggctatttgctatttggttgtctcgacctttcttaggatctattggatgtaatacatattatcattatttagctaatatttgctaactactacctagcagagtggatagtaggttgtggtgtttatatccataactaatgggttaattaataattggagagtaatgttcctgttagcccccattgtttgggtagatagtaagataatggggatttagaaacaatctaaagtttattacaatctgttatctagacctatttatatccatagagctaaagtttagcagattgctacatcctcattattagtttggagccaaacatgtcctgattgtataatttaaatgtttataggagtaaccaatttgttttagctttgctattttacgagtgtcaagatgcttaactatttcatacttgctttgtaggaatgttcgatgccgacaacatcttgctctaccagaaggtaccagctccaaatcaagaaccaaaatttaggaaaaatacgaactgcaaccttatccgtcatctttagtaattcatgtgtttatcttatttgcaccaagaactatgctggaggctataaaactatgaatgttatttgtgacatgtaaataatactagcttgtacatgcatctaaatgcatataagaaacacaatgcaccttttgtttgcattccatgtaaattataaattaaatccaaacattgaaaaattacaaaacacacacacacaacactatgcgcgcatgggcgcgcgcaagacactagtacataataataacgatattgttcgcttcggattaaattaaaccaagcgagtatgcgtgcatgtgtacgtcggatgctttgtttgttcatttgtggcccgtgaagtaatatttgggcccaatagcccattcatccatgtcctaaccctagggcgcgttccttataaaacctatctccattctgttctcactctcagacaccagacgcagtcggctgccgcagactggtagtagccggcgcgccgtcaccgtatcctcagatcagaggcgagcagaaaccacaccactctactgacgcccgacgaggtacacttccgcgcgcgcgcttctcttccttcttttttcgctcgacgaggtactctgcttcacgcgcgggcgcgcttctcttccttctcttttcgctctgccttgagcctgttcgtttgatgcccagatctactaggtttgtcgatcgtcgttatgtgtgatgagctgagccgattcatgcactgtatttttaattaagtgtttttttcctccgccgctacctttattgtctatgtatgaacttgcagcttacaactggttattgagccataaattgtaactgagtttccgagatctataatattacgtggctgaggcgcttcatctctgttttgtttgtatgacagtaggagtactaatccaagtttagcttccgcttcttcatctacctttagtatgtatttcgtatataaatacgattgcagtttgcaactgattctcggccatagatgattaccgttgcgttgttcatcgggtctagtttcggatctctgatgttgtgtgggtggggtacttcgacttgggttttcctgccctttgtttgattactggtttattgacatatatttatctattgactttttatctgctatgtttgatgtaagcagcagtgtaacattttccttcagcc

SEQ ID NO: 102 - DNA, 2825 bp, Zea mays
cggacagtccggtgttacaccggacagtccggtgaattatagcggagtggctccccaaatttccgaagctggcaagttcagagtggatcctccctggtgtaccggacactgtccggtggtgcaccggacactatccggtggctcaccggacagtccgatgcgtcagaccaggacagccttcggttgtcttttgctctttttatttgaaccctttctttgactttgcattggtttgtgttgaacctttggcacctgtagaactcataatctagagcaaactagttagtccaattgtttgtgttggtcaattcaaccaccaaaattcatataggaaaaagtttgaccctatttccctttcaagagtgcgcgacgcgccctgcgcggctgcgcggcctgcgcccttgtcgcccttcctcccacgagctccagcgcgtgcgccgcctacgcggcctgtgccctgcgcccctgccgcccttcctcccacgagctccagcgcgtgcaccgccgccaccttacgcccgtgcccagcgacccagctgctggtcctacctaccgccgccgtgagggcagggttatccggcacggagactatatgccacaagtgcggccgcaagagcacaactctaataatattaagtttgttttggtcaaaaattgtttgtcttctcttttgttggtttgctggtcatatttgattgtatttttccaattttaggcttttgtgtatttcggactcgattctgtattctgagttcaattatgtattctaggctcgattttgttttttgagcccaaaattgtatttcgggccaaatttgtatttcgggcctttactattttcgggccgcccgtttaaagcccgacacatttagctgaatacgggccggaccgggccaaggggtcagcccgtgggtcggtacggcacgacccgaatttaatattgggccgagccggcccgaaattaaacgtgtcgagccttttcgggcttgagtcgggccgggccgggcggcccgaatgtacacctatagccatgtctagcgagccgacccgaggcacgacccatttaatagtgtttaggccaacccgtcataagtgtcgtgtggtgcttgggccgtacctcggcccgtagtgctggcccggcccgacacattattttttattttaaaaaaatcatatatacatatgtacaatttatatttaatattataaatatctgaacatgatgttgtactggttagatagctttgttcagtgtcttctacccttcttttagggtgtggattcaaactccacctcctacaggcccgacacgtttaattttgggtctggcctggcccaatattaaatttgggtcatgccgtgccgacccacgagttgacccctcggcccacggtccggcccatattcagctaaacgtgccgggctttaaacgggcggcccaaaaatagtaaaggcccgaaatacaaatttgggcccaaaaacaaaatcgagcctataatacataattgagcccagaatacagaatcgagcccgaaatacacaaaagcctaaaattggaaacatacaatcaaatataatcagcaaaccaacaaaagagaagacaaacaatttttgaccaaaacaaacttaatattattagagctgtgctcttgtggctgcgcttgtggcatatagtctccgtgccggataaccctgccctcacgacggcggcaggtatgaccagcagctgggttgctaggcacgagcgtaaggtggcggcggcgcatacgctggagctcgtgggaggaagggtggcacgggcgcagggcgcatgccacgcaggcggcgcacgcgctggaacctggagctcgtgggaggaagggcggcaggggcgcagggcgtaggccgcgcagccacgcagggcgcgtcgcacactctcgctgtctcgcgctggagcctagaactgggggcctaggaggctgggacggcggtcggacgggacacgggagtaagagcgactcggcattttaggttttttgagcaacagggcaagacaaagctaaatggaaatgggcctcgccttcgccttaggctcgtggacaacttatgcgctgccgctgcctgagctgagcctgactgcctgaggaccaccgactcgccaagtggtgcgctgccgctcggttcgggcctttacgtgccggttaacgggccatttcaggcctgcttaaacgggccgggctcgtgcccgcccgtgagcctcggcctcggcccaagcatggcccgatacatcagaccaggccgatccgacccaaaataattttatgtcgtatcgtgtttggatcgtgtttttttttcgtgcttcgtgtcagcctattaaacccggaccaaatgtacacctacagtgccgacttccttctcccgttctccgctcctccgatcgacgatggccatcgctcaagctcagctgggccgacacaatcacacaagggtcggtccacccacattcgtacgcgtgcttgttgtctctgtcagccatcaactctccagtgagctgcgagcctacaaggctgtgggcagtgccagcctcaacctcgacctcccccagtcccccaccgaccaccggcctcctttcccgcaggcacgggtgcacggcacgcggtttccactcgcttcgtccgcgttcggatcgccctcaggtcaaccaccactcctcccctctgctcctctcagcatctcgcgcttcagatctcgcccaccgatctggaactggaattccctcccgatctgtatgtatctcacgcacgcttgctcgcgttcttggctttgctcccacctctctctagcag

SEQ ID NO: 103 - DNA, 2680 bp, Zea mays
atgatatataaccacgatgcaatgcaataccaatacaatcaactactgagacctgtaatattgtttttgttagacagaaaaatcgtagtttcaataatgtttccaaacattttatcgatgggctctagcctgtttgtttcggtggctactttgctatagtttgtttaactttttctatctaatattagttctttaatagtaaagaaatcttaggcaagttgtaacacaattagtcgagaatcaagcatgcctctaatcctctagtgttatttttttgacaaattgtatacccgctatttttgataaaattatatatccactaacaaattgcttatttccttgcctcctaggatggtaatggatcaccatccaaatatttcttcacgataagttaggaaccttaattaattttagttcaaaaatgaatatgaataagatcctaatctgattcgattcttaaattttatagtgtaaaatgtagagcccattacaacacctactcctagcaaaatatgcacatcttgtcataaattttgctctactctttgtattgttgtatgtaatgaataatctttatatatatatatatatatatatatatatatatatatatatatatatatatatatatgtgtgtgtgtgggggggtgtgggggtgtgtgtattgatgtctcttggacaacaagattacacaaaacacaattagaataaaaaaatatcctcgtgtatataaacttgtccgtataccatattagaacacataaattttaggcaacattttttccatcaacattcttcaatcatcaaccaaaatttacggatacacaagataagagggggtatgtaaggttgtacgtaatgggctacatgataacatcaaagattatgcaagcaaatctcaatccaccaggcgatcataaacatcatagttcacatgcttcagttttaaagccatcgtagttcccgtgcaaagacaaaaacattagaattattcaatacaagttgcacaagatagttcaataaaatttaaaccacaatagtattatccaacaaagctagttcataccattatagtttctagtaaacaagaatagagaacatatattaagcaaacagaccacataggataaggctaaggatgtatttttgtctattgttttctgtgacatcgatctcgtttgcacgagtaaaactaaaacatgagaaaattccgataaaaaataggaatctagaaatacgaacggaaaacactaaaccatttttattcctgtttctaaaatatatcatctcgtttctgtttttctctgtaaatatgaaaacgatcagatcatagttaaaacggaatacagtaccggacgaaacaatatttctctctcgtttcccccttatagcatctccaaaagctccccagaagtctcccctaaatctatttttttggaaaaacacaaaaacatgtctccaacagttcctctaaagcgcccccaactttttcatagcccttaaaactccctcatttgtagctacaaatgaggggttttttgggctccccagaaacaaactgctgctttaagatgtttggttgaggagccaagtagaatggagtcgtttcatccctgattctaggaacggagccgttctgttctgtgtttggtaatctggaacggagcggctctgttttttgtttggttgcagagtgaacggaacggagcgtgactgtgagagcgggatgagaacggagcggctccgttcggttgattttttggagcggaatggttccggatttgaggagaatattccataattggagtcattccgttctagttcctttataaccaaacagcaacaaaactgggatagaatggttccgttctacttggctcttcaaccaaacactaactaagggacctgttggagaaatgattaaaatttaccctcacttattatttagatattccttaaaactaattttgagaagtcgttttatggagagctcttggagatgctcttagttcgtagatctgattgtgtgtatgtatgtaagcatatgcgtctgtactacgatccacggtaaaaaagtcacaaacatataataatagcgtcattcaataaattgataacgtaaagtataaatgaacttttaactctgtttgagtaaacaactcgtgcagagactgcaatgaaatctattattttttctaaaataattatacaagttgaggaaatgctatttgttccactaagcgacgatgtattttgttttttaaaaaaatcgacgaggtactgctcggttattattttcacatgcaccgcgcgttgtttttgggccggcccatttgtattgcgaatttgcggagacgaatatgaccgaatggagtttagaaagcccagctcacttaggattgtctattttctcaagaaaagagagaatgggcccaaaggcctaaacaccaaaacccgatccgcttatgggatgtcatggacatggagtctgggaccgtccggcagatgagacgacagccgtcggatcagaaaccctagcccgggaggctctccctattaatacccaccctgcaccccgcgggaggagtctttcctagggtttcgtcgcttccagccgccgccgcgtccgcctcgccaagcgcagcagccgccgcagcacatcgctctctcgatctcagcc

SEQ ID NO: 104 - DNA, 2586 bp, Zea mays
ctaaccctaatgggtcggcaacccaacagtggtgccccccacacaatataacatccacccgtagacgcaacaggggcaccacacatgatgagactatagtagaggccaaaggtaggagccgacaagttgaaatccctccatagtcgcagcatcgtgagggtgcgaatgttgcggcaggagaagagaccagtatggattccgagaaggctatagcccctagatgccgagttagccgaagtcgaggtggccgtggtcgggagacacgcattaggagcctgttctttggaagggttcgacgttcgagcatcaatgatcggcagggcgacacaacaaaagagcaccggcaggccgacctttctgcttcttcgttcgtccggacgttaaggagacccgccagggaggtcgacggcagctcatgcgtctgcatcgatcatggtgtccgcgcccgcggcagaatagaaggggaacgacggatccgaccagggaggccactggagcgatggatccggccgagaagacgcgatccggccaaagggacgacagatcgagccgagaaggtcacaacaacgtggatccgggcgggaaggccgcgacagcgacggatccaacgaagacgatgaaggggagggtgacggggcggttccagctggacatgggcctactccggacctagcaagggttgtcgacgctagcgacggaaaatgctcatgaggttggcgcaactgggtggcggcggccagccctggacgcggcggctgcgtggatccgggcggcgctgtagagccttaggagggaggggtgagcagcgcagggccctactcggccatggacgaggagtcaacaacatagaaggagagagagagccactgtcgtgggcgcctgctgcggtggtggcgaggccacccacaccacaggttgtcgcggcaaggtcgcccacgcccgctgcagcggcagtagggcaaagaagcgtgccccgcgacgaatctgggcccacgagcagcgccgtggttggatctaggcaggcgagcagaggttgccggcagggaggggtcgtcgcgccaccaggttggaggtgaggggtggccgcactgttgggagggggtggcgcgcccatcgacacgagcggctgtagctgcgatcgtgaccgagagggggggtggggtgggcgcgcggctgagggcagccgcagccgcaagcaggcgagcccgcccaccgccaccactccacttgagagcgagcaagcctaaggagggcggtcgtcggggcaacgccgagccgcgggcgcacgcacatcgaggagagcgcgacacgggctcacgagcgcgtggacgcggacgcgcgcagggtaggcagccgacggcgcgggcgtgcaccgcgaggcacgagcgcgcgtgtggacggcgggtggcaccgcaagggtctccggcgcggattcagcgggtgggagagtaggggcacagggcttggcggccagggaaggcttggcctacggaggggaagggaagctgccccctgcccccaggagggagggttgagtctcccgggggtagcagctaggaagacagtggctggctatgggggtgggtggcgcctgttgtgggttggggaaaccctaatcctaaatctagtatgataccatgtagaatgtagaagtataaagtgtttgatatattgatatgagaggtttgctacgacaaacaatctattagggtctccaagttgcagttgatcagtgtgaggcttgctacgacattcctccttttttttatcagctgaagcagtacacaggaacagtgtttcttctcctactcaaccagcggcagcagctgcggctacagcctacgagcgtttttgttgggcaccggtgccgctggttgctaaggtatatagagctagaatggcatgacagggctatgttgctgctcctttcagattcaccatgtatttttgggctgtcatctatgcaaatgtgttagtttgagtgtagcgaatcttacaacaaaactttcttgactccacccttttacctctaaatgttgcttgacttgaaggtggactgtagcctgtagggtagtcctgtactagtcacgagctctaccgttcagccctcatttttgctgccagggtgaacaataaattccaagacgaaaaaaaacatcatctagcagagtgtaaagagtaaagacgaatccaaggtaccagcatagatactattggaattccaaattttggagaacaaaactcgtcagagtggccaaacaatacagcggatgctgctccagtacaaaaaaaaaaaacaggcccatcaattcatgaactcatcactcaccgaacatctctaccattctagcccaccaacaccgacgggaggcccatttgtcccagcagcacgctcgaaccgatcctggccatccatcccagcgacaagacgctatcggcccgtccaccggctagggtttccccagagttaaaaggcccggaggaggcgcccctataaacccttcccttctgtcgctgctcccacctctagcccgacaggtgaagccgccgccgctgcagtgtccatagccaccgcaggagactgag

SEQ ID NO: 105 - DNA, 2552 bp, Zea mays
tcaaaacaagagacaccaagttgtggtgatccttgtagtggacttagtgtcccatttgattgaagagaaaggctcactcggtctaggtgaccgtttgagagagggaaagggttgaaagagacccggtctttgtgaccacctcaacggggagtaggttcgcgggagccgatcctcggtaaaacaaatcaccgtgtcattctctcttattcgcttgtgatttgttttcgccctctctttcggactcgtatttaattctaacgctaactcggcttgtagtgtgtgattaagtttgtaaatttcagttttgcctattcaccccctttaggcgactttcagtagtgtagtggtagctacgagcacatttgcttaagtggcctcgggtttgaatcccctaagggccatttatgttttttaacccagccttagctaggtgtgcgatgtatatgggaatgggctttgcggggatgggagaatgaaaaaggcaacaaggaatgagaatgatagaacagagagtagtggcagaacatgagaatggactgtgcggggaggggaatgagaatggtagaacggggaaggagggaatgggaatgacagaacacggaatggcagcaatatatataataggtgagtgcccgtgcgttgcaacgggaacatataatatcatgataacttatatacaaaatgtgtcatacataaattttgttattttaattcagttgtttcactactacattgcaaccatcagtatcatgcagacttcgatatatgccacgatttgcatggtcttatcattgaagagcacgtgccacacctgccggtagaagtttcctcgttagtcatcaaacatgcaccaccatacacgcttgcttaaataaaaaggcaagtgtgtgtgttgcgaagagaattaaagacatgccggcacaaaagctaccccgacgataaagagtggtcattgttgtcggtcctcctctgcgtcaccttcagcgccgagatgacaccacaatccttgatatagtagtcgtcgaacgcgcgcgacatggcgagtaccgatgactcttggctgggctgccaaacgaagtgcaccctgtgctcattagtgaggtagtacacctagccgttgcaccaccggatgtgctactcctctacatacatcttgtttgaggacactcacacaatgtcagcaacgaccctcgtcccagcgcacaagaattcatggccggtgagtagcgacttacgtggcaggtcgggcttcaggtggatgatgagctggacggcgtgatggcgccgtcgtcggatgcggtgcccagaacaacacgagagtcgccggcgttggcgacgaccatgaggtccccctgtttgacgatggaaagcacggtgcaaccgctctggaccgtgttcaagcggcggctgcgctggaggttgccgtacatagcgacgcatacggccacgtaggactgcttcgagaggtcgaactgacagtcgccaagcttcttctcatcgtcgatgagcgacgccaacgcgagcgcctcctgctagtggtgtttgttcggggtttccaagtaagaaacatggattcatttttgacgttggtttataaaaatgactcaaagtcagatccatgaaaaaatattacggagaaaaatgtcacacatgcaaaaaaaagaatttaagttgaaaacattattcaaacaaaaggaattgcatgcaaagctcttcttaaaatactactccctccatccaaaaatataagtcaagaatctcggtgatacttatctattgctacacatgtgcaatggtagcaggtgggcttcgtgagagatgtagtagatgtttttattataatagatgtagatataaacacacatgtagtgtagtggtagccaagtggtctcgagttcgaatccccttagggccatttatgttttttaatttaattttagctaggcgtggaatgtatatggaaatgagaatgagttttgcggggacgggagaatgagaaatgcaacaaggaatgagaatgacagaacaaaaaatagtggcagaatataagaatggactgtacggagaggagaatgagaatggtagaacgcgaaaggagggaataagaatgacagaacacgaaatgatagactatccttagtgtcttaataagtagtacatatgttggactaaaggccccaagagtaacagagcgttaggtatgtatcttcttacatagcatttctttatttaattgacctagtgagtactagtgagtattgcactaactctaatcggttaattcaggattatccgaatccgaatccaattttccggtacccaaatttttagatacttattttggatacaattcatcatatatctactttcaaaactcaaattttgcaaaattgagttacctgacctaatttttttttaacccgaatgtccacacctcgttcggtaggtcccactttagggcgccagtctataaaaaacggcggtctgccctaaagccctctctcccaaagccatcttccttccgcggactagttttttctgaagattcggcg

SEQ ID NO: 106 - DNA, 3137 bp, Zea mays
tccaagggatgacaacgaagactcttcgttgaaaaagaaaacggtcaatcaaaactattcttttgattattctcgcatcccttataattcgaatgcccatttactatctaactccacttggaaaacccccacactttgatggagaagactattcattttggagtcataaaatgtgtagtcacttattttctctccatcctagtatttgggaaattgttgaaaatagaatgcattttgaaagggaaatggaattaaccatttcttataatcggttttgatggttgatgtcgaacacaaatcgcgtggactaactagtttgcctagatatcatttatctcaggtccataaggttcaacacaaaccaaaaaaaaatcagttagggactcaaccaaaaattggagcaagacatagagtgtgatgatttttggcgcaccagacactgtctggtgcaccaggccaggcgcccttcgaacaggccactctcgagaatttagaggcgcgcttcgctataattcgccagactatccggtgtgccaccagactgtccggtgagccagcggagcaacggctccctgtgcgccaacggtcgactgcaaaacgctacagtgcagaacagtgccgtgacagaagtcagacagcagaagtcagaggtcaccggactgtccggtgtgacatcggactgtctggtgtagcaaaagacaaacacctccaacggtcaactgctccgaaccctaacggacgcgctgacgtggtgcacactagacagtgaacaatgactgtccggtggcgcacccggactgtccggtgcgcccatcgtcagcagcctttgccaacggctaggaagtggttgggggctataaatacccccatccacctcattcattggcatccaagttttcataagttcacattcaatacaagagatataacattcactccaagacataattccaatgaccaaaacctctccaagtcctaaattcaactcaaccatttagtgacttgagagagggtttttgtgttcacttgaactcttgttgcttggattgccttcttcctttctcattcatttctcaagtgctttgtaaagctaagtaagagacaccaagtgtgtggtggtccttgcggggtcttagtgacccgtgtgattaagggaaggctcactcggtctaagtgaccgtttgatagagagggaaagggttgaaatatacccggcctttgtgacctcctcaacggggactaggttctttggaaccaaccctcgataaaaacaaatcatcgtgtctgctcgctttgattctcgtttgatttgtttgccctctttcctctctctaacgtttccttgctagtattaaattgagttcgctcccatacgtcatctgcatcctttgagcaactcttagcaagagaaacaacctttcagacttgaattaaattctaacgctaaccccgacctttagtgtgtgtttaagtttataaattttaggcttcgcctatccaccccctctaggtgacttttatatttcgatagcactgataatcctgtattcataaatgagcaaatacataaaaatgcccaagccattactgttttgctagcatctctatgcagggatgaatacaacaaagtaagcgacttggacaacgctaagcaaatatgggatacccccaagatctctcacaaggggaatgatgccaccatgatcaccaagatggaactggtggaaggcgagctggggaggttcgccatgataaggggagaggagccaactcaaacttacaataggctcaagacccttgtcaacaagattcgaagctacgagagtataagatggacggatcatgatgtcgtccgactcatgctaaggtcatttaccgttatggatcctcatcttgtaagtcttattcgtgagaaccccgagtacaccaagatgacgtccaaggaaattctcgaaaaattcgtgagcgggggcatgatggtgaaggaagcgaggtatgtggacgatgctctaaacagatcgcttcctctccacgagccacaacccgttgctctcaaagcaactagcagcaaggaagcgctacacaacaagtggaggctgccgggctcaacaaggatgaaatgacgcttataatcaagcgcttcaagaccgccttaaagggacgcaaggagtacctcaacaagaacaagtcaaggggaaagcgctcctgctttaagagcggtaagtctagtcattttaatagcataatgtcttgataatgacaatgaccagcaggtgcccatatgtgattcttaatagtttaattagtatatagtatagatatagattatttcatgacatacattaaaccgtgatattataaattgtagttttgagaagaaaaaaaatccaaaacatgccctaatgtgctggccactcgtaatccgactgacaaggctcgaacaggcgatgtgcggaattttgggccggtgcttcgccccgtgcagcccaaataaaagcccaggaagcgcttgcggacctagggtttacgaggacgcccccagtataaaataggcgaggggctgcatcccacagccgccactgcaaccccggaacagagcgaggcgacgccgaggcacctcatctccggtaagtgagatcccttctcttgtggcattcgacgatgttttgttgggtccagtatcttgctgtcggctgtattttttgtggtaaagttagggcggttcaagctgatgctgattagcgttcaaatcccagtgctcagtacttcactagtcgatgcgtttgaatgattcgactggtgatttgcggggcgtactccgcatgattcgtcgttggttaggtagctgtggcattctcgcattttatttttcacttgttctgtgttaaaggttaattgcagccttgttcttagctcagttacatctggtagcgaaatggtgcgtagggctatccatcttagaaaaaccgacccaaatgttcagctttagataagagttgttgcatattgcttcctcatgcaacaagcaaccgtaactattccccagatggtcaggtgatcagttttctccctgtttaatgttgcaagggaatctcacatttgccagttgatattttcgactatttaggcgaagggaa

SEQ ID NO: 107 - DNA, 1682 bp, Oryza sativa
atccctcagccgcctttcactatcttttttgcccgagtcattgtcatgtgaaccttggcatgtataatcggtgaattgcgtcgattttcctcttataggtgggccaatgaatccgtgtgatcgcgtctgattggctagagatatgtttcttccttgttggatgtattttcatacataatcatatgcatacaaatatttcattacactttatagaaatggtcagtaataaaccctatcactatgtctggtgtttcattttatttgcttttaaacgaaaattgacttcctgattcaatatttaaggatcgtcaacggtgtgcagttactaaattctggtttgtaggaactatagtaaactattcaagtcttcacttattgtgcactcacctctcgccacatcaccacagatgttattcacgtcttaaatttgaactacacatcatattgacacaatattttttttaaataagcgattaaaacctagcctctatgtcaacaatggtgtacataaccagcgaagtttagggagtaaaaaacatcgccttacacaaagttcgctttaaaaaataaagagtaaattttactttggaccacccttcaaccaatgtttcactttagaacgagtaattttattattgtcactttggaccaccctcaaatcttttttccatctacatccaatttatcatgtcaaagaaatggtctacatacagctaaggagatttatcgacgaatagtagctagcatactcgaggtcattcatatgcttgagaagagagtcgggatagtccaaaataaaacaaaggtaagattacctggtcaaaagtgaaaacatcagttaaaaggtggtataaagtaaaatatcggtaataaaaggtggcccaaagtgaaatttactcttttctactattataaaaattgaggatgtttttgtcggtactttgatacgtcatttttgtatgaattggtttttaagtttattcgcttttggaaatgcatatctgtatttgagtcgggttttaagttcgtttgcttttgtaaatacagagggatttgtataagaaatatctttaaaaaaacccatatgctaatttgacataatttttgagaaaaatatatattcaggcgaattctcacaatgaacaataataagattaaaatagctttcccccgttgcagcgcatgggtattttttctagtaaaaataaaagataaacttagactcaaaacatttacaaaaacaacccctaaagttcctaaagcccaaagtgctatccacgatccatagcaagcccagcccaacccaacccaacccaacccaccccagtccagccaactggacaatagtctccacacccccccactatcaccgtgagttgtccgcacgcaccgcacgtctcgcagccaaaaaaaaaaaaagaaagaaaaaaaagaaaaagaaaaaacagcaggtgggtccgggtcgtgggggccggaaacgcgaggaggatcgcgagccagcgacgaggccggccctccctccgcttccaaagaaacgccccccatcgccactatatacatacccccccctctcctcccatccccccaaccctaccaccaccaccaccaccacctccacctcctcccccctcgctgccggacgacgagctcctcccccctccccctccgccgccgccgcgccg

SEQ ID NO: 108 - DNA, 2369 bp, Zea mays
ggcatccggcagccagcgcggtccttcccaaccactcgttcccaacccatcccccttcctcgcccgccgtcataaatagccagccccatccccagcttctttccccaacctcatcttctctccttttgctcggaacgcacacaccgcccggtctccgatctccgatccccgatcccctcgtcgatccaaggtacggcgaccatcctcccccccccccccccccctctctctctgccttctctagatcggcgatccgatccatggttacttggttagggcctgctaactatgttcatgtttgcgttagatccgtgcatggacgcgatctgtacacaccagacgcgttctgattgctagctaactcgccagtacctgggaatcctgggatggctgtagccggccccgcacgcagacgggaccgatttcatgattctctatttttttctttgtttcgttgcctagggtttcgttcgatcgatccgcgttattctttatttccatatattctggtacgatgttgatacggttcgaccgtgctgcttacgttctgtgcgcttgtttgccgggtcatttttaccttgccttttttgtatggtttggttgtggcgatgtggtctggtcgggctgtcgttctagatcggagtagagtgctgtttcaaactgtctagcggatctattagatttggatctgcatgtgtgacatatatcttcgtagttaagatgatgcatctgtatgtgtgacatgcggatctattagatttggatctgtatgtgtgacatatatcttcgtagttgagatgatgcatctgtatgtgtgacatatatcttcgtagttaagattatgcatggaaatatcaatcctttagataaggacgggtatacttgttgctgtgggttttactggtacttcgatagatgcatatacatgatctaacatgcttagatacatgaagtaacatgctgctacggtttaataattcttgagttgatttttactggtacttagatagatgtatatacatgcttagatacatgaagtaacatgctcctacagttcctttaatcattattgagtacctatatattctaataaatcagtatgttttaaattattttgattttactggtacttagatagatgtatatatacatgctcaaacatgcttagatacatgaagtaacatgctgctacggtttagtcattattgagtgcctatatattctaataaatcagtatgttttaaattattttgattttactggtacttagatagatgtatatatacatgctcaaacatgcttagatacatgaagtaatatgctactacggtttaattgttcttgagtacctatatattctaataaatcagtatgttttaaattatttcgattttactggtacttagatagatgtatatatacatgcttagatacatgaagtaacatgctactacggtttaattgttcttgaatacctatatattctaataaatcagtatgttttaaattatttcgattttactggtacttagatagatgtatatatacatgctcgaacatgcttagatacatgaagtaacatgctacatatatattataataaatcagtatgtcttaaattattttgattttactggtacttagatagatgtatatacatgctcaaacatgcttagatacatgaagtaacatgctactacggtttaatcattattgagtacctatatattctaataaatcagtatgttttcaattgttttgattttactggtacttagatatatgtatatatacatgctcgaacatgcttagatacgtgaagtaacatgctactatggttaattgttcttgagtacctatatattctaataaatcagtatgttttaaattatttcgattttactggtacttagatagatgtatatatacatgctcgaacatgcttagatacatgaagtaacatgctactacggtttaatcgttcttgagtacctatatattctaataaatcagtatgtcttaaattatcttgattttactggtacttagatagatgtatatacatgcttagatacatgaagtaacatgctactatgatttaatcgttcttgagtacctatatattctaataaatcagtatgtttttaattattttgattttactggtacttagatagatgtatatatacatgctcgaacatgcttagatacatgaagtaacatgctactacggtttaatcattcttgagtacctatatattctaataaatcagtatgtttttaattattttgatattactggtacttaacatgtttagatacatcatatagcatgcacatgctgctactgtttaatcattcgtgaatac

SEQ ID NO: 109 - DNA, 978 bp, Zea mays
gtgcagcgtgacccggtcgtgcccctctctagagataatgagcattgcatgtctaagttataaaaaattaccacatattttttttgtcacacttgtttgaagtgcagtttatctatctttatacatatatttaaactttactctacgaataatataatctatagtactacaataatatcagtgttttagagaatcatataaatgaacagttagacatggtctaaaggacaattgagtattttgacaacaggactctacagttttatctttttagtgtgcatgtgttctcctttttttttgcaaatagcttcacctatataatacttcatccattttattagtacatccatttagggtttagggttaatggtttttatagactaatttttttagtacatctattttattctattttagcctctaaattaagaaaactaaaactctattttagtttttttatttaataatttagatataaaatagaataaaataaagtgactaaaaattaaacaaataccctttaagaaattaaaaaaactaaggaaacatttttcttgtttcgagtagataatgccagcctgttaaacgccgtcgacgagtctaacggacaccaaccagcgaaccagcagcgtcgcgtcgggccaagcgaagcagacggcacggcatctctgtcgctgcctctggacccctctcgagagttccgctccaccgttggacttgctccgctgtcggcatccagaaattgcgtggcggagcggcagacgtgagccggcacggcaggcggcctcctcctcctctcacggcaccggcagctacgggggattcctttcccaccgctccttcgctttcccttcctcgcccgccgtaataaatagacaccccctccacaccctctttccccaacctcgtgttgttcggagcgcacacacacacaaccagatctcccccaaatccacccgtcggcacctccgcttcaag

SEQ ID NO: 110 - DNA, 3118 bp, Zea mays
acgatgttcttctttatctttgttttctttagaaaaaaatagggtaattttttttctcctctcttcattggctggtagctgttgccataaccatcacgatgacctggtcaattcttcttaccccaacacaaattcatcattcaaatgcgacgaaggatgaagtcacagtcactctcccgtcactaggagtgataacatagtctaaactttacactatataatttagggatcggatcgaataaggatcaaacactatttctatttattttttaaactaaaattaatttagcgttctaacaaattgtaaagaaatatttggatcacgatagatttgtgtttgtcaatttgccgtggttttggaaactgggagacaatagatttatgtttgacggggaggcaagcgcggactaacaccgaatggtggatcatgaggatccaaacaagtaactgagacactggaattatactggttcaggctttcgccctagtccaatgtagtgttgatcgtagtatttcttttgaggcgtgttagagcaggtgtgcttgtgtgtcgaaagaaagttgccttacccctttttatagctcaagggtgggttttacagtgggaacttgtattctactgggagtaggctcggcttgctgcctgcggatggtgagtcctcctaacgtcgttcgtagggtcgtgcaatgtcgtgcccctagtatggcgttccatcttgtccatttggtatacgagtccctatagcttgctcggtgccaacgttgtggtacctggcgggtcccgcgaagtgggcttacagcgaggttgagggttgtgttcggtactgcttcatctttcgtcataccccacacgccactatcaagcatgcgtaggtatacgcctagtatagggtattgtctcgtcctttccagtgtatgggccactgtagagactccggtgatgaggtctccacgactggaattgactgaccccacgagtcagtgagggtatgtccgtcgacgcacgcgggggtgttccatcgtgtctgccaaaaaccttttgctactgtatgtacggtccaaacgtggtttggtgatgttgcgtcttttcacgaccgtcgtgggccgacagcgtcgtcctaggttcctttcttgcggatccgttcggcaaggacttggtcattcgtcctgtctcgtagacttgctcggcagggacttggtcggtcaccccgtctcgcagacttgctcgtccgggacttggtcgttcgcccctcctcgcatacttgctcgacggggacttggttgctggtcccgtctcgcaaacttgctcgatgaggacttggacatttgctccgccgagtagacttgctcggcggggacttggtcgttcgccccgcatcatagacttgctcgacacagactcagttggtaaatgggccagagaggggtttgtgggggtatcccgttcttgggtacttgacacaattatttgtagtttttacctgttaaaacttcaaatatgatgttcatattcatatctttattggtatcactcttcgtgtatacatttatttatcctatgtacatgcaatgtaaatgatacatagtgcatattgaccttatttttaacatgtacttctttcaaagcaaaccacccgcgaagtgtcacaatgcatacatccttcggtgtcgagggacctcatcatgaggcccctgcccccctaagtctagcttccaatgtcatttaaggaagaagatgagtttcgaggcctttagggcctctgaggttctaccgaacaatctaggttatctttgtctcttagatcccctgcatcagacccctcttggacctcgaccttggagcccttcaaggttctgaagccctcttgagatctatggctcttaatgtgggaacccaagcttctctcttgactaagtacaagaatgctccacattgaggcatacaactagttgtaacccccgggcaagaagtaccatgggagtatggtcccatagccacaactgtctctacttaagacgaccatgtgatactaatgttccgaataaagcttttgcacatcacattaatgtgatggatgatattgtggtcaagcaggcatatggtagccaccacaaaggatatgaagcatacccaaatccactatgaggagtgtgtcgcgtacctatgccacacctaaatgtgctaatttacctgtaagcattataaaatataagcaattacaccgtatctgatggcatggactcgagtacataactatgatatgatatatttctcactgccgcaagatatgcatattacaatgacatgttcaagcgccattgtggtccgcgtagagtcctcgtctctaacaagatgaagtaatcgagcatgttcactacgaaccaacatgtgatcctcctcttcttcgagctataaaatattcatccagcttaaatttcaaaatatgtgtgtcagagttaaaaaaatattcgattcaaatctaaatatcagttctgtattcatatcctagaatattcgaatctatatttgaattcagattacaaggtagtgaattgtgacatgtattcgttcctatccgatccgtcgtttttgagcactaggtgcggtcactgtgacgcgtggacttggcttcgcccactgccatcgtggacccacgtcatcagcaagtgtccatatccaccacccgacccgacgaccgcttgccgtccgatccgtgtgctcccgagggcaaggatggcatttcgccacgcgagatatttttcggtggcctgcacaggccggcagtgcagcggccaaaacgaggtcaggtcagtcacgctgggccccgcctcacgctcccgtcctgctccgggtcccaacaaagccgtccccgggaggtgctcgtgtgctcgtagcgcggtggcgaccccgatgccccgcatattccactgggcgtccgcgccgtcggatgggatcaggacggccgcggcggccccgcgctcggctataaagacgctgcgggggacgcattccctctccgtgctttcttagaggtgggttggcttctcctccccctccggttcgggttcgggttcgtgaggttctccggggttcgggttcgtgggtgagcggatcgag

SEQ ID NO: 111 - DNA, 2792 bp, Zea mays; identical to SEQ ID NO: 98

SEQ ID NO: 112 - DNA, 2725 bp, Zea mays
tccggcgtgccaccggactgtccggtgcaccagcgaagcaacggctatccagcgcaacggtcgactgcaacggacgcctgcaacgctacactgcgcgaacagtgcgcgcagaagtcagagcagtcgccagaggcgcaccggactgtccggtgccactagaagacaaagcctccaacgatcagaagctcccgaaccctaacggttggatgacgtggttggcgcaccggattgtccggtgcgcccatcgacagcagccatccccaacggctatgtggtggttgagggctataaatacccccaaccaccaccactccaagcatccaagtttctagcacttcacattcaatacaagatttattgcattcactcctagacacaaatcaaaagaatcaaagcctctccaagtgccaaaaatcattccactcacctagtgacttgagagagagttttgttcgtgttctttgcgctcccgtttcttggatcgctttctttcttcctcattattgttctcaagtgacttgtaatcaaagcaagagacaccaagagtgtggtggtccttgcggggtctaagtgacccgattgattaaggagaaagctcatccggtataggtgaccgtttgagagagggaaagggttaaaagagacccggtctttgtgaccacctcaacggggactaggttctttataaccgaacatcggtaaaacaaatcaccgtgttcatccgctttatttcttggttgatttgttttcccctctcttttggactcgatatttgttctaacgctaaccccggcttgtagtgtgtgcttaagtttataattttcagattccgtctatccacccccctctaggcgactttcacatggccacgcccacgtccacaaactgaacgaatagatccctgtgaaccctgtgatgctcactttccacaaccatgccctatccccaatggtggtagtccatctgcaggaacacctagcatatgaaaataaaacataacaatcacaaataatattcacaaaaatatatctctaaatagacttgctaccaaaatatatttcgtcacgaatgttagtagattttattttttccgaagtagcagaattcatcagtttgcatataaatgcatcaaggtttgagcactgacgagcattgtattgtgccccctggatctactaacaccaagacgcactaccgcagcagcgcaggagcagacgagggagccagcccagcaggcatgggcgtgcttcggagcacgcaaagccttgaggcggaggtggacgagctgcgcgccgcgctcctggcgggcgggtggcaccgctcggctggccacgcggacgccaagcgcgctccccagggcgatgccagaggggccgcagcgcgcgccgtgtgcgtcactcgcggcatctccttcgtcgggttcgccgtcgtcgaccgcctcctccggcacgggtacaccgtccgcctcgcgttggagacgcaaggtaccaacgtcccgtccgtcctcccccacactaacctacccggctacttctctcgctcgctctgaagctctcgcgcccctcggcccggcctgggacaattggtttgggacaagggtatccggccgcgcggacagaggcaataagtaccaacggaatgtacctgtaggtgcgccagtgctggactcgagagagacagagctgcatccaacgtcggtgcctcccgcggtgcctcgcgccaggctaccagtacttccgcgcccaacaccacgccccaagctggttgatgcacgcccaacgccggtagttctatgcccccgtgatacaccgccgccgcgtccaacgccatgccccaagccgtcacccacgtcaaggctgcagacgtctccttcctcctccatgccgacatggtctacgctcaaatcgaagatgagctcaagccgcaacaacaaatttcggtgctcccaagcttcataaaggctatcttcggcgtcgttgggatccatggtggcacagaatcgagttgatgttgtagctggcggctagggtttgaagtggagaagaggtccggctggtggcatcctatcgtctattgagggttgggtccggtggcatcatacttgatgacaattgaaagtaattttaatcaacttgtcatgagtagtgagtcttttataaaaaataagctgaaataagcaccctttgatgagcttataggattatcataatctcaaatgctaaattatataattttattagataagttgcttgtttgtttccccactagcttatttacattggattatataatctacataaattataatctcaaacaaaaagtccttaatcagagatcagcgaggtctcacgagtgagaaggcgagagcttgtccaaacgagcattttcgggcgtgtgaacacccatttcagcaaagccgtcgttgtccagttcagcgaagcgcattctgcggctttggcgtgacccattctgctagctcagcactgagaatacgcgtccgctgcagcgttggcgtacaggccggactacattagccaacgcgtatcggcagtggcaaaccctcttcgcttctaactccgctgggccaccagctttgaccgccgcctcccttcccctccgctactgctcctccccaccccactcccccgcaggagcggcggcggcggcggcgaggtcgtaccccacatcggcgagcggcggcggcaccgccggaggcaaaggcaag

SEQ ID NO: 113 - DNA, 3773 bp, Zea mays
caatctccaaccctaattatattactgcctcatagataaggcatcaacacagttataggatggcagatcatgggtctaataatgtaaaccttcgtttagatgttcctaaacaaacacatcgcaagtcaaagttccagtggcatttaaaaccatcagatcagacatgtgccgcaaaaccaacagaaaaaatcgaaaatagataaattttcctcacacaaactcgcaccgcacgactatcatatcaatgtcctgatatatagaacacggagaaaatcgggtacgacacctttgtggccgagacgatgctgcccccggaaaaccgccgcctcgtctcgatccttctcttgcgtcttgaatcggtcacggcactgcctctgggcctttttttccagtccgcctgtgcataaatggaagttgggcggggccaggtgcccaggtgtggctgtgtgggtgattggggaaggttctagacttccaacacagcgacgtgtgagggggagcgggggaaggggatgaggtgcagggaggagcggagcgcgccgcgacagctccccacggtgtcgccgcccaaaagggagaggggcgtcgtatcagggggaaggggatgaggcggtggttctggaagcgtcgcggaggccggttccgtccactaacgtggagcttcgagcggagagctttgcgagcgagaagagacatcaaccggtgattgacgatcggatggttcgaattttttttgacgacgtggatggctttatcgttgccgtttctgttcggcttcaatatataggaaatctcatcctctgtccctaccgaatttttcatgggtgctcctcctcccaatgatgatccaagcatagacacacctccttctcccactcaagttcctaccaccaacactcctgcatcattcaattatccatactctcctccgtacccgtatggatatccatacggttttcctctgtatagattgtatgatgctttttccccatacaaggatgtccatgggtatccgaaacctgaatacctgattagaagacgggtatgggatggttcctttaccaattaatgggaaagaacgtctactcgtttggtagacgggtataggtggatactaccccatacccgtctacccgtaaaaaatatgctcgcaacataccaatattatcatctaataaagcccatcttaactagaaggaaccccttgttcgaatattatttgtttaattatcaagttatgtagtcatgtggtttgttatatttgaagttcaacttatttttatatgtttgtttgtcattctgagtgattggcatattacaatttaagatttttctagcggtacgggctacccgatggataaaattacctacgcggggtatgtgtacgagtaagattgtatattgtgagtgtatatgggcaactcgacgaacatatttttttggtggatacaagtatggaatgctattacctgtcaggtttatattcattgccatctctatccccatatggtgattgtcctcctacattcgtgacaattccccaaggagcaacaggcgacattgatgtcacttcgaacaaatctgcttactttaatgcttcataattttaacaacaaagaggatggaggaagacaacagataaaatatcgataaatacacatatttaaaaaaaatccacactattttaggctcacaatagtttttaaagtccatatttcttagatccatgaatggctactacactcaattaactctattgatggcaacaataaaaagagatcaaaattatgggtaaatagccaacacatataactccaccgcataagcgcgtcaccacaatacccaaaacaactaaagaaccgatggtcgatgagcgatcataagatcaacctctttaacaacatctacaaccgtttgtgcacagcctgattgagtgacccaatgaggctatgctgctttaagcggttaaggaaaatttccacaacaagcatagaaaaaacaagttggagcacacgtgacacgttatgccattagctcaagtggtgcgtaaaacacgatgataatgactcgagtgatgagagaaaaagatatgttcttaacttggacgacaatcaaagctcaatgacatatgaaagtatggacacactatgctctattgtcaccatagggcaagagttcagtagaaggcaaattgttcgacaacaagctatgttggtcttttgattctgacgagtcaatgatagcttttcaatgatactattaactttctaaaattaggaagcaacaaaaaatctacaaaaaacatactttttaacttttggtaaaagctaaacttttttgagttttttcccgaaagcacgcctagtcagccaccagctggcacgcgagtctcccaacaataggagggaccacctgtcatgctgtgggaccacgaagaaaaccctccagagacgacgatagacctccgtccatagacgcggtctaccgtggtccggacgctcccggccgcgaattcaggtcgtggcgggccctgccgacccaactactggtccagaggcctccacgcgagccgtgggccgtggtctaggagccgggtccgcctatctacttgacggtcacggaaacccggacccggtaggaaggagctataaagacaagccaaacgagggcatcccttcttcagccgcacgcttcttgttgccaaagaattccctcccctagccgccgccgccgccgctcgtctccctgagaggtgccgggaccgaggaactggccgagtactaggtagagaatcggtttttcttgtctcagcccggggtctgctgcgtctggtggtggtgaaggggagaaattcgtgagatctgttccggatcaggcgtgcgagctcgggaatcaggggtttcacacatagcttcgtcgatttgtaagttttttctagccgattcctctctttttgtacgttttttgttattagattcgagatttgttggatgtgttggtttatgttgctgcctttctagatttctcggtgtgaatgtatgagggttggatccttaggcatgaaaacatagctacatggagttagctcgttttcttaagtcacgtggtggtcggcgttatacctgttgcttgatgcgttatccgtgctatcgctgttcagatttagataggtggatcggtcatttgttcgttgtacgtattttgttacttcaaaattgatgctaaccctgttaattgaaaattgatggcagtggatacgctccacctttgtttagatttggaaacatggttaggaaatatgtgttcatattaggaaacgtggataggaaatatggctcattaccctggtactcggaaaagtaaggaaaaactattaacctttttgtttaggttttgattcgtggacaagatctataaattcactgaaaagacgcatacgatttcttgtacaggtgatatcatgccatgtggaaagtaaatgaaatcatacaaggctgatttttgcttttgttcccatcagatctgtgatttagttttgttttcccaaacaggttatgtttggtcatgtactcatgtgaatgatatagatctgttgctctaattagttagaaacatttattttgggcatatatctttaatggcataactgtggtacgttgtgatggtttattttagctgtcgtgcctggatcatcaacatcttgttttatcttttatgagaagaatttttgttcgatttgatggatgtgttcaatattttggtcttccatgcag

SEQ ID NO: 114 - DNA, 2784 bp, Zea mays
aagtatcaggctctgataccaattgaaagtcacctagaggggggtgaataggcaaatctgatttttataaactttaagcacaactacaagccggggttagtgttagaaataaagtcgagtccaaaagagagggtgaaaacaaatcacgagcaaataaagcgaatgacacggtgatttgttttaccgaggttcggttcttgcaaacctactccccgttgaggtggtcacaaagaccggatctctttaaaccctttccctctctcaaacggtcacttagactgagtgagcttctcttcttaatcaattgggacacttagtccccacaaggaccaccacacaattggtgtctcttgctttgattacaaatggcttgggaataagaaatggggaagaagaaaagtgatccaagcgcaagagctcaaaagaacacggcaaaactctctcttctagtcactaattgctttgagtggaattgggacttggagagattttgattcaatctatttgtgtcttgtattgaatgcactagctcttgtattgaatgtgttggctgaaaacttggataccttgaagtgtggtggttggggggtatttatagccccaaccaacaaagtggtcgttggggaaggctgctgtcgaagggcgcaccggacagtccggtgcgccactggacactatccggtgcgccagccacgtcacccaaccgttagggttctaccgtcggagctctgacaagtgaggccatcggacagtccggtggtgcatcggacaatcactgttcactgtccggtgcgccttttggcgcctgctctcacttctgcgcgtgcagtccgcactgttcactgttactgtacacttttgcagacgaccattggcgctgttagccgttgctccgctggcacaccggacagtccgacgctacatccgacagtctggtgaattatagcggagtggcattcccagaaacccgaaggtggcgacggtgcgccagaccagggcagccttcagttggttttgctcctttttatttaaaccctttcttggactttttattggtttgtgttgaacctttggcacctgtagaacttataatctagagcaaactagttagtccaattatttgtgttgggcaattcaaccaccaaaattatttaggaaaaggtttgagcctatttccctttcagccgccacccttgccgtcgtcgtcgccattgttgccatcgtcctcgttgcatgctcacgatgaggttgtacctgatggatcgcgcagagcatgctcacgatgaggttgaggtatggcgtgttctgtacgacttcatcctctgtcaatgctcttgcgtcaccttccatcatgcgtgggcatgcaccaggtatggcgtgttgtcatgtactttctggtacattggttgttactatggaggctttgttgctgtggtctcccttggtactgcatacatggcctaaacacggttgggtgatgttgtgtcttgtcgcggaagtcgtggatcgatggtgtctgtctgggttccctccttgcgggttcgcgtggcggggactcgatcgtccgtcctgcctcgtaggcttgcctgacgaggacttggtcgttcgtcctgcctcgcaggcttgctcggcgaggacttggtcgttcctcccacctcgcggacttgctcggcaaatgggtcgtggagagtatgggcctcactatgggcaccccatttcctggtacccgacatagtgactaaaagtgactaaaatgagctttttaccccaccacctgccctcccccacgtgagctatgcgctgaacgagcaaagaagtaaataggggtaatgcagtaaatatacgtagtagttaatgctctttagtcagatttagtcactgacaccaaacgagatactttagtgactactaaagtttagtcaggtgactaaagaaaccaaacataacccttagtgtgaaccgatttaggcacactagcatatatcccgtgttaacgctacgatcttgaagagggaggagtcaacgacggcggtggcgcaagtggataagttgacgacagcgacgatgacaatgtgagtgaggagaagggggcagtggggacgcagaggatggaagagggggagggggtggataggggcagcagggtgggaggagggagagcgcgagtgagggagagagggcgccgggacgcatgggaagaggaagagatgaatcaaataatattatatattaaatttgagtaagtaagagagatttatctaacgatccgaattgttggttttgatgatctgttaagtttaggtgtaatttgtttgatggatttagtgatgattatatgtgtgggggtgatttagtttggttggttttacaaaagtttaaattttttttagattatatagtggtatagatagtcaaacagtagcggcaatgacatcacggtaaatgcgcgttggcatccaaatgcagctggacacaggtcacacagcctaacggatatatcatatatgtgaatcctaactgtacactgtctgaagtggacgaacggctctggcttcggcgtgttacgtgtatagtaggccccttttgaacgaacggcgcgggccggggccaccaccagcatctgcggcagggagaatcgcgttggttcgacgcaaacgctacccggcgcccccttgcccttggggccggctattttaccgcacccgttctcccctctctaccgcagatcagatcacactcgtagagagaaggaaaaatatccccaaaccctagctcccgatctcg

SEQ ID NO: 115 - DNA, 1149 bp, Zea mays
atgctgagctcggcatcctcggccgcgggagcggccatggggatgggcggcggcgggtacgcgcaccagcccccgccacagcgcacggtcttcaccgccgcgcagtgggcggagctggagcagcaggcgctcatctacaagtacctcatggccggcgtccccgtcccgcccgacctcctcctccccgtccgccccggccccgccgccgccttctccttcgccggccccgccgccgcgtcgcccttctaccaccaacaccacccgtccctgagctactacgcctactacggcaagaaactggacccggagccgtggcggtgccgccgcaccgacggcaagaagtggcggtgctccaaggaggcgcaccccgactccaagtactgcgagcgccacatgcaccgtggccgcaaccgttcaagaaagcctgtggaatccaagaccgcctcgtcgtcgtcgcccgcgcacccgtcgccgccccagctgtccaccgtcaccaccaccgcgcctctcgagccccttgcagcggcggggggcaaggtccacggcctgtccctcggcggcggcgctgctggctcgtcgcacctcggcgtcgatgcttcgaatgctcactatcgttatggtagcaacaggtaccctctcggagctaaaccggacggcggcgagttgagcttcttctcaggagcgtcatcggggaacaactcgaggggcggcttcaccatcgactctccatcagataacaactcgtggcactccgccctggcgtccagcgtgcccccgttcacgctgtcgacgaagagcggggactccggcctcctgcccggcgcctacgcctcctactcccagtcccactcccacatggagccgccgcgggagctcgggcaggtcaccatcgcctcgctggcgcaggagcaggagcgccagcagccgttcagtggtgggatgctcgggaacgtgaagcaggagaaccagaaccagccgctgcggcccttcttcgacgagtggcccgggacgcgggcggactcgtggccgccggagatggacggcgcgccgcgggccggcaggacctccttctcctcctccaccacccagctctccatctccatcccgatgcccagatgtgagctgcatctcagaaaccagaactcttga

SEQ ID NO: 116 - protein, 382 aa, Zea mays
MLSSASSAAGAAMGMGGGGYAHQPPPQRTVFTAAQWAELEQQALIYKYLMAGVPVPPDLLLPVRPGPAAAFSFAGPAAASPFYHQHHPSLSYYAYYGKKLDPEPWRCRRTDGKKWRCSKEAHPDSKYCERHMHRGRNRSRKPVESKTASSSSPAHPSPPQLSTVTTTAPLEPLAAAGGKVHGLSLGGGAAGSSHLGVDASNAHYRYGSNRYPLGAKPDGGELSFFSGASSGNNSRGGFTIDSPSDNNSWHSALASSVPPFTLSTKSGDSGLLPGAYASYSQSHSHMEPPRELGQVTIASLAQEQERQQPFSGGMLGNVKQENQNQPLRPFFDEWPGTRADSWPPEMDGAPRAGRTSFSSSTTQLSISIPMPRCELHLRNQNS

SEQ ID NO: 117 - DNA, 1260 bp, Zea mays
atggcgatgccgtatgcctctctttccccggcaggcgccgccgaccaccgctcctccacagccacggcgtccctcgtccccttctgccgctccactccgctctccgcgggcggcgggctgggcgaggaggacgcccaggcgagcgcgaggtggccggccgcgaggccggtggtgccgttcacgccggcgcagtaccaggagctggagcagcaggcgctcatatacaagtacctggtggcgggcgtgcccgttccgccggatctcgtggttccaatccgccgcggcctcgactccctcgcaacccgcttctacggccaacccacactcgggtacggaccgtacctggggaggaaactggatccggagcccggccggtgccggcgaacggacggcaagaagtggcggtgctccaaggaggccgccccggactccaagtactgcgagcgccacatgcaccgcggccgcaaccgttcaagaaagcctgtggaaacgcagctcgcgccccagtcccaaccgcccgccgccgcagccgtctccgccgctccgcccctggcagccgccgccgccgccaccaccaacggcagcggcttccagaaccactctctctacccggccatcgccggcagcactggtggtggaggaggagttggcgggtccggcaatatctcctccccgttctcctcgtcgatggggggatcgtctcagctgcacatggacagtgctgccagctactcctacgcagctcttggtggtggaactgcaaaggatctcaggtacaacgcttacggaataagatctctggcggacgagcacaaccagctgatcgcagaagccatcgactcgtcgatagagagccagtggcgcctccccagctcgtcgttcccgctctcgagctacccacatctcggggcgctgggcgacctgggcggccagaacagcacggtgagctcgctgccgaagatggagaagcagcagccgccctcgtccttcctagggaacgacaccggggccggcatggccatgggctccgcctccgcgaagcaggagggccagacgctgcggcacttcttcgacgagtggcccaaggcgcgggactcctggccgggcctctccgacgagaccgccagcctcgcctcgttccccccggcgacccagctgtcgatgtccatacccatggcgtcctccgacttctccgtggccagctcccagtcgcccaacggtgagtcgcgtacgttcctgctggccacggaccgaaggtga

SEQ ID NO: 118 - protein, 419 aa, Zea mays
MAMPYASLSPAGAADHRSSTATASLVPFCRSTPLSAGGGLGEEDAQASARWPAARPVVPFTPAQYQELEQQALIYKYLVAGVPVPPDLVVPIRRGLDSLATRFYGQPTLGYGPYLGRKLDPEPGRCRRTDGKKWRCSKEAAPDSKYCERHMHRGRNRSRKPVETQLAPQSQPPAAAAVSAAPPLAAAAAATTNGSGFQNHSLYPAIAGSTGGGGGVGGSGNISSPFSSSMGGSSQLHMDSAASYSYAALGGGTAKDLRYNAYGIRSLADEHNQLIAEAIDSSIESQWRLPSSSFPLSSYPHLGALGDLGGQNSTVSSLPKMEKQQPPSSFLGNDTGAGMAMGSASAKQEGQTLRHFFDEWPKARDSWPGLSDETASLASFPPATQLSMSIPMASSDFSVASSQSPNGESRTFLLATDRR

SEQ ID NO: 119 - DNA, 684 bp, Zea mays
atgcagcagcaacacctgatgcagatgaaccagaacatgatggggggctacacctctcctgccgccgtgaccaccgatctcatccagcagtacctggacgagaacaagcagctgatcctggccatcctcgacaaccagaacaatggcaaggcggaggagtgcgaacggcaccaagctaagctccagcacaacctcatgtacctggccgccatcgctgacagccagccgccacagaccgcgccactatcacagtacccgtccaacctgatgatgcagccgggccctcggtacatgccaccgcagtccgggcagatgatgaacccgcagtcgctgatggcggcgcggtcctccatgatgtacgcgcacccgtccctgtcgccactccagcagcagcaggcggcgcacggacagctgggtatggctccagggggcggcggtggcggcacgaccagcgggttcagcatcctccacggcgaggccagcatgggcggtggtggtgctggcgcaggcgccggcaacaacatgatgaacgccggcatgttctcgggctttggccgcagcggcagtggcgccaaggaagggtcgacctctctgtcggttgacgtccggggtggaaccagctccggcgcgcagagcggggacggcgagtacctcaaagtcggcaccgaggaagaaggcagttag

SEQ ID NO: 120 - protein, 227 aa, Zea mays
MQQQHLMQMNQNMMGGYTSPAAVTTDLIQQYLDENKQLILAILDNQNNGKAEECERHQAKLQHNLMYLAAIADSQPPQTAPLSQYPSNLMMQPGPRYMPPQSGQMMNPQSLMAARSSMMYAHPSLSPLQQQQAAHGQLGMAPGGGGGGTTSGFSILHGEASMGGGGAGAGAGNNMMNAGMFSGFGRSGSGAKEGSTSLSVDVRGGTSSGAQSGDGEYLKVGTEEEGS

SEQ ID NO: 121 - DNA, 1983 bp, Artificial Sequence
  GRF4~GIF1
atggcgatgccgtatgcctctctttccccggcaggcgccgccgaccaccgctcctccacagccacggcgtccctcgtccccttctgccgctccactccgctctccgcgggcggcgggctgggcgaggaggacgcccaggcgagcgcgaggtggccggccgcgaggccggtggtgccgttcacgccggcgcagtaccaggagctggagcagcaggcgctcatatacaagtacctggtggcgggcgtgcccgttccgccggatctcgtggttccaatccgccgcggcctcgactccctcgcaacccgcttctacggccaacccacactcgggtacggaccgtacctggggaggaaactggatccggagcccggccggtgccggcgaacggacggcaagaagtggcggtgctccaaggaggccgccccggactccaagtactgcgagcgccacatgcaccgcggccgcaaccgttcaagaaagcctgtggaaacgcagctcgcgccccagtcccaaccgcccgccgccgcagccgtctccgccgctccgcccctggcagccgccgccgccgccaccaccaacggcagcggcttccagaaccactctctctacccggccatcgccggcagcactggtggtggaggaggagttggcgggtccggcaatatctcctccccgttctcctcgtcgatggggggatcgtctcagctgcacatggacagtgctgccagctactcctacgcagctcttggtggtggaactgcaaaggatctcaggtacaacgcttacggaataagatctctggcggacgagcacaaccagctgatcgcagaagccatcgactcgtcgatagagagccagtggcgcctccccagctcgtcgttcccgctctcgagctacccacatctcggggcgctgggcgacctgggcggccagaacagcacggtgagctcgctgccgaagatggagaagcagcagccgccctcgtccttcctagggaacgacaccggggccggcatggccatgggctccgcctccgcgaagcaggagggccagacgctgcggcacttcttcgacgagtggcccaaggcgcgggactcctggccgggcctctccgacgagaccgccagcctcgcctcgttccccccggcgacccagctgtcgatgtccatacccatggcgtcctccgacttctccgtggccagctcccagtcgcccaacggtgagtcgcgtacgttcctgctggccacggaccgaaggggtggaggcggcagcggtggcggaggctccggaggcggtggcatgcagcagcaacacctgatgcagatgaaccagaacatgatggggggctacacctctcctgccgccgtgaccaccgatctcatccagcagtacctggacgagaacaagcagctgatcctggccatcctcgacaaccagaacaatggcaaggcggaggagtgcgaacggcaccaagctaagctccagcacaacctcatgtacctggccgccatcgctgacagccagccgccacagaccgcgccactatcacagtacccgtccaacctgatgatgcagccgggccctcggtacatgccaccgcagtccgggcagatgatgaacccgcagtcgctgatggcggcgcggtcctccatgatgtacgcgcacccgtccctgtcgccactccagcagcagcaggcggcgcacggacagctgggtatggctccagggggcggcggtggcggcacgaccagcgggttcagcatcctccacggcgaggccagcatgggcggtggtggtgctggcgcaggcgccggcaacaacatgatgaacgccggcatgttctcgggctttggccgcagcggcagtggcgccaaggaagggtcgacctctctgtcggttgacgtccggggtggaaccagctccggcgcgcagagcggggacggcgagtacctcaaagtcggcaccgaggaagaaggcagttag

SEQ ID NO: 122 - protein, 660 aa, Artificial Sequence
  GRF4~GIF1 PRT
MAMPYASLSPAGAADHRSSTATASLVPFCRSTPLSAGGGLGEEDAQASARWPAARPVVPFTPAQYQELEQQALIYKYLVAGVPVPPDLVVPIRRGLDSLATRFYGQPTLGYGPYLGRKLDPEPGRCRRTDGKKWRCSKEAAPDSKYCERHMHRGRNRSRKPVETQLAPQSQPPAAAAVSAAPPLAAAAAATTNGSGFQNHSLYPAIAGSTGGGGGVGGSGNISSPFSSSMGGSSQLHMDSAASYSYAALGGGTAKDLRYNAYGIRSLADEHNQLIAEAIDSSIESQWRLPSSSFPLSSYPHLGALGDLGGQNSTVSSLPKMEKQQPPSSFLGNDTGAGMAMGSASAKQEGQTLRHFFDEWPKARDSWPGLSDETASLASFPPATQLSMSIPMASSDFSVASSQSPNGESRTFLLATDRRGGGGSGGGGSGGGGMQQQHLMQMNQNMMGGYTSPAAVTTDLIQQYLDENKQLILAILDNQNNGKAEECERHQAKLQHNLMYLAAIADSQPPQTAPLSQYPSNLMMQPGPRYMPPQSGQMMNPQSLMAARSSMMYAHPSLSPLQQQQAAHGQLGMAPGGGGGGTTSGFSILHGEASMGGGGAGAGAGNNMMNAGMFSGFGRSGSGAKEGSTSLSVDVRGGTSSGAQSGDGEYLKVGTEEEGS

SEQ ID NO: 123 - DNA, 124 bp, Zea mays
agatgagttttttgaaggtttgacagaagagagtgagcacacacggtggtttcttaccatgagtgtcatgctaggagctgtgcgtgctcaccctctatctgtcagtcactcatcaagcccatct

SEQ ID NO: 124 - DNA, 465 bp, Zea mays
atggccaggccgcagcaacggtaccgcggcgtgcggcagcgccactggggctcctgggtctccgagatccgccaccctctcctgaaggcgcggatatggctgggcaccttcgagacggcggaggacgcggcgcgcgcctacgacgaggcggcgcggatcatgtgcgggccccgcgcgcgcaccaacttccccgccgacgccaacggcccgccgccgtcgttcctctccgcggcgctcgtcgacaagctgcaccggttcaacctggcgtccgtgcaggccgcgcagcggcagagagaggcggcggcggcggcggcggcagcagcagcaacctccgcgcccgcgacgcctccgacgccgccggccacgcagtggggcggcggcggtaggtccctggaggagcagcacgtggagcagatgatcgaggaactgctggactccgacttctccatggagatttgctgctag

SEQ ID NO: 125 - DNA, 2529 bp, Zea mays
atgggaacaatggttgcagcggtggcgttgcgagggggaagcagcgatagcggaggatttgataaggttcccgggatggactcgggaaaatacgtgcgctacaccccggagcaagttgaggtgctcgagcggctctacatagattgccccaagccaagctcctcacggcggcagcaactgctgcgcgagtgtcctatactctccaacattgagccaaagcagatcaaggtctggttccagaaccggaggtgccgcgataagcagcggaaggagtcttcgcggcttcaggctgtgaacagaaagttgacggcaatgaacaagcttctaatggaagagaatgagcggcttcagaagcaagtctctcagttggttcatgaaaacgcgcacatgcggcagcagctgcagaatacttcattggccaatgacacaagctgtgaatcaaatgtcactacccctccaaaccctataagggacgcaagtaacccttctggactccttgcgattgcagaggagaccttcacagagttcctctcaaaggctactgggacagctattgattgggtccagatgcctgggatgaagcctggtccggattcagttggtatcgtggccatttcgcatggttgccgtggcgttgctgcccgcgcctgtggtttggtgaatctagaaccaacaaaaggcatagagatcttgaaagatcgtccctcttggttccgtgattgccgaagtcttgaagtgtttacaaggtttccagctggaaatgggggaacaattgaacttatttacatgcagatgtatgccccaacaactttagtccctgcacgtgatttttggacactacgatacacgacaacaatggaagatggcagccttgtggtctgtgagagatccttgagtggttctggtggtggtccaaatgcagcctctacacaacaatttgttagggctgagatgcttccaagtgggtatttagttcgcccatgcgaaggtggaggatcaattgtgcatatagtggaccatctagatctcgaagcatggagtgttcctgaagtgcttcgaccactgtatgagtcttctagagttgttgctcagaaaatgactactgtggcactgcgccaccttagacaaattgctcaagaaacaagtggagaagtagtgtacgccttgggaaggcaacctgcagtcctacggacctttagtcaaagactaagcagggggtttaatgatgccattagcggtttcaatgatgatggctggtctgtaatggggggagatggcattgaagacgttgttattgcttgcaactcaaccaagaaaattaggaataccagcaatgctgggattacatttggagccccaggaggcattatttgtgcgaaggcatccatgttactgcagagcgtcccaccggcagtactggtacgatttctgagggagcatagatctgaatgggctgattacaatattgatgcgtatttggcttcatcattgaagaccagtgcgtgctcacttcctgggttgcgacccatgagattttctgaggggcagatgatcatgccacttgctcacacagttgagaacgaggagattcttgaagttgtccgccttgaaggtcagcctcttactcatgatgaagctcttctttcaagggacatccaccttctccagctttgcactggaatagatgagaaatctgtgggttcctccttccagcttgtgtttgcaccaattgatgagcatttcccagatgatgctccattgatttcttctggctttcgtgtcataccacttgatgtgaaaacagatggtgtatcctctggtaggacgctagatttggcatctagtcttgatgtgggctctgctgcaccccaagcctcaggggaatctccagatgactgcagtttgagatctgtgctgacaatcgcctttcaattcccgtatgagatgcaccttcaggacagcgttgcagcaatggcccgtcaatatgttcgtagtgtcatttctgctgtgcaaagagtgtcgatggctatatctccctcccaatctggtctaaatgctgggcataggatgctttctggcttccctgaagctgccacacttgctagatgggtttgccagagttatcactaccatctaggtatggaattacttaatcaatcagatggagctggtgaagcattgttgaaaatgctctggcatcatccagatgctgttctgtgctgctcctttaaggagaaacctatgtttacgtttgcaaacaaggcagggctggacatgttagaaacatctcttgttgccctgcaagacctgacgctagacaagatcttcgacgagtcaggaaggaaagcactattctcagacatctcgaaactaatggaacagggctacgcgtacctgccgtcaggcgtgtgcatgtcaggaatgggccgccatgtttctttcgaccaagctgtagcgtggaaggtgctcggcgaggatagcaacatccactgcctggcgttctgcttcgtcaactggtccttcgtgtga

SEQ ID NO: 126 - DNA, 885 bp, Zea mays
atggaggacgtggccaacgcacacatctacgcccacgcccaccggagcaagcgtccccagtcggccgcgatcaaagacggggacggggacgtcgacctgtccatgaaaggcgcgcggtaccgcggcgtgcggcgccggccgtggggccggttcgcggcagagatccgcgaccccatgtccaaggagcggcggtggctcggcaccttcgacaccgccgagcaggccgcctgcgcctacgacatcgcggcgcgcgccatgcgcggcaacaaggcgcgcaccaacttcccgggccacgccacggcgggctactggccgtggggcgcgccgcagccggcggcggtggcgcacccgatcaaccctttcctcctgcacaacctcatcatgagctcctccaaccacggctgccgcctgctcaaccacgcaggccacggacacgtccactccgcagcccccagacctccggcgccggcggcggacgccacgtccacgaccatcgcagcgcccttccctgtcgccgcacaccccgccgtagcgatggacgaggacgtggacgactgggacggcgtcctgcggagcgagcccgcggacgccgggctgctgcaggacgcgctgcacgacttctaccctttcacgcgtccgcgcgccggcgggggcaggcgcggcctgtccgcggccggaaccgacgccagggcggcagctgcgttggtggcgccggtaaagccggatgctttcgtcgttcccagccctttcgccggcgtcgagggggacggtgaatacccgatgatgccgcagggcctgctcgaggacgtgatccactccccggcgttcgtggaggttgtggccgcgccgccgtccgtccccacgcgccgcggccgccggggctga

SEQ ID NO: 127 - DNA, 1251 bp, Zea mays
atgctcggcgcacccggccacgacggcgacgacgccgcggagcgcgcgcaggagcaagccgccgccgccgcagcagcagcagccgacgatgctccctcctcgccaagaggtctcgtggtcgcgagcgccggtctcctccaccgcggcgacgtcgacggcgcccggcgcgcgacggctgaggtcctgtccaccatggaccagcggggcgacgcggccgaccgcctcgcgcaccacttcgcccgcgcgctcgctcgcctcgtggacgacaaggcggccgccgccgggggcggcgacgtcgccgcggcgcccgcgggaggggctccgccgcctgcgcccccggggccgacggcgtacctggcgtacaaccagatcgcgccgtttctgcggttcgcgcacctgacggccaaccaggcgatcctcgacgccgccgctagcaccagcggcggcgcgcggcggttgcacatcgtcgaccttgatgccgcgcacggcgtgcagtggccgccgctgctccaagccatcgctaaccgcgcggaccccgccgtcggtccgcttgaggtccggatcaccggcgctggacccgaccgcgacgtgctcctccgcacgggggaccgtctccgcgccttcgccagctcactgaacctccccttccgtttccacccgctccacctcccctactccgtgcagctcgccgccgacccgaacaccgggctggagctgcactcggacgagactctggccgtcaactgcgtgctcttcctgcacaggctcggcggcgagggcgaggtcgccacgttcctgaagtgggttaaatccatgaaccccgccgtggtgaccatcgccgagaaggaagccaatagcatcggcagcgacgactgttccgatgacctgccgcggcgggtgactgcggcgatgagctactactcggccgtgttcgacgccctggaggcgacggtgccgccgggcagcgctgaccgcctcttggtggagagcgaggtcctcggcagagagatcgacgcggcgctgacgccgggtcgcgtcggcgaacactcctgggggttcgatgcgtgggcctccgccgcgcgtaccgccgggctctcgcctcggccgctcagcgcgttcgcggtgtcgcaggcgcggctgctgctgcggctgcactacccgtcggaggggtacgtcgccgaggaggcacgcggcgcgtgcttcctcggctggcagacgcggccgctcatggcggtttcgtcttggcaatag

SEQ ID NO: 128 - DNA, 1269 bp, Zea mays
atggtcttatggaggacaggaggagcatggtggtgctacctagcaagagctccccactataaagcgcccccacacaccataccacagctcagagcttcttctcatcatctggtagaaagaaagagtgagagtgaggttggcaagggtatagggttcttggtcgatcaaatacctttcccctcttggattctcatcttcctgcttcgttctcaccagatcgatctcaccacgtgcctgcgtagcaagccactctgtatgcaccatcaccaccaggaccaggccatgggcgacgcgctgtgggacctgctcggggaggagatggcagcggcgggcggggagcacgggctgcccccggggtttcggttccaccccaccgacgaggagctggtcaccttctacctcgccgccaaggtgttcaacggcgcctgctgcggcatcgacatcgccgaggtggacctcaaccggtgcgagccgtgggagctccccgacgcggcgcgcatgggggagcgcgagtggtacttcttcagcctccgcgaccgcaagtaccccacgggcctccgtaccaaccgcgccaccggcgccggatactggaaggccaccgggaaggaccgcgaggtgctcaacgccgccaccggcgcgctcctcggcatgaagaagacgctcgtcttctacaagggccgggcgccgcgcggcgagaagaccaagtgggtcctgcacgagtaccgcctcgacggcgacttcgccgccgctcgccgcccctgcaaggaggaatgggtcatctgcaggatactgcacaaggcaggcgaccagtatagcaagctgatgatggtgaagagcccctactacctgcccatggcgatggacccttccagcttctgcttccaggaggacccaaccgggcatcccctcccgaaccctagcggctgcacccccttccaccacggccacccccaccatagcatgcagccgccgcctccattgccgccgagcaaccatgctggcaaggccgtcttcaccggagcagcagcagcctgctgcatgcaacaagagccggcagacggcagcaacagcgccgtgctgcccatgccgccgttccctcccttcacccccatcgtcgccggcaagccggcggccccggcgccgccgccccaggttgtcaacgccggtccacaggagccaccgccacctacctggctggaggcctacctgcagcacactggtgggatcctttatgagatgggtccaactgcagcgcccaggggcgcgtga

SEQ ID NO: 129 - DNA, 1653 bp, Zea mays
atggcgctagcacctagccatgcccatgcatcacttgccgtcgctccattcacagtactttgcaccttccttgcccttgttgccttattgtttctgcatcgatatcgtcgaagcaacgcaaggccgtcgaagaaaacacggcagctgccgccaggcccggccgggttgccgatcatcggcagcctgcactgcctggtgtcgaaaaagccggtgtttcggtgggttcacggccttctcaaggacatgaacaccaagatcctatgcctccgcttcggggccgtgcacgtcgtggtagtcgcctgcccggagatagcccgcgaggttctcaggacgaacgacgccgccctggcgtctcgcccggagacagacgcctgcgagctgttcagcctcgggtacaagggcgccatcctgtcgccctacggggagcagtggaggaagatgcggcgggtcctcacctccgagatcctgtccgcgtcgatggagcagcggcagcagcggcggcgagcgcaggaggccgactacctcgtcgcttccctgtacagccagtgctgcagcagcgccagcgcagccgcatcgtcggctgctagctccgccgtcgtcgacatacgccatgtagcccgccacttctcctgcaacatgatccggagcctcgtgttcggcaagcggcacttcggcgccggcgccggcccgggtcctgaggaggtggcgcacgtggacacgctcttcgcgctgctcaactacatatacatcttctccgtctcggattacgtccccgctgcgtggaggtggatggttgctggcctcgaccttggcggtgacagggaggctggcaggagcgtgatgaggactctgagcaggctgcatgatcccatcatacgggagaggatccgtgagtgggacggccttcgcgaacgcggcgagaagagagaggtcagggatttccttgacgcgctcgtctctctcgtggattcgcaggggcggcctttcttgtcgttcgacgagataaaagcgcagacagcggagatgatgtttgcaaccattgacaacccatcgaacgcggtggagtgggcgctggcggagatgatgaacaggccggaggtgatgaagaaagcaatggaggagctggacgcggtggtcggcaaggacaggctggtgcaggagtcggacatcccgggcctcaactacctgaaggcgtgcgtgcgggaggccttccggctgcacccgtaccacgctctgaacctgccgcacgtcgccatggaagacaccgtggtctccggctacctggtccccaagggcagccacgtgctgctgagccggctggcgcttgggcggaaccccgacgtctgggacgagcctctccagttccggccggagcgacatctggtgaacgacggcgacgtggttctcacggagccggaccttcggttcatctcgttcagcgcgggcaggagggggtgcccgggggtgtcactcggcagctccattacgatgatgctgttcgcaaggctcctccaagggttcgcgtggagcaagcctcctggcgtccgtgcgatcaggctcgaggaatccagcgcaagcctagcactggctgagccgctcctcttacaagctcagcctcgtttgccggtgcatctctatgcggcgtccggttaa

SEQ ID NO: 130 - DNA, 1587 bp, Zea mays
atggagatggcaggcgccgcaggaacggaagcatggttgccgtacgtgaccacggtggcgtcctgcgccgtcggcgtcttcttcctgctctacttctacgcgccacactggcggatcagggacgtgccggggccgccggccttgcccgtcgtggggcacctcccgctgctcgcccgacacggacctgacgtcttcggcctcctcgccaagaaatatggcccgatcttcaggttccatttggggaggcagcctctggtgatcgtcgctgacccagagctctgcagggaggttggcgtcaggcagttcaagctcatccccaacaggagcttgccggcgccgatcgccggctcccctctccaccagaagggcctcttcttcactagggatgaacggtggtcggcgatgaggaatacaatcatctcgctgtaccagccatcgcacctcgccggcctcgtccccaccatgcagcactgcatcgagcgcgccgcggacgccataccggcgatggtagttcaggagaacgggctggtcgatttctccgacctctcgctcaagctggccacggacatcatcggtgaggcggcgttcggcgtggatttcggcctcacggcgagcggtcccggctgcgaggccgcggagttcatcagggagcacgtgcactccacaacctccctgaagatggacctgtccgcgccgctctccgtagtgctcggcctcgtcgcgcccgcgctgcagggcccggtacggcacctgctgagccgtgtcccggggaccgccgactggagggtcgcgcggaccaacgcgcggctgcgcgcgcgggtggacgagattgtggtgtcacgggcgcgcgggcgcggccagcacggcgaaaggaggaaggacttcctgtcagcggtgctggacgcccgggaccgcagtgcggcgctgcgggagctgctcacgccggaccacgtgagcgcgctcacctacgagcacctcctcgccgggtctgccaccacggcgttcacgctctcgtcggcagtgtacctagtcgccggccacccggaggttgaggccaagctgctggcggaggtcgacgctttcgggccgcgcggcgccgtgccgaccgccgacgacctgcagcaccggttcccctaccttgatcaggtcataaaggaggccatgagattctacacagtctcgccactgatcgccagagtgacgtctcgacaaacagagcttggaggccacactctcccaaagggcacgtggctgtggatggctccgggcgtcctgtcccgcgacgccgctaacttcgaggaccccggtgcattccggccggagcggttcgacccggccagcgaggagcagcgccggcggcacccgtgcgcgcacatccccttcggcatcggcccgcgggcgtgcgtggggcagcggttcgcgctgcaggaggtgaagctctctatgttgcacctgtaccggcgtttcctcttccggcggtcgccacggatggagtcgccgccggagctccagttcgggatcgtgctcaatttcaagaagggcgtcaaactcgtagcagttgagcggtgcgctgccatgccgttgtag

SEQ ID NO: 131 - DNA, 1719 bp, Zea mays
atgtctcccactatggcttcgtcgttgtgcgtatttgcagcgatgtctggcgccagcggcaggccgtcggccggtggctcggcggtaccgggccgtctgtccagcagcacacaggggggcaagggaaagcgggccgtggtgcagccgctcgcggctagcgtggtgacggagacgccagcgccggccgtagctccggctcggcccgtcgtcgacgccccgccgcgccgccgtgggggccgcggcaccgtcgagcacgcggcgtggaagagcgtccggcaggagaggtgggagggggcgctggagctggagggagagctgccgctctggctggatggcacctacctgaggaacgggccgggcctgtggaacctgggcgactacggcttccggcacctgttcgacggctacgccacgctggtccgcgtgtcgttccgcgacgggcaggcggtgggcgcgcaccggcagatcgagtcggaggcgtacaaggcggcgcgcgcgcacggcaaggtgtgctaccgcgagttctcggaggtgcccaaggcggaggggttcctctcccacgtgggccagctcgccaccctcttctcgggctcctcgctcaccgacaactccaacacgggcgtcgtcaggctcggcgacggccgcgtcctctgcctgacagagaccatcaagggctccatcgtggtcgacccggacacgctcgacaccatcggcaagttcgagtacacggacaggctgggcggcctcatccactcggcgcaccccatcgtgacggacaccgagttctggacgctcatcccggacctcatccgcccgggctactcggtggtgaggatggacgccgggaccaacgagcggcggttcgtcggcagggtggactgtcggggcgggccggcgcccgggtgggtgcactcgttccccatcaccgaccactacgtggtggtgccggagatgccgctccggtactgcgccaggaacctcctccgcgcggagcccacgccgctgtacaagttcgagtggcacctcgagtccggcagctacatgcacgtcatgtgcaaggctagcggcagggtcgtggcgaccgtggaggtgccgccgttcgtcacgttccacttcatcaacgcgtacgaggagaaggacgacgagggccgcgtcaccgcgatcatcgccgactgctgcgagcacaacgccaacacctccatcctcgacaagctccggctccagaacctgcgctcttccaccggccaggacgtcctccccgacgccagggtgggccgcttcaggatcccgctggacgggagcccgttcggcgagctggagccggcgctggacccggaccagcacggccgcgggatggacatgtgcagcatcaacccggcccacgtcggcaagaagtaccggtacgcctacgcctgcggagcccaccggccgtgcaacttccccaacaccctcaccaagatcgacctggtggagaagacggccaagaactggtacgaggagggcgccgtgccgtcagagcccttcttcgtgccgcgccccggcgccgtggaggaggacgacggcgtcgcgatctcgatggtgagcgccaaggacggatcggcctacgcgttggtgctggacgccaagacgttccacgagatcgcgcgggccaagttcccgtacgcgatgccctacggcttgcactgctgctgggtgcctaggagtacctcagacgcgtag

SEQ ID NO: 132 - DNA, 1107 bp, Artificial Sequence
  ZM-MIR-SPS1
atggagaggttgggcgtcggcgtcggcgtcggcgagctgccgccggggttccgcttccacccgacggacgaggagctgatcacctactacctcctctgcaaggccgtggacggcggcttctgcggcggccgcgccatcgcggagatcgacctgaacaagtgcgagccatgggagctcccggacaaggcgaagatgggggagaaggagtggtacttctactgcctccgcgaccgcaagtacccgacgggcctgcgcaccaaccgcgccacggcggccggctactggaaggccaccggcaaggaccgcgaggtccgcagcggccgcagcggcgcgctggtgggcatgaagaagacgctcgtcttctaccggggccgcgcccccaggggccagaagacgcgctgggtcatgcacgagtaccgcctcgacggcacctacgcctaccatttccttcccggctctacgagggacgagtgggtgatcgcgagggtgttccagaagccaggcgaggtcccatgcggccgcaagcaccgcctgggcggccccagcgccgccgccggcgagtcctgcttctcggactccaccacctcggcctccatcggcggcggcggcggaggaggagcgtccgcgtcgtctcgcccgctgctcaccgtcacggacacttcctcgccgtcgctgttcgtggccaacgcgaacgccgccgccagcaacaacaacggcaacccggtcaccgggcgagagctcgtgccctgcttctccactaccgccagtcccctggaagccgcggcgctcggcgtcgtcgggcacccgtacaacgcggccccgctgcgtctgggcttggacttcgaggcgccgtccccgggcttcgtcgtcccgaacctgcgttccctgcaagtgcaggacgacggcggcctgccgctgttcctctcggcagcagcaggcggcggcatgtcgtccgcgacgctgggaataatggggtcgctgggcgggtctctccactgcccgccccacgccggcatggatgtcgtcaaggtcgagggccgcgccgcgccgccgcagatggctgtcggccccggcctcctcgatggcgccttcgcctggggcttctag

SEQ ID NO: 133 - DNA, 125 bp, Artificial Sequence
  ZM-MIR-MAX1
agatgagttttttgaaggttgcgcgcacatccccttcggcaacacggtggtttcttaccatgagtgtcatgctaggagctgtgcgtgctcaccctctatctgtcagtcactcatcaagcccatct

SEQ ID NO: 134 - DNA, 126 bp, Artificial Sequence
  ZM-MIR-MAX4
agatgagttttttgaaggtttggagctggagggagagctgccacacggtggtttcttaccatgagtgtcatgctaggagctgtgcgtgctcaccctctatctgtcagtcactcatcaagcccatct

SEQ ID NO: 135 - DNA, 1107 bp, Zea mays; identical to SEQ ID NO: 132

SEQ ID NO: 136 - DNA, 7314 bp, Artificial Sequence
  Plasmid C
gtgcagcgtgacccggtcgtgcccctctctagagataatgagcattgcatgtctaagttataaaaaattaccacatattttttttgtcacacttgtttgaagtgcagtttatctatctttatacatatatttaaactttactctacgaataatataatctatagtactacaataatatcagtgttttagagaatcatataaatgaacagttagacatggtctaaaggacaattgagtattttgacaacaggactctacagttttatctttttagtgtgcatgtgttctcctttttttttgcaaatagcttcacctatataatacttcatccattttattagtacatccatttagggtttagggttaatggtttttatagactaatttttttagtacatctattttattctattttagcctctaaattaagaaaactaaaactctattttagtttttttatttaataatttagatataaaatagaataaaataaagtgactaaaaattaaacaaataccctttaagaaattaaaaaaactaaggaaacatttttcttgtttcgagtagataatgccagcctgttaaacgccgtcgacgagtctaacggacaccaaccagcgaaccagcagcgtcgcgtcgggccaagcgaagcagacggcacggcatctctgtcgctgcctctggacccctctcgagagttccgctccaccgttggacttgctccgctgtcggcatccagaaattgcgtggcggagcggcagacgtgagccggcacggcaggcggcctcctcctcctctcacggcaccggcagctacgggggattcctttcccaccgctccttcgctttcccttcctcgcccgccgtaataaatagacaccccctccacaccctctttccccaacctcgtgttgttcggagcgcacacacacacaaccagatctcccccaaatccacccgtcggcacctccgcttcaaggtacgccgctcgtcctcccccccccccctctctaccttctctagatcggcgttccggtccatgcatggttagggcccggtagttctacttctgttcatgtttgtgttagatccgtgtttgtgttagatccgtgctgctagcgttcgtacacggatgcgacctgtacgtcagacacgttctgattgctaacttgccagtgtttctctttggggaatcctgggatggctctagccgttccgcagacgggatcgatttcatgattttttttgtttcgttgcatagggtttggtttgcccttttcctttatttcaatatatgccgtgcacttgtttgtcgggtcatcttttcatgcttttttttgtcttggttgtgatgatgtggtctggttgggcggtcgttctagatcggagtagaattctgtttcaaactacctggtggatttattaattttggatctgtatgtgtgtgccatacatattcatagttacgaattgaagatgatggatggaaatatcgatctaggataggtatacatgttgatgcgggttttactgatgcatatacagagatgctttttgttcgcttggttgtgatgatgtggtgtggttgggcggtcgttcattcgttctagatcggagtagaatactgtttcaaactacctggtgtatttattaattttggaactgtatgtgtgtgtcatacatcttcatagttacgagtttaagatggatggaaatatcgatctaggataggtatacatgttgatgtgggttttactgatgcatatacatgatggcatatgcagcatctattcatatgctctaaccttgagtacctatctattataataaacaagtatgttttataattattttgatcttgatatacttggatgatggcatatgcagcagctatatgtggatttttttagccctgccttcatacgctatttatttgcttggtactgtttcttttgtcgatgctcaccctgttgtttggtgttacttctgcaggtcgactctagaggatccaccggtcgccaccatggcaccgaagaagaagcgcaaggtgatggacaagaagtacagcatcggcctcgacatcggcaccaactcggtgggctgggccgtcatcacggacgaatataaggtcccgtcgaagaagttcaaggtcctcggcaatacagaccgccacagcatcaagaaaaacttgatcggcgccctcctgttcgatagcggcgagaccgcggaggcgaccaggctcaagaggaccgccaggagacggtacactaggcgcaagaacaggatctgctacctgcaggagatcttcagcaacgagatggcgaaggtggacgactccttcttccaccgcctggaggaatcattcctggtggaggaggacaagaagcatgagcggcacccaatcttcggcaacatcgtcgacgaggtaagtttctgcttctacctttgatatatatataataattatcattaattagtagtaatataatatttcaaatatttttttcaaaataaaagaatgtagtatatagcaattgcttttctgtagtttataagtgtgtatattttaatttataacttttctaatatatgaccaaaacatggtgatgtgcaggtggcctaccacgagaagtacccgacaatctaccacctccggaagaaactggtggacagcacagacaaggcggacctccggctcatctaccttgccctcgcgcatatgatcaagttccgcggccacttcctcatcgagggcgacctgaacccggacaactccgacgtggacaagctgttcatccagctcgtgcagacgtacaatcaactgttcgaggagaaccccataaacgctagcggcgtggacgccaaggccatcctctcggccaggctctcgaaatcaagaaggctggagaaccttatcgcgcagttgccaggcgaaaagaagaacggcctcttcggcaaccttattgcgctcagcctcggcctgacgccgaacttcaaatcaaacttcgacctcgcggaggacgccaagctccagctctcaaaggacacctacgacgacgacctcgacaacctcctggcccagataggagaccagtacgcggacctcttcctcgccgccaagaacctctccgacgctatcctgctcagcgacatccttcgggtcaacaccgaaattaccaaggcaccgctgtccgccagcatgattaaacgctacgacgagcaccatcaggacctcacgctgctcaaggcactcgtccgccagcagctccccgagaagtacaaggagatcttcttcgaccaatcaaaaaacggctacgcgggatatatcgacggcggtgccagccaggaagagttctacaagttcatcaaaccaatcctggagaagatggacggcaccgaggagttgctggtcaagctcaacagggaggacctcctcaggaagcagaggaccttcgacaacggctccatcccgcatcagatccacctgggcgaactgcatgccatcctgcggcgccaggaggacttctacccgttcctgaaggataaccgggagaagatcgagaagatcttgacgttccgcatcccatactacgtgggcccgctggctcgcggcaactcccggttcgcctggatgacccggaagtcggaggagaccatcacaccctggaactttgaggaggtggtcgataagggcgctagcgctcagagcttcatcgagcgcatgaccaacttcgataaaaacctgcccaatgaaaaagtcctccccaagcactcgctgctctacgagtacttcaccgtgtacaacgagctcaccaaggtcaaatacgtcaccgagggcatgcggaagccggcgttcctgagcggcgagcagaagaaggcgatagtggacctcctcttcaagaccaacaggaaggtgaccgtgaagcaattaaaagaggactacttcaagaaaatagagtgcttcgactccgtggagatctcgggcgtggaggatcggttcaacgcctcactcggcacgtatcacgacctcctcaagatcattaaagacaaggacttcctcgacaacgaggagaacgaggacatcctcgaggacatcgtcctcaccctgaccctgttcgaggaccgcgaaatgatcgaggagaggctgaagacctacgcgcacctgttcgacgacaaggtcatgaaacagctcaagaggcgccgctacactggttggggaaggctgtcccgcaagctcattaatggcatcagggacaagcagagcggcaagaccatcctggacttcctcaagtccgacgggttcgccaaccgcaacttcatgcagctcattcacgacgactcgctcacgttcaaggaagacatccagaaggcacaggtgagcgggcagggtgactccctccacgaacacatcgccaacctggccggctcgccggccattaaaaagggcatcctgcagacggtcaaggtcgtcgacgagctcgtgaaggtgatgggccggcacaagcccgaaaatatcgtcatagagatggccagggagaaccagaccacccaaaaagggcagaagaactcgcgcgagcggatgaaacggatcgaggagggcattaaagagctcgggtcccagatcctgaaggagcaccccgtggaaaatacccagctccagaatgaaaagctctacctctactacctgcagaacggccgcgacatgtacgtggaccaggagctggacattaatcggctatcggactacgacgtcgaccacatcgtgccgcagtcgttcctcaaggacgatagcatcgacaacaaggtgctcacccggtcggataaaaatcggggcaagagcgacaacgtgcccagcgaggaggtcgtgaagaagatgaaaaactactggcgccagctcctcaacgcgaaactgatcacccagcgcaagttcgacaacctgacgaaggcggaacgcggtggcttgagcgaactcgataaggcgggcttcataaaaaggcagctggtcgagacgcgccagatcacgaagcatgtcgcccagatcctggacagccgcatgaatactaagtacgatgaaaacgacaagctgatccgggaggtgaaggtgatcacgctgaagtccaagctcgtgtcggacttccgcaaggacttccagttctacaaggtccgcgagatcaacaactaccaccacgcccacgacgcctacctgaatgcggtggtcgggaccgccctgatcaagaagtacccgaagctggagtcggagttcgtgtacggcgactacaaggtctacgacgtgcgcaaaatgatcgccaagtccgagcaggagatcggcaaggccacggcaaaatacttcttctactcgaacatcatgaacttcttcaagaccgagatcaccctcgcgaacggcgagatccgcaagcgcccgctcatcgaaaccaacggcgagacgggcgagatcgtctgggataagggccgggatttcgcgacggtccgcaaggtgctctccatgccgcaagtcaatatcgtgaaaaagacggaggtccagacgggcgggttcagcaaggagtccatcctcccgaagcgcaactccgacaagctcatcgcgaggaagaaggattgggacccgaaaaaatatggcggcttcgacagcccgaccgtcgcatacagcgtcctcgtcgtggcgaaggtggagaagggcaagtcaaagaagctcaagtccgtgaaggagctgctcgggatcacgattatggagcggtcctccttcgagaagaacccgatcgacttcctagaggccaagggatataaggaggtcaagaaggacctgattattaaactgccgaagtactcgctcttcgagctggaaaacggccgcaagaggatgctcgcctccgcaggcgagttgcagaagggcaacgagctcgccctcccgagcaaatacgtcaatttcctgtacctcgctagccactatgaaaagctcaagggcagcccggaggacaacgagcagaagcagctcttcgtggagcagcacaagcattacctggacgagatcatcgagcagatcagcgagttctcgaagcgggtgatcctcgccgacgcgaacctggacaaggtgctgtcggcatataacaagcaccgcgacaaaccaatacgcgagcaggccgaaaatatcatccacctcttcaccctcaccaacctcggcgctccggcagccttcaagtacttcgacaccacgattgaccggaagcggtacacgagcacgaaggaggtgctcgatgcgacgctgatccaccagagcatcacagggctctatgaaacacgcatcgacctgagccagctgggcggagacaagagaccacgggaccgccacgatggcgagctgggaggccgcaagcgggcaaggtaggtaccgtcatgggtcgtttaagctgccgatgtgcctgcgtcgtctggtgccctctctccatatggaggttgtcaaagtatctgctgttcgtgtcatgagtcgtgtcagtgttggtttaataatggaccggttgtgttgtgtgtgcgtactacccagaactatgacaaatcatgaataagtttgatgtttgaaattaaagcctgtgctcattatgttctgtctttcagttgtctcctaatatttgcctgcaggtactggctatctaccgtttcttacttaggaggtgtttgaatgcactaaaactaatagttagtggctaaaattagttaaaacatccaaacaccatagctaatagttgaactattagctatttttggaaaattagttaatagtgaggtagttatttgttagctagctaattcaactaacaatttttagccaactaacaattagtttcagtgcattcaaacacccccttaatgttaacgtggttctatctaccgtctcctaatatatggttgattgttcggtttgttgctatgctattgggttctgattgctgctagttcttgctgaatccagaagttctcgtagtatagctcagattcatattatttatttgagtgataagtgatccaggttattactatgttagctaggttttttttacaaggataaattatctgtgatcataattcttatgaaagctttatgtttcctggaggcagtggcatgcaatgcatgacagcaacttgatcacaccagctgaggtagatacggtaacaaggttcttaaatctgttcaccaaatcattggagaacacacatacacattcttgccagtcttggttagagaaatttcatgacaaaatgccaaagctgtcttgactcttcacttttggccatgagtcgtgac

SEQ ID NO: 137 - DNA, 5579 bp, Artificial sequence
  Plasmid B
ccggaatcggacctcgggacgtcgccaaagttagctaggtgtccttagcgtttcttaggttctaggcgttaggggtcaataggttagcctagaagtcccgcactaacagcctagcttaacagttccaagctaagccactagactagccctatccgactaacctagtctaagccgaacggggatctaatctaagctaggcacccattagactagttcactagcgcgaccgcactaaactaggctaaaggttaatagcaactagttagctaggggacgttagctgcccaagcttggttaccgcataatgaggatcgaggatgaggagcatgcacggatagatggcgtctagcatatcgataggacatgacaagtggtacgatccccgtcacatgtccatggaggcatctgatatggacacggcgtgtatctatcgcggctggaacagaaccagcgctcgcgcggcggtcggcgggagggacagaccttggctccgtgcgttcaggttgtgcttgtgccgcgcgccacgcacggtctccgccgcctgcagctgaaattttagatttacatcctatccctttattttttttatttgtcacaattcagttcaaaaatgaagaacggaggtagtgcatcctttgtgagactaatgaaaatcacatctggatcctgaaatcggcgtcgtaacctacaaggccacggactggattagatagtggtccatggtgcataatgaggatcgaggggtaccagtctaattacaaaactaattgcacaaccgctaagctgaatcgcgagatggatctattaaccttaattagtccatgatttgacaatgtggtgctacaataaccatttgctaatgatggattacttaggtttaatagattcgtctcgtgatttagcctatgggttctgctattaattttgtaattagctcatatttagttcttataattagtatccgaacatccaatgtgacatgctaaagtttaaccctggtatccaaatgaagtcttatgagagtttcatcactccggtggtatatgtacttaggctccgttttcttccaccgacttatttttagcacccgtcacattgaatgtttagatactaattagaagtattaaacgtagactatttacaaaatccattacataagacgaatctaaacggcgagacgaatctattaaacctaattagtccatgatttgacaatgtgttgctacagtaaacatttgctaatgatggattaattaggcttaatagattcgtctcgccgtttagcctccacttatgtaatgggttttctaaacaatctacgtttaatactcctaattagtatctaaatattcaatgtgacacgtgctaaaaataagtcagtggaaggaagagaacgtccccttagttttccatcttattaattgtacgatgaaactgtgcagccagatgattgacaatcgcaatacttcaactagtgggccatgcacatcagcgacgtgtaacgtcgtgagttgctgttcccgtagagaaatatcaactggtgggccacgcacatcagcgtcgtgtaacgtggacggaggagccccgtgacggcgtcgacatcgaacggccaccaaccacggaaccacccgtccccacctctcggaagctccgctccacggcgtcgacatctaacggctaccagcaggcgtacgggttggagtggactccttgcctctttgcgctggcggcttccggaaattgcgtggcggagacgaggcgggctcgtctcacacggcacggaagacgtcacgggttccttccccacctctcctcttccccaccgccataaatagccgaccccctcgcctttctccccaatctcatctcgtctcgtgttgttcggagcacaccacccgccccaaatcgttcttcccgcaagcctcggcgatccttcacccgcttcaaggtacggcgatcgtcttcctcctctagatcggcgtgatctgcaagtagttgatttggtagatggttaggatctgtgcactgaagaaatcatgttagatccgcgatgtttctgttcgtagatggctgggaggtggaatttttgtgtagatctgatatgttctcctgtttatcttgtcacgctcctgcgatttgtggggattttaggtcgttgatctgggaatcgtggggttgcttctaggctgttcgtagatgaggtcgttctcacggtttactggatcattgcctagtagatcagctcgggctttcgtctttgtatatggtgcccatacttgcatctatgatctggttccgtggtgttacctaggtttctgcgcctgattcgtccgatcgattttgttagcatgtggtaaacgtttggtcatggtctgatttagattagagtcgaataggatgatctcgatctagctcttgggattaatatgcatgtgtcaccaatctgttccgtggttaagatgatgaatctatgcttagttaatgggtgtagatatatatgctgctgttcctcaatgatgccgtagcttttacctgagcagcatggttcctcctgttacttaggtagatgcacatgcttatagatcaagatatgtactgctactgttggaattgtttagtatacctgatgatcatccatgctcttgttacttgttttggtatacttggatgatggcatgctgctgctttttgttgatttgagcccatccatatctgcatatgtcacatgattaagatgattacgctgtttctgtatgatgccatagcttttatgtgagcaacatgcatcctcctggttatatgcattaatagatggaagatatctattgctacaatttgatgattattttgtacatacgatgatcaagcatgctcttcatactttgttgatatacttggataatgaaatgctgctgcacgttcattctatagcactaatgatgtgatgaacacgcacgacctgtttgtggcatctgtttgaatgtgttgttgctgttcactagagactgttttattaacctactgctagatacttacccttctgtctgtttattcttttgcaggtcgaccgccggggatccatggttgaacaagatggattgcacgcaggttctccggccgcttgggtggagaggctattcggctatgactgggcacaacagacaatcggctgctctgatgccgccgtgttccggctgtcagcgcaggggcgcccggttctttttgtcaagaccgacctgtccggtgccctgaatgaactgcaggacgaggcagcgcggctatcgtggctggccacgacgggcgttccttgcgcagctgtgctcgacgttgtcactgaagcgggaagggactggctgctattgggcgaagtgccggggcaggatctcctgtcatctcaccttgctcctgccgagaaagtatccatcatggctgatgcaatgcggcggctgcatacgcttgatccggctacctgcccattcgaccaccaagcgaaacatcgcatcgagcgagcacgtactcggatggaagccggtcttgtcgatcaggatgatctggacgaagagcatcaggggctcgcgccagccgaactgttcgccaggctcaaggcgcgcatgcccgacggcgatgatctcgtcgtgacccatggcgatgcctgcttgccgaatatcatggtggaaaatggccgcttttctggattcatcgactgtggccggctgggtgtggcggaccgctatcaggacatagcgttggctacccgtgatattgctgaagagcttggcggcgaatgggctgaccgcttcctcgtgctttacggtatcgccgctcccgattcgcagcgcatcgccttctatcgccttcttgacgagttcttctgagcccatcggtcatggatgcttctactgtacctgggtcgtctggtctctgcctgtgtcacctttgaagtacctgtgtcgggattgtgtttggtctagaactgcagtttgtctttgatgttcttttgtctggtcttatgaactggttgtatctgtatgtttactgtaaactgttgttgcggtgcagcagtatggcatccgaatgaataaatgatgtttggacttaaatctgtactctgtttgttttcggttatgccagttctatattgcctgagatcagaatgtttagcttttgagttctgtttggcttgtggtcgactcctgtttcttacttgaggcgtaactctgttctggcaaactcaaatgtctaactgaatgttttaggacttaattgttggacagattaacgtgtttggtttgtttctagattgtgattcggaaggcttgttagttgtggaatcaaggagagcagctaggtctgtgcagaacgttattttggatttaagccttctcagattatgccattactctaaacctaatgatatcatatttcactcggggatgttggagtagtcttttctttctcctgcagacaaaatgattttgctttcgtgtgtgtacatgattttgtgcaactgttgcaacaactgaagtagacaagttttgacctcaccagaagaatgaaaaagattttggaatttgttacatcgacaaaccattgtaacttggcccatcagaatgcacagagaagcggctacaaattgacatgcgttgcaaactttgcaatagttgatgcacatgtttgccattgcctgccagtcttaggaaaagtgtgtggttcgagaaatctaagcatatgtgctctgctcacattgcgtggaacccacacagctttgtcacactcttgtccactccagaagtcattcctggcgctgtttacccctggtaaagagtaaccgaaaacttctcaaggctgtacccaaaactggaaggaaatttggaggcggccgcatgaggagcaatcattgttcaagacatgatgcaaagctagaaaactttgattgtggccgtccttgtgaagtttaggccggggggaacttcatgaaccctatcgaagcttaattagttcttttttgttgttagccatgtttgtattgtagttaaggtgaacaacatgacgccgcacccgcgatctcagggctcgtccccacacaggagggcacgtcgtcgtcttcgccgccgagcatcagagattcagagcacatacacgcacatctcaagcaaacggagtagtacgtcctactcctacgtacatacctagccgacgacctttatgtgcacaccaccactgctctgctgcccggcctctccgtcgtccgttcatcaccagcataatgaggatcgaggatgaggggcgcgccgacgtcccgaggtccgattccgggctaattaacacctagctcgccactcgactaattagggactaagcctagcgcttagccgttaaaacctagcacaccctaagcacccttagttaggttcccctcttaattaagccctagtgagcccctaagttaaggggacgctaagagccccctaacctagtattcggctagaggcgaactaggctaaacacctaagcgcacctctttaagctagatcgctagggggctaggctagagcttcgctagattagtctaagggcag

SEQ ID NO: 138 - DNA, 5743 bp, Artificial sequence
  Plasmid D
atcgagcagctggcttgtggggaccagacaaaaaaggaatggtgcagaattgttaggcgcacctaccaaaagcatctttgcctttattgcaaagataaagcagattcctctagtacaagtggggaacaaaataacgtggaaaagagctgtcctgacagcccactcactaatgcgtatgacgaacgcagtgacgaccacaaaactcgagcaacgagatcatgagccaatcaaagaggagtgatgtagacctaaagcaataatggagccatgacgtaagggcttacgcccatacgaaataattaaaggctgatgtgacctgtcggtctctcagaacctttactttttatgtttggcgtgtatttttaaatttccacggcaatgacgatgtgaccgtcgacccactaaaacattgctttgtcaaaagctaaaaaagatgatgcccgacagccacttgtgtgaagcatgagaagccggtccctccactaagaaaattagtgaagcatcttccagtggtccctccactcacagctcaatcagtgagcaacaggacgaaggaaatgacgtaagccatgacgtctaatcccagggccagcttgcatgcctgcagtgcagcgtgacccggtcgtgcccctctctagagataatgagcattgcatgtctaagttataaaaaattaccacatattttttttgtcacacttgtttgaagtgcagtttatctatctttatacatatatttaaactttactctacgaataatataatctatagtactacaataatatcagtgttttagagaatcatataaatgaacagttagacatggtctaaaggacaattgagtattttgacaacaggactctacagttttatctttttagtgtgcatgtgttctcctttttttttgcaaatagcttcacctatataatacttcatccattttattagtacatccatttagggtttagggttaatggtttttatagactaatttttttagtacatctattttattctattttagcctctaaattaagaaaactaaaactctattttagtttttttatttaataatttagatataaaatagaataaaataaagtgactaaaaattaaacaaataccctttaagaaattaaaaaaactaaggaaacatttttcttgtttcgagtagataatgccagcctgttaaacgccgtcgacgagtctaacggacaccaaccagcgaaccagcagcgtcgcgtcgggccaagcgaagcagacggcacggcatctctgtcgctgcctctggacccctctcgagagttccgctccaccgttggacttgctccgctgtcggcatccagaaattgcgtggcggagcggcagacgtgagccggcacggcaggcggcctcctcctcctctcacggcaccggcagctacgggggattcctttcccaccgctccttcgctttcccttcctcgcccgccgtaataaatagacaccccctccacaccctctttccccaacctcgtgttgttcggagcgcacacacacacaaccagatctcccccaaatccacccgtcggcacctccgcttcaaggtacgccgctcgtcctcccccccccccctctctaccttctctagatcggcgttccggtccatgcatggttagggcccggtagttctacttctgttcatgtttgtgttagatccgtgtttgtgttagatccgtgctgctagcgttcgtacacggatgcgacctgtacgtcagacacgttctgattgctaacttgccagtgtttctctttggggaatcctgggatggctctagccgttccgcagacgggatcgatttcatgattttttttgtttcgttgcatagggtttggtttgcccttttcctttatttcaatatatgccgtgcacttgtttgtcgggtcatcttttcatgcttttttttgtcttggttgtgatgatgtggtctggttgggcggtcgttctagatcggagtagaattctgtttcaaactacctggtggatttattaattttggatctgtatgtgtgtgccatacatattcatagttacgaattgaagatgatggatggaaatatcgatctaggataggtatacatgttgatgcgggttttactgatgcatatacagagatgctttttgttcgcttggttgtgatgatgtggtgtggttgggcggtcgttcattcgttctagatcggagtagaatactgtttcaaactacctggtgtatttattaattttggaactgtatgtgtgtgtcatacatcttcatagttacgagtttaagatggatggaaatatcgatctaggataggtatacatgttgatgtgggttttactgatgcatatacatgatggcatatgcagcatctattcatatgctctaaccttgagtacctatctattataataaacaagtatgttttataattattttgatcttgatatacttggatgatggcatatgcagcagctatatgtggatttttttagccctgccttcatacgctatttatttgcttggtactgtttcttttgtcgatgctcaccctgttgtttggtgttacttctgcaggtcgactttaacttagcctaggatccatggccactgtgaacaactggctcgctttctccctctccccgcaggagctgccgccctcccagacgacggactccacactcatctcggccgccaccgccgaccatgtctccggcgatgtctgcttcaacatcccccaagattggagcatgaggggatcagagctttcggcgctcgtcgcggagccgaagctggaggacttcctcggcggcatctccttctccgagcagcatcacaaggccaactgcaacatgatacccagcactagcagcacagtttgctacgcgagctcaggtgctagcaccggctaccatcaccagctgtaccaccagcccaccagctcagcgctccacttcgcggactccgtaatggtggcttcctcggccggtgtccacgacggcggtgccatgctcagcgcggccgccgctaacggtgtcgctggcgctgccagtgccaacggcggcggcatcgggctgtccatgattaagaactggctgcggagccaaccggcgcccatgcagccgagggtggcggcggctgagggcgcgcaggggctctctttgtccatgaacatggcggggacgacccaaggcgctgctggcatgccacttctcgctggagagcgcgcacgggcgcccgagagtgtatcgacgtcagcacagggtggagccgtcgtcgtcacggcgccgaaggaggatagcggtggcagcggtgttgccggcgctctagtagccgtgagcacggacacgggtggcagcggcggcgcgtcggctgacaacacggcaaggaagacggtggacacgttcgggcagcgcacgtcgatttaccgtggcgtgacaaggcatagatggactgggagatatgaggcacatctttgggataacagttgcagaagggaagggcaaactcgtaagggtcgtcaagtctatttaggtggctatgataaagaggagaaagctgctagggcttatgatcttgctgctctgaagtactggggtgccacaacaacaacaaattttccagtgagtaactacgaaaaggagctcgaggacatgaagcacatgacaaggcaggagtttgtagcgtctctgagaaggaagagcagtggtttctccagaggtgcatccatttacaggggagtgactaggcatcaccaacatggaagatggcaagcacggattggacgagttgcagggaacaaggatctttacttgggcaccttcagcacccaggaggaggcagcggaggcgtacgacatcgcggcgatcaagttccgcggcctcaacgccgtcaccaacttcgacatgagccgctacgacgtgaagagcatcctggacagcagcgccctccccatcggcagcgccgccaagcgcctcaaggaggccgaggccgcagcgtccgcgcagcaccaccacgccggcgtggtgagctacgacgtcggccgcatcgcctcgcagctcggcgacggcggagccctggcggcggcgtacggcgcgcactaccacggcgccgcctggccgaccatcgcgttccagccgggcgccgccagcacaggcctgtaccacccgtacgcgcagcagccaatgcgcggcggcgggtggtgcaagcaggagcaggaccacgcggtgatcgcggccgcgcacagcctgcaggacctccaccacctgaacctgggcgcggccggcgcgcacgactttttctcggcagggcagcaggccgccgccgctgcgatgcacggcctgggtagcatcgacagtgcgtcgctcgagcacagcaccggctccaactccgtcgtctacaacggcggggtcggcgacagcaacggcgccagcgccgtcggcggcagtggcggtggctacatgatgccgatgagcgctgccggagcaaccactacatcggcaatggtgagccacgagcaggtgcatgcacgggcctacgacgaagccaagcaggctgctcagatggggtacgagagctacctggtgaacgcggagaacaatggtggcggaaggatgtctgcatgggggactgtcgtgtctgcagccgcggcggcagcagcaagcagcaacgacaacatggccgccgacgtcgggcatggcggcgcgcagctcttcagtgtctggaacgacacttaagcgtacctagtggtacctgacatcttatagtctgcaacctctcgtgtctgaattcctatctttatcaagtgttattgcttccacgactataggacagctttcgtcgaaagcttttgctcatgtgatctcgaaggattcatctagtctgatttttcgtgacttgtatcggttttattggattcatccaacatatatcaataaaaaatgagttgtgtttcctttcttcctagttcagttaaaattatttccctcctgcgcttgtgctgtaattgtctgtgtacctgttgtttgtgactgtgttagttcccttggatatgatttcgtatttgatatgtacatggagatagcttagcttcattattggagtatgaagttagtatgacatagtcactctcctggaaaattgacactgcaaaccatatttttattctgaaccacaaatcctagtcagtccgctggcatatgccgtccgtttgctgaatccagaacgtgggtttggagatgtacggctgagatgcctctatgcgaaggggatttcgtggtgaaacgagatgggagtagagcaacgcccgtggaagatgcttcaaacttccacacttttgagcaacgatcggcagtagtaaggtagacgatttcaagatcaaagcatatgaagataaacaacatcaacaacaaaatttgttggggttctatagagagaaacagagctacatacatacactgttttgtatctaccatctgagatgatgaaaagatgaaaaactaaagaatgccccggcgccaacgccaggacacgccgcgcgcgcgtcacccgagccatctcttgacccagccggcgctgtatatttacacacgttgcagcatcgatcaccacctgttcgatcgcgtcgccgtcaccggcgcgccgcgacttattgaactagtctagggcgcggctaacaacctagcttagattgccttgtctaaacccttaggctaacgcgccac

SEQ ID NO: 139 - DNA, 3614 bp, Artificial sequence
  Plasmid E
accgaagcttgatatcgaattcctgcagcccatccctcagccgcctttcactatcttttttgcccgagtcattgtcatgtgaaccttggcatgtataatcggtgaattgcgtcgattttcctcttataggtgggccaatgaatccgtgtgatcgcgtctgattggctagagatatgtttcttccttgttggatgtattttcatacataatcatatgcatacaaatatttcattacactttatagaaatggtcagtaataaaccctatcactatgtctggtgtttcattttatttgcttttaaacgaaaattgacttcctgattcaatatttaaggatcgtcaacggtgtgcagttactaaattctggtttgtaggaactatagtaaactattcaagtcttcacttattgtgcactcacctctcgccacatcaccacagatgttattcacgtcttaaatttgaactacacatcatattgacacaatattttttttaaataagcgattaaaacctagcctctatgtcaacaatggtgtacataaccagcgaagtttagggagtaaaaaacatcgccttacacaaagttcgctttaaaaaataaagagtaaattttactttggaccacccttcaaccaatgtttcactttagaacgagtaattttattattgtcactttggaccaccctcaaatcttttttccatctacatccaatttatcatgtcaaagaaatggtctacatacagctaaggagatttatcgacgaatagtagctagcatactcgaggtcattcatatgcttgagaagagagtcgggatagtccaaaataaaacaaaggtaagattacctggtcaaaagtgaaaacatcagttaaaaggtggtataaagtaaaatatcggtaataaaaggtggcccaaagtgaaatttactcttttctactattataaaaattgaggatgtttttgtcggtactttgatacgtcatttttgtatgaattggtttttaagtttattcgcttttggaaatgcatatctgtatttgagtcgggttttaagttcgtttgcttttgtaaatacagagggatttgtataagaaatatctttaaaaaaacccatatgctaatttgacataatttttgagaaaaatatatattcaggcgaattctcacaatgaacaataataagattaaaatagctttcccccgttgcagcgcatgggtattttttctagtaaaaataaaagataaacttagactcaaaacatttacaaaaacaacccctaaagttcctaaagcccaaagtgctatccacgatccatagcaagcccagcccaacccaacccaacccaacccaccccagtccagccaactggacaatagtctccacacccccccactatcaccgtgagttgtccgcacgcaccgcacgtctcgcagccaaaaaaaaaaaaagaaagaaaaaaaagaaaaagaaaaaacagcaggtgggtccgggtcgtgggggccggaaacgcgaggaggatcgcgagccagcgacgaggccggccctccctccgcttccaaagaaacgccccccatcgccactatatacatacccccccctctcctcccatccccccaaccctaccaccaccaccaccaccacctccacctcctcccccctcgctgccggacgacgagctcctcccccctccccctccgccgccgccgcgccggtaaccaccccgcccctctcctctttctttctccgttttttttttccgtctcggtctcgatctttggccttggtagtttgggtgggcgagaggcggcttcgtgcgcgcccagatcggtgcgcgggaggggcgggatctcgcggctggggctctcgccggcgtggatcaggcccggatctcgcggggaatggggctctcggatgtagatctgcgatccgccgttgttgggggagatgatggggggtttaaaatttccgccatgctaaacaagatcaggaagaggggaaaagggcactatggtttatatttttatatatttctgctgcttcgtcaggcttagatgtgctagatctttctttcttctttttgtgggtagaatttgaatccctcagcattgttcatcggtagtttttcttttcatgatttgtgacaaatgcagcctcgtgcggagcttttttgtaggtagaaggatcctcgactctagaggatcgctcaggaaggccgctgagatagacgccatggcggccaatgcgggcggcggtggagcgggaggaggcagcggcagcggcagcgtggctgcgccggcggtgtgccgccccagcggctcgcggtggacgccgacgccggagcagatcaggatgctgaaggagctctactacggctgcggcatccggtcgcccagctcggagcagatccagcgcatcaccgccatgctgcggcagcacggcaagatcgagggcaagaacgtcttctactggttccagaaccacaaggcccgcgagcgccagaagcgccgcctcaccagcctcgacgtcaacgtgcccgccgccggcgcggccgacgccaccaccagccaactcggcgtcctctcgctgtcgtcgccgccgccttcaggcgcggcgcctccctcgcccaccctcggcttctacgccgccggcaatggcggcggatcggctgtgctgctggacacgagttccgactggggcagcagcggcgctgctatggccaccgagacatgcttcctgcaggactacatgggcgtgacggacacgggcagctcgtcgcagtggccacgcttctcgtcgtcggacacgataatggcggcggccgcggcgcgggcggcgacgacgcgggcgcccgagacgctccctctcttcccgacctgcggcgacgacggcggcagcggtagcagcagctacttgccgttctggggtgccgcgtccacaactgccggcgccacttcttccgttgcgatccagcagcaacaccagctgcaggagcagtacagcttttacagcaacagcaacagcacccagctggccggcaccggcaaccaagacgtatcggcaacagcagcagcagccgccgccctggagctgagcctcagctcatggtgctccccttaccctgctgcagggagtatgtgagagcaacgcgagctgccactgctcttcactgatgtctctggaatggaaggaggaggaagtgagcatagcgttggtgcgttgctgtcaagggcgaattgtaccacatggttaacctagacttgtccatcttctggattggccaacttaattaatgtatgaaataaaaggatgcacacatagtgacatgctaatcactataatgtgggcatcaaagttgtgtgttatgtgtaattactagttatctgaataaaagagaaagagatcatccatatttcttatcctaaatgaatgtcacgtgtctttataattctttgatgaaccagatgcatttcattaaccaaatccatatacatataaatattaatcatatataattaatatcaattgggttagcaaaacaaatctagtctaggtgtgttttgcgaatgcggccgcgaggtaccatcatttaaatccataccacattggcctaga

SEQ ID NO: 140 - DNA, 1872 bp, Artificial Sequence
  GRF5~GIF1
atgctgagctcggcatcctcggccgcgggagcggccatggggatgggcggcggcgggtacgcgcaccagcccccgccacagcgcacggtcttcaccgccgcgcagtgggcggagctggagcagcaggcgctcatctacaagtacctcatggccggcgtccccgtcccgcccgacctcctcctccccgtccgccccggccccgccgccgccttctccttcgccggccccgccgccgcgtcgcccttctaccaccaacaccacccgtccctgagctactacgcctactacggcaagaaactggacccggagccgtggcggtgccgccgcaccgacggcaagaagtggcggtgctccaaggaggcgcaccccgactccaagtactgcgagcgccacatgcaccgtggccgcaaccgttcaagaaagcctgtggaatccaagaccgcctcgtcgtcgtcgcccgcgcacccgtcgccgccccagctgtccaccgtcaccaccaccgcgcctctcgagccccttgcagcggcggggggcaaggtccacggcctgtccctcggcggcggcgctgctggctcgtcgcacctcggcgtcgatgcttcgaatgctcactatcgttatggtagcaacaggtaccctctcggagctaaaccggacggcggcgagttgagcttcttctcaggagcgtcatcggggaacaactcgaggggcggcttcaccatcgactctccatcagataacaactcgtggcactccgccctggcgtccagcgtgcccccgttcacgctgtcgacgaagagcggggactccggcctcctgcccggcgcctacgcctcctactcccagtcccactcccacatggagccgccgcgggagctcgggcaggtcaccatcgcctcgctggcgcaggagcaggagcgccagcagccgttcagtggtgggatgctcgggaacgtgaagcaggagaaccagaaccagccgctgcggcccttcttcgacgagtggcccgggacgcgggcggactcgtggccgccggagatggacggcgcgccgcgggccggcaggacctccttctcctcctccaccacccagctctccatctccatcccgatgcccagatgtgagctgcatctcagaaaccagaactctggtggaggcggcagcggtggcggaggctccggaggcggtggcatgcagcagcaacacctgatgcagatgaaccagaacatgatggggggctacacctctcctgccgccgtgaccaccgatctcatccagcagtacctggacgagaacaagcagctgatcctggccatcctcgacaaccagaacaatggcaaggcggaggagtgcgaacggcaccaagctaagctccagcacaacctcatgtacctggccgccatcgctgacagccagccgccacagaccgcgccactatcacagtacccgtccaacctgatgatgcagccgggccctcggtacatgccaccgcagtccgggcagatgatgaacccgcagtcgctgatggcggcgcggtcctccatgatgtacgcgcacccgtccctgtcgccactccagcagcagcaggcggcgcacggacagctgggtatggctccagggggcggcggtggcggcacgaccagcgggttcagcatcctccacggcgaggccagcatgggcggtggtggtgctggcgcaggcgccggcaacaacatgatgaacgccggcatgttctcgggctttggccgcagcggcagtggcgccaaggaagggtcgacctctctgtcggttgacgtccggggtggaaccagctccggcgcgcagagcggggacggcgagtacctcaaagtcggcaccgaggaagaaggcagttag

SEQ ID NO: 141 - protein, 623 aa, Artificial Sequence
  GRF5~GIF1 PRT
MLSSASSAAGAAMGMGGGGYAHQPPPQRTVFTAAQWAELEQQALIYKYLMAGVPVPPDLLLPVRPGPAAAFSFAGPAAASPFYHQHHPSLSYYAYYGKKLDPEPWRCRRTDGKKWRCSKEAHPDSKYCERHMHRGRNRSRKPVESKTASSSSPAHPSPPQLSTVTTTAPLEPLAAAGGKVHGLSLGGGAAGSSHLGVDASNAHYRYGSNRYPLGAKPDGGELSFFSGASSGNNSRGGFTIDSPSDNNSWHSALASSVPPFTLSTKSGDSGLLPGAYASYSQSHSHMEPPRELGQVTIASLAQEQERQQPFSGGMLGNVKQENQNQPLRPFFDEWPGTRADSWPPEMDGAPRAGRTSFSSSTTQLSISIPMPRCELHLRNQNSGGGGSGGGGSGGGGMQQQHLMQMNQNMMGGYTSPAAVTTDLIQQYLDENKQLILAILDNQNNGKAEECERHQAKLQHNLMYLAAIADSQPPQTAPLSQYPSNLMMQPGPRYMPPQSGQMMNPQSLMAARSSMMYAHPSLSPLQQQQAAHGQLGMAPGGGGGGTTSGFSILHGEASMGGGGAGAGAGNNMMNAGMFSGFGRSGSGAKEGSTSLSVDVRGGTSSGAQSGDGEYLKVGTEEEGS

SEQ ID NO: 142 - DNA, 1077 bp, Zea mays
atggagcggttcggcctggacggcggcggtggcggtggcgagctgccgccggggttccggttccacccgacggacgaggagctcatcacctactacctcctccgcaaggccgtggacggcagcttctgcggccgcgccatcgcggagatcgacctgaacaagtgcgagccatgggagctcccggacaaggcgaagatgggggagaaggagtggtacttctacagcctccgcgaccgcaagtacccgacgggcctgcgcaccaaccgcgccacggtggccggctactggaaggccaccggcaaggaccgcgagatccgcagcggccgcaccggcgcgctggtgggcatgaagaagacgctcgtcttctaccgcggccgcgcccccaagggacagaagacgcactgggtcatgcacgagtaccgcctcgagggcgcctacgcctaccatttcctccccagctccacaaggcaggacgagtgggtgatcgcgagggtgttccagaagcccggcgaggtcccacctgcagcccgcaagcaccgcctcggcgcccttagcagcactaccggcaccgccgcgggcgattcctgcttctcggactctacctcggcctccatcggcggcgcgtcgtcgtcatccacgcctggcccgctgttcgcgtcggcggccgccgccgtggccaatgccggcgccgccgacggcgacaccagctcctactgcggcggcgctgccaaccatggcaacctggtcaccggccgtgagctcgtgccctgcttctccactgccaccattaacggccccctagttgccgccgcgctcggcatcgggcagccgtacaacgcagccccgctgccgttcgagcagcagccgccgcctccggccttcctgccgagcctgcgttcccttcaggacaacctccagcttccaccgttcctctcagcaggcggtctgggcggcggcggggctctccactggctccccgccggcggcatggaggtcaaggtcgagggccgctcggcgccaccgcagatggctgtcggccccggccagctcgatggcgctttcggctggagcttctag

SEQ ID NO: 143 - DNA, 879 bp, Arabidopsis thaliana
atggagcctcctcagcaccaacatcaccaccatcaggccgatcaagagtccgggaacaacaacaacaacaagtccggttccggagggtacacttgcagacagacctccaccagatggacacctaccactgagcagatcaagatcctgaaggagttgtactacaacaatgccatccgctcccctactgctgatcagattcagaagatcaccgctcgcctgcgtcaattcggtaagatcgagggtaagaacgtcttctactggttccagaaccacaaggctcgtgagaggcagaagaagcgtttcaacgggactaacatgaccactccttcctcatcacccaattctgttatgatggccgccaacgaccactaccatcctttgcttcatcaccaccacggagttcctatgcaaagacccgcaaactccgtcaacgtgaagttgaaccaggaccatcacctctaccaccacaacaagccctacccctctttcaacaacgggaatctcaaccatgcctcctctggaaccgaatgtggagttgtcaacgcctccaacggctacatgtcttcccacgtgtacggctctatggagcaagattgctccatgaactacaacaacgttggaggcggatgggcaaacatggatcaccactactcctccgctccctacaacttcttcgatagggctaaacctctcttcggcttggagggacaccaagaagaagaggaatgcggaggtgatgcttacttggaacacagaaggactctccctctctttccaatgcacggtgaggaccacatcaacggaggatctggcgctatctggaagtatggacagtccgaggtcagaccatgcgcttccctggaattgagactgaactag

SEQ ID NO: 144 - protein, 292 aa, Arabidopsis thaliana
MEPPQHQHHHHQADQESGNNNNNKSGSGGYTCRQTSTRWTPTTEQIKILKELYYNNAIRSPTADQIQKITARLRQFGKIEGKNVFYWFQNHKARERQKKRFNGTNMTTPSSSPNSVMMAANDHYHPLLHHHHGVPMQRPANSVNVKLNQDHHLYHHNKPYPSFNNGNLNHASSGTECGVVNASNGYMSSHVYGSMEQDCSMNYNNVGGGWANMDHHYSSAPYNFFDRAKPLFGLEGHQEEEECGGDAYLEHRRTLPLFPMHGEDHINGGSGAIWKYGQSEVRPCASLELRLN

SEQ ID NO: 145 - DNA, 876 bp, Lotus japonicus
atggaacaaccacctcaacaacaacaacagaatgaggatggtggtgggagtagtggtggaaaaggggggtttctgagcaggcaaagcagtacacggtggactcccaccacagaccagataagaatattgaaggagctttactacaacaatggaataagatccccgagtgcagagcagattcagaggatctctgctcggctgagacagtacggcaagattgaaggcaagaatgtcttttactggttccagaaccacaaagctagagagaggcagaagaaaaggttcacttctgaaactcatcttcttcccaatcccatacaacaacaacaaagaaatggaactaatgctgcttggaagcaacctgaagaacaacccattattaaccacaccaagtattctagtaacaacatttcagctcctgcagggatcatcacttctgctccatcttcttctgcagagattgtttctgttggccagataggaaactttggttatggatctttgcctatggaaaagagttttagggactgctcaatatctgctggaggcaacacaggctatgctggaagtgctataaaccacaacctgggatggatgggtgtggatccatattcctcagcctacaccaatttctttgacaaaataaggccaactgaagaagaaaccatggaagaagaaggacaagagaatggttcaccagagattgaaacccttcctttattcccgatgcatggtgaggacattcatagtggctatttcaacctcaagtctaattcttctcactatgctggtggctggtaccagactgaagaagggtacttcaacaatggttctcgtgcttccttggagctcagcctcaaatatcctgattttgct

SEQ ID NO: 146 - protein, 292 aa, Lotus japonicus
MEQPPQQQQQNEDGGGSSGGKGGFLSRQSSTRWTPTTDQIRILKELYYNNGIRSPSAEQIQRISARLRQYGKIEGKNVFYWFQNHKARERQKKRFTSETHLLPNPIQQQQRNGTNAAWKQPEEQPIINHTKYSSNNISAPAGIITSAPSSSAEIVSVGQIGNFGYGSLPMEKSFRDCSISAGGNTGYAGSAINHNLGWMGVDPYSSAYTNFFDKIRPTEEETMEEEGQENGSPEIETLPLFPMHGEDIHSGYFNLKSNSSHYAGGWYQTEEGYFNNGSRASLELSLKYPDFA

SEQ ID NO: 147 - DNA, 888 bp, Glycine max
atggaacctcaacaacaacaacaacaagcacaagggagccaacaacaacaacaaaacgaggatggtggcagtggaaaaggggggtttctgagcaggcaaagtagtacacggtggactccaacaaacgaccagataagaatattgaaggaactttactacaacaatggaattagatccccgagtgcagagcagattcagaggatctctgctaggctgaggcagtacggtaagattgaaggcaagaatgtcttttattggttccagaaccacaaagctcgagaaaggcagaagaaaaggttcacttctgatcataatcataataatgtccccatgcaaagacccccaactaatccttctgctgcttggaaacctgatctagctgatcccattcacaccaccaagtattgtaacatctcttctactgcagggatctcttcggcatcatcttctgttgagatggttactgtgggacagatggggaattatgggtatggttctgtgcctatggagaaaagttttagggactgctcgatatcagctgggggtagcagtggccatgttggattaataaaccacaacttggggtgggttggtgtggacccatataattcctcaacctatgccaacttctttgacaaaataaggccaagtgatcaagaaacccttgaagaagaagcagagaacattggtgctactaagattgaaaccctccctttattccctatgcacggtgaggacatccacggctattgcaacctcaagtctaattcgtataactatgatggaaacggctggtatcatactgaagaagggttcaagaatgcttctcgtgcttccttggagctcagtctcaactcctacactcgcaggtctccagattatgcttaa

SEQ ID NO: 148 - protein, 295 aa, Glycine max
MEPQQQQQQAQGSQQQQQNEDGGSGKGGFLSRQSSTRWTPTNDQIRILKELYYNNGIRSPSAEQIQRISARLRQYGKIEGKNVFYWFQNHKARERQKKRFTSDHNHNNVPMQRPPTNPSAAWKPDLADPIHTTKYCNISSTAGISSASSSVEMVTVGQMGNYGYGSVPMEKSFRDCSISAGGSSGHVGLINHNLGWVGVDPYNSSTYANFFDKIRPSDQETLEEEAENIGATKIETLPLFPMHGEDIHGYCNLKSNSYNYDGNGWYHTEEGFKNASRASLELSLNSYTRRSPDYA

SEQ ID NO: 149 - DNA, 897 bp, Camelina sativa
atggagccaccgcagcatcagcatcatcaccatcaagccgaccaagaaagcggcaataacaacaagtccggttctggtggttacacttgtcgccaaaccagcacgaggtggacaccaacgacggagcagatcaaaatgctcaaagagctttattacaatagtggaatccggtcaccaacagcagatcagatccagaagatcactgctaggctgcgacagttcggaaagatcgagggcaagaacgtcttttactggttccagaaccacaaggctcgtgagcgtcagaagaagagattcaacggcacaaccatgaccacaccgtcttcatctcccaactcggttatgatggctaatgatcattatcatcaacatctccctctacttcaccatcatcatggcgttcccatgcagagacctgcgaactccgtcaacgttaaacttaaccaagagcatcatctctatcatcagaacaagtcatatcccagcttcaataacgggaatttaaatcatgcaagctcaggtactgaatgtggtgctgttaatgcttctaatggctactcaagtagccatatctatggatctatggaacaagactgttctatgaattacaacaacgtaggtggaggatggacggcaaacatggatcataatcatcattactcatcagcaccttacaacttcttcgatagaccaaaacctccgtttggtctagacggtcatcaggaagaagaagaatgtggtggcgatgcttatctggaacatcgacgtacgcttcctctcttccctatgcatggtgaagatcacataaatggtgccagctggaagtatggccaactggacggtcatgattgtcatggtagaggcccttgcgcttctcttgagcttcgtttgaactag

SEQ ID NO: 150 - protein, 298 aa, Camelina sativa
MEPPQHQHHHHQADQESGNNNKSGSGGYTCRQTSTRWTPTTEQIKMLKELYYNSGIRSPTADQIQKITARLRQFGKIEGKNVFYWFQNHKARERQKKRFNGTTMTTPSSSPNSVMMANDHYHQHLPLLHHHHGVPMQRPANSVNVKLNQEHHLYHQNKSYPSFNNGNLNHASSGTECGAVNASNGYSSSHIYGSMEQDCSMNYNNVGGGWTANMDHNHHYSSAPYNFFDRPKPPFGLDGHQEEEECGGDAYLEHRRTLPLFPMHGEDHINGASWKYGQLDGHDCHGRGPCASLELRLN

SEQ ID NO: 151 - DNA, 897 bp, Capsella rubella
atggagccaccacagcatcagcatcatcatcatcaagccgaccaagaaagcggcaacaacaacaacaagtccggctctggtggctacacgtgtcgccaaaccagcactaggtggacaccaacgacggagcagatcagaatcctcaaggatctttactacaacagtgcgatccggtcaccaacagccgatcagatccagaagatcaccgcgaggctgagacagtacgggaagatcgaaggcaagaacgtcttttactggttccagaaccataaggctcgtgagcgtcagaagaagagattcaacggcacaaccatgaccactccatcttcatctcccaactcggttatggtggctaatgatcactatcatcctctacttcaccatcatcatggtgttcccatgcaaaggcctgctaactccgtcaacgtcaaacttaaccaagaccatcatctctatcatcagaacaagtcatatcccaccttcaacaatgggaatttaaatcatggaagctcaggtactgaatgtggtgttgttaatgcttctaatggctacatgagtagccatgtctatggatctatggaacaagactgttcaatgaactacaacaacgtaggtactggaggatacggatcaaacatggatcatagtcatcattactcatctgcaccatacaacttctttgatagatcaaagcctctctttggtctagaaggtcatcaagaagatgaagaagaatatggtataggcgatgcttatctggaacatcgacgtacgcttcctctcttccctatgcatggtgaagatcacatgaacggtagtggtgctagctggaagtttgatggccgtgattgccatggtagaggcccttgcgcttctcttgagcttcgtctgaactag

SEQ ID NO: 152 - protein, 298 aa, Capsella rubella
MEPPQHQHHHHQADQESGNNNNKSGSGGYTCRQTSTRWTPTTEQIRILKDLYYNSAIRSPTADQIQKITARLRQYGKIEGKNVFYWFQNHKARERQKKRFNGTTMTTPSSSPNSVMVANDHYHPLLHHHHGVPMQRPANSVNVKLNQDHHLYHQNKSYPTFNNGNLNHGSSGTECGVVNASNGYMSSHVYGSMEQDCSMNYNNVGTGGYGSNMDHSHHYSSAPYNFFDRSKPLFGLEGHQEDEEEYGIGDAYLEHRRTLPLFPMHGEDHMNGSGASWKFDGRDCHGRGPCASLELRLN

SEQ ID NO: 153 - DNA, 588 bp, Arabis alpina
atggctactcatgtagccattagaagcattaacagcaccacattcagaacctgaacttgcatgatttaaattcccgttattgaagctgggatatgatttgttctgatgaagcagatggtgttcttggtcatgaagcttaacgttgagagaagcaggtctctgcatggaaacaccatgatgatgttgaagaagaggatgatgatgatggttatgatgataacgatcactggccatcataactgagttgggcgatgaagacgttggtgtggtggtcatggttgtgccattgaatctcttcttctgacgctcacgagccttatggttctgaaaccagtaaaagacgtttttgccctcgatcttaccatattgtctcagccttgcagagatcttctggatctcatcagcagttggtgaccggattccactattgtagtaaagatctttgaggattctgatttgctccgtggttggagtccatctcgtgctggtttgacgacaagtgtaaccaccagaaccggacttgttgttgttgttgccgctttcttggtcggcttgatgatgatgatgatgatgttgcggtggctccat

SEQ ID NO: 154 - protein, 304 aa, Arabis alpina
MEPPQHHHHHHQADQESGNNNNKSGSGGYTCRQTSTRWTPTTEQIRILKDLYYNSGIRSPTADEIQKISARLRQYGKIEGKNVFYWFQNHKARERQKKRFNGTTMTTTPTSSSPNSVMMASDRYHHNHHHHPLLQHHHGVSMQRPASLNVKLHDQEHHLLHQNKSYPSFNNGNLNHASSGSECGAVNASNGYMSSHVYGSMEQDYSMSNNNIGGGGWSNMDHNHHYSSPAYNFFDRPKPLFGLEGHQEEDQYGGDAYLEHRRTLPLFPMHGEDHINGGGGAIWKYRQLDGLELRLNSYAGVAPE

SEQ ID NO: 155 - DNA, 873 bp, Raphanus sativus
atggagccaccgcaacattaccatcaagccgatcaagaaagcggcaacaacaacaagtccgtctctggtggttacacgtgtcgtcaaacgagcacaagatggacaccaacaaccgatcaaatcagaatactcaaagatctttactacaacaatggagtccggtcaccaacagccgaccagatccagaagatctctgcaacgctgagacagtacggaaaaatcgagggaaaaaatgtcttttactggtttcaaaaccataaggctcgtgagcgacagaagaagagattcaacagcacaaccatggccacaccaacgtcttcatcgcccaactcggttatgatgatggctagtgatcaccatcatcatcatggtgttaccatccagagacctgctttggtcaacgttaagctcgaccaagaaaatcatatgtttcaccagaacagatcatatcccagctccaataacgggagtataaatcatgcaagttcaggcacggaatatggtgttttcggcgcttctaatggctacattagtaaccatatctatggatctatggaacaagactgttcaatgagctacaacagcgtaggtggaggatggacaaacatggatcataatcatcattactcaactccagcttacaacttctttgatagaccatcgcctctgtctggactagaaggtcatcaagaagaaggacaatatggtggcgattcttatctggaacatcgacgtacacttcctctcttccctttgcacggtgaggatcacatcaacggtggtggtggttccatcttgaagtacggacaatcagacggttgtgatcgttatggtagaggcccttgtgcttctcttaagctatgtctgaactga

SEQ ID NO: 156 - protein, 290 aa, Raphanus sativus
MEPPQHYHQADQESGNNNKSVSGGYTCRQTSTRWTPTTDQIRILKDLYYNNGVRSPTADQIQKISATLRQYGKIEGKNVFYWFQNHKARERQKKRFNSTTMATPTSSSPNSVMMMASDHHHHHGVTIQRPALVNVKLDQENHMFHQNRSYPSSNNGSINHASSGTEYGVFGASNGYISNHIYGSMEQDCSMSYNSVGGGWTNMDHNHHYSTPAYNFFDRPSPLSGLEGHQEEGQYGGDSYLEHRRTLPLFPLHGEDHINGGGGSILKYGQSDGCDRYGRGPCASLKLCLN

SEQ ID NO: 157 - DNA, 885 bp, Brassica napus
atggagccagcgcaacatcaccatcaagccgaccaagaaagcggcaacaacaacaagtccgtctctggtggttacacgtgtcgtcaaacgagtacaagatggacaccaacgaccgatcaaatcagaatactcaaagatctttactacaacaacggagtccggtcaccaacagccgaccagatccagaagatctctgcaaggctgagacagtacggaaagatcgagggaaaaaatgtcttttactggtttcaaaaccataaggctcgtgagcgacagaagaagagattcaacagcacaaccatgaccataccaacgtcttcatcgcccaactcggttatgatggctagtgatcactatcaccataaccatcatcatcatggcgttaccatccagagacctgctttggtcaacgttaagctcgaccaagaaaatcatatgtttcatcagaacagatcatatcccagcttcaataacgggaatacaaatcatgcaagttcaggcacggaatatggtgttttcagtgcttctaatggctacattagtagccatatctatgaacctatggaacaagactgttcaatgagctacaacaacgtaggtggaggatggacaaacatagatcataatcaccattactcaactccagcctacaacttcttagatagaccaatgcctctgtctggactagaaggtcatcatcaagaagaaggagaatatggtggcgatgcttatctggaacatagacgcacacttcctctcttccctttgcacggtgaggatcacatcaacggcggtggtggttccatctggaagtacagacaatcggacggttgtgatcgttatggtagaggcccttgtgcttctcttaagctgtgtctgaactga

SEQ ID NO: 158 - protein, 294 aa, Brassica napus
MEPAQHHHQADQESGNNNKSVSGGYTCRQTSTRWTPTTDQIRILKDLYYNNGVRSPTADQIQKISARLRQYGKIEGKNVFYWFQNHKARERQKKRFNSTTMTIPTSSSPNSVMMASDHYHHNHHHHGVTIQRPALVNVKLDQENHMFHQNRSYPSFNNGNTNHASSGTEYGVFSASNGYISSHIYEPMEQDCSMSYNNVGGGWTNIDHNHHYSTPAYNFLDRPMPLSGLEGHHQEEGEYGGDAYLEHRRTLPLFPLHGEDHINGGGGSIWKYRQSDGCDRYGRGPCASLKLCLN

SEQ ID NO: 159 - DNA, 885 bp, Brassica oleracea
atggagccagcgcaacatcaccatcaagccgaccaagaaagcggcaacaacaacaagtccgtctctggtggttacacgtgtcgtcaaacgagtacaagatggacaccaacgaccgatcaaatcagaatactcaaagatctttactacaacaacggagtccggtcaccaacagccgaccagatccagaagatctctgcaaggctgagacagtacggaaagatcgagggaaaaaatgtcttttactggtttcaaaaccataaggctcgtgagcgacagaagaagagattcaacagcacaaccatgaccataccaacgtcttcatcgcccaactcggttatgatggctagtgatcactatcaccataaccatcatcatcatggcgttaccatccagagacctgctttggtcaacgttaagctcgaccaagaaaatcatatgtttcatcagaacagatcatatcccagcttcaataacgggaatataaatcatgcaagttcaggcacggaatatggtgttttcagtgcttctaatggctacattagtagccatatctatggacctatggaacaagactgttcaatgagctacaacaacgtaggtggaggatggacaaatatagatcataatcaccattactcaactccagcctacaacttcttagatagaccaatgcctctgtctggactagaaggtcatcatcaagaagaaggagaatatggtggcgatgcttatctggaacatagacgcacacttcctctcttccctttgcacggtgaggatcacatcaacggcggtggtggttccatctggaagtacagacaatcggacggttgtgatcgttatggtagaggcccttgtgcttctcttaagctgtgtctgaactga

SEQ ID NO: 160 - protein, 294 aa, Brassica oleracea
MEPAQHHHQADQESGNNNKSVSGGYTCRQTSTRWTPTTDQIRILKDLYYNNGVRSPTADQIQKISARLRQYGKIEGKNVFYWFQNHKARERQKKRFNSTTMTIPTSSSPNSVMMASDHYHHNHHHHGVTIQRPALVNVKLDQENHMFHQNRSYPSFNNGNINHASSGTEYGVFSASNGYISSHIYGPMEQDCSMSYNNVGGGWTNIDHNHHYSTPAYNFLDRPMPLSGLEGHHQEEGEYGGDAYLEHRRTLPLFPLHGEDHINGGGGSIWKYRQSDGCDRYGRGPCASLKLCLN

SEQ ID NO: 161 - DNA, 882 bp, Helianthus annuus
atggaaactcaacaacaacaagcagatattcaagattttgggaacaaaaacagtaacacctatgcatgcaggcaaagcagtactaggtggacacccacaagtgatcagatcagaatactgaaagagctctactacaacaatggaatcagatcaccaactgctgatcagattcagagaatcgctgctcaactcagacagtacggcaagattgaaggcaagaacgtgttttattggtttcagaaccataaagctcgtgaacgccagaagaaacggttcactcctactgctcctccaccaccgtctcacttctccgatcatattaaccaccatcttcccaacgctgcccccatgcagattccgtctcaccaccaccactaccaccatcaagaaccaccacatgtctatgctcaccctcacaaactctacaccactcatcacattggggttggttcttcttcacaaggagtgatgggtgtagggtgtggctatggatctgttgctatggagaagagtttcaggaagtgttcaatatcaccaccgggagagagtaaggccacaggaggaattggccggaatatcggttcaagatcacggataagtgtcgattcgtgttccttcttcgacacaattaagccaaagacatatgagatgtttgagaatcatgatcaagatgaagaacaaggagagccttcaactgagatcgaaacacttccattattcccgattcacgacggcaaccatcatgatttcttcggcatgaggacggcaaatctgcaattggagcaaggcactggaggttactacactggaggaagctggtatcggtctgatgagagggcgtctcttgagctcagtctcaactcatatggttattataactaa

SEQ ID NO: 162 - protein, 293 aa, Helianthus annuus
METQQQQADIQDFGNKNSNTYACRQSSTRWTPTSDQIRILKELYYNNGIRSPTADQIQRIAAQLRQYGKIEGKNVFYWFQNHKARERQKKRFTPTAPPPPSHFSDHINHHLPNAAPMQIPSHHHHYHHQEPPHVYAHPHKLYTTHHIGVGSSSQGVMGVGCGYGSVAMEKSFRKCSISPPGESKATGGIGRNIGSRSRISVDSCSFFDTIKPKTYEMFENHDQDEEQGEPSTEIETLPLFPIHDGNHHDFFGMRTANLQLEQGTGGYYTGGSWYRSDERASLELSLNSYGYYN

SEQ ID NO: 163 - DNA, 795 bp, Populus trichocarpa
atggaacctcaccaacaacaaccaaatgaggataataacggtggcgccaaagggaactttctttgcaggcaaaccagtacaaggtggaatcccactactgaccagataagaatattgaaggaactgtactacatcaaaggtgttaggtccccaaatggagctgagattcagcagatctctgctaggcttagaaagtacggcaagattgaaggcaagaatgtattttattggtttcagaaccataaagctcgtgagaggcaaaagaaaagactcaccaatgaagtccccatgcaacaaagaactgcctggaaacctgaagattattactcttacaagtactccaacagtaataataatcctgggttttcttcggcttcttcatctgcaaataccggtgtggttactgttgggcagacagatagccatggatatggatcggtaaccatgcaggagaagaattcttgggactgttcagcaccagctggtggtagcaatggtgctggtagtggatccatgagcaatattaactatggatcaggggttgacattaactctcacagttcatcctatgctgtatttggtcaagaacaagaagcagctgcaaagattgagactcttcctctatttccaatgcttggtgaggacatcagtagctctttcaacatcaacaatatcaacccagacttttattacagtagcggctgtggctatggtgattatggcaatgacacttcttcccgtacttccctggaccttagtctctactcctacaatggccaaccacaagattattaa

SEQ ID NO: 164 - protein, 264 aa, Populus trichocarpa
MEPHQQQPNEDNNGGAKGNFLCRQTSTRWNPTTDQIRILKELYYIKGVRSPNGAEIQQISARLRKYGKIEGKNVFYWFQNHKARERQKKRLTNEVPMQQRTAWKPEDYYSYKYSNSNNNPGFSSASSSANTGVVTVGQTDSHGYGSVTMQEKNSWDCSAPAGGSNGAGSGSMSNINYGSGVDINSHSSSYAVFGQEQEAAAKIETLPLFPMLGEDISSSFNINNINPDFYYSSGCGYGDYGNDTSSRTSLDLSLYSYNGQPQDY

SEQ ID NO: 165 - DNA, 843 bp, Vitus vinifera
atggaacctcaacaacagctccagcagcagcagcaacaaaaccaacaacagccaaacgaggatagcggcagcagcaaaggcagttttctgtgcaggcaaagcagtacacgctggactcctacaactgaccagataagaatattgaaggacctttactacaacaatggagttaggtccccaagtgctgaacagattcagaggatctcagctaggctgaggcagtacggcaagatcgaaggcaagaacgtcttttattggtttcagaaccataaagctcgtgaaaggcagaagaagcgattcactactgatatgcccatgcaaagatcccttggaaatgccggttggagacctgatgatcccattcacaacaaatttcataccattcccactcctgggatatcttccccatcttcttcttcttcacccagtgtgcttgctgttgggcagatgggaagctttggatatggatctgtggagaggagttttacagactgttcaatatcagcaggtggtggtcgtggtggggttggtggatctataaaccagagcttcgaatgggttggcatggacccatattcttcatcttatgcactctttgacaagagaaaaacaatgggtgaaagcttcgaagaagagcaagaagaagaagcaactccggagattgaaacgctcccactctttcccatgcacgctgaggatatcactggcttttgcaacattaagcccgaatccgacgcctactactccggctggtacaggcccgccgacgccaagaccagttcccgcacttctcttgagcttagcctcaactcctacgccggcaggtccccggattccccctga

SEQ ID NO: 166 - protein, 280 aa, Vitus vinifera
MEPQQQLQQQQQQNQQQPNEDSGSSKGSFLCRQSSTRWTPTTDQIRILKDLYYNNGVRSPSAEQIQRISARLRQYGKIEGKNVFYWFQNHKARERQKKRFTTDMPMQRSLGNAGWRPDDPIHNKFHTIPTPGISSPSSSSSPSVLAVGQMGSFGYGSVERSFTDCSISAGGGRGGVGGSINQSFEWVGMDPYSSSYALFDKRKTMGESFEEEQEEEATPEIETLPLFPMHAEDITGFCNIKPESDAYYSGWYRPADAKTSSRTSLELSLNSYAGRSPDSP

SEQ ID NO: 167 - DNA, 879 bp, Arabidopsis thaliana; identical to SEQ ID NO: 143

SEQ ID NO: 168 - protein, 292 aa, Arabidopsis thaliana; identical to SEQ ID NO: 144

SEQ ID NO: 169 - DNA, 879 bp, Lotus japonicus
atggaacaacctccccaacagcagcaacaaaacgaagacggaggcggatcaagtgggggaaaaggagggttcctcagtaggcagtccagtactaggtggacacccaccacagaccagattcgcatcctcaaggagctctactacaacaacggaatacgctcaccctccgcagaacagatccagaggatctccgcaagactcagacagtacggcaagatcgagggcaagaacgtcttctactggttccaaaaccacaaagcccgcgaaaggcagaagaagcgcttcaccagtgagacacacttgctgcccaacccaattcagcagcaacagcgcaacggaacaaacgcagcttggaagcagccagaggagcaacccatcatcaaccacaccaagtactcctccaacaacatatccgcacccgcagggattatcacaagtgccccatcttcttccgcagaaatagtctccgtggggcagatcggaaacttcggatacggatctctgccaatggagaagtccttcagggactgcagtatctcagccggaggtaacacaggatacgccgggtctgctattaaccacaacctcggatggatgggagtcgacccatactcctctgcttacaccaacttcttcgacaaaatacgcccaacagaggaggagactatggaggaagaaggacaggagaacggctcaccagaaatcgagaccctgcctttgttcccaatgcacggagaggacatccactccggctacttcaacctcaagagtaactcatcccactacgctggcggatggtaccaaactgaggaaggctacttcaacaacggatcacgcgccagtctggagctgtccctgaagtaccctgacttcgcttag

SEQ ID NO: 170 - protein, 292 aa, Lotus japonicus; identical to SEQ ID NO: 146

SEQ ID NO: 171 - DNA, 909 bp, Medicago truncatula
atggaacaacctcagcagcagcagcaaccacagacccaacagcactctccaaacaacggaatcatggggtccagacagagttccaccagatggaccccaacaaccgaccagatccgcattctcaaagacctctactacaacaacggaataaggtctccaagtgccgagcaaatccagaggatctccgcaaggctcagacagtacgggaagatcgagggcaagaacgtcttctactggttccaaaaccacaaagccagagagcgccagaaaaagcgcttcacctccgacgtcaacgtcgtccctatcatccagcgcgcccccaacaacaatactatcataagtgccgccaactggaagcctgaccaccacgaacaacagcagaacattaatgtccacacaaaccactccacatacaacatctcctccgctggcctcagttctgcttcctgctcctcagcagaaatggtcactgtggggcaaataggcaactacggctacgggtctgtcccaatggagaagtctttccgcgaatgcaccatctcagctggatgctcatcatcccaggttggctcaaccataaacccccacatcggctggatcggacaccacgtcgacccatattcaagtgcctacgctaacctcttcgagaaaatacgccccaacgaggagatcatggaagagtacgaccagggacaggaaaacggttccccagagatcgagacactcccactcttccctatgcacggagaagacatccacggagggtattgcaacctcaaatcaaattcctccaactacggaggatggtaccaggcagaagacgcagggttcatgtacggaagtcgtaccacttctctcgagctcagtctgaactcctacggatgcaggtcccccgactacgccaattaa

SEQ ID NO: 172 - protein, 302 aa, Medicago truncatula
MEQPQQQQQPQTQQHSPNNGIMGSRQSSTRWTPTTDQIRILKDLYYNNGIRSPSAEQIQRISARLRQYGKIEGKNVFYWFQNHKARERQKKRFTSDVNVVPIIQRAPNNNTIISAANWKPDHHEQQQNINVHTNHSTYNISSAGLSSASCSSAEMVTVGQIGNYGYGSVPMEKSFRECTISAGCSSSQVGSTINPHIGWIGHHVDPYSSAYANLFEKIRPNEEIMEEYDQGQENGSPEIETLPLFPMHGEDIHGGYCNLKSNSSNYGGWYQAEDAGFMYGSRTTSLELSLNSYGCRSPDYAN

SEQ ID NO: 173 - DNA, 924 bp, Petunia x hybrida
atggaaacagcacagcaccagcagaacaaccaacagcactacctccaccaacacctctccatcggacaaggaacaaacatcgaggacggcagtaacaagaacaactcctccaacttcatgtgcaggcaaaatagtacccgctggacaccaaccactgaccagatcaggatattaaaggacctctactacaacaacggagtcagatcacctaccgctgaacagatccagagaatctccgccaagctcaggcagtacggcaagatcgagggcaagaacgtcttctactggttccagaaccataaagcccgcgagagacaaaagaagcgcctcatcgccgcagccaccaccgataacactaacctcccaatgcagatgcagttccagagaggagtctggagatcctctgcagacgaccccatccaccacaagtatactaatccaggagtgcactgcccttcagcttcttcccacggagttctcgcagtcggacagaacggcaatcacggatacggagccttggcaatggaaaaatccttccgcgactgctccatcagtccaggcagttccatgtcacaccaccaccaccaaaacttcgcttgggcaggagtcgatccttattcctcaaccacaacctaccctttcctcgagaagaccaagcacttcgagaatgaaaccctcgaagctgatgaagagcagcaagaggaggaccaggagaactactactaccaaaggaccacctctgccatcgaaaccctgcctctcttccctatgcacgaggagaacatctcctccttctgcaacctcaagcaccaggagtcatccggaggattctacaccgagtggtacagagcagacgacaacctcgcagcagccagagcttccctcgagctctccttgaactccttcatcggcaactcctcctag

SEQ ID NO: 174 - protein, 307 aa, Petunia x hybrida
METAQHQQNNQQHYLHQHLSIGQGTNIEDGSNKNNSSNFMCRQNSTRWTPTTDQIRILKDLYYNNGVRSPTAEQIQRISAKLRQYGKIEGKNVFYWFQNHKARERQKKRLIAAATTDNTNLPMQMQFQRGVWRSSADDPIHHKYTNPGVHCPSASSHGVLAVGQNGNHGYGALAMEKSFRDCSISPGSSMSHHHHQNFAWAGVDPYSSTTTYPFLEKTKHFENETLEADEEQQEEDQENYYYQRTTSAIETLPLFPMHEENISSFCNLKHQESSGGFYTEWYRADDNLAAARASLELSLNSFIGNSS

SEQ ID NO: 175 - DNA, 864 bp, Phaseolus vulgaris
atggaaccacagcagccccagggcagtcaaccaaacgaggacggtggaagtgggaaaggcggatttctctccagacagtcctccactaggtggactccaaccactgaccagatcagaatactcaaagacctctactacaacaacggaatcagatccccttccgcagaacagatccaaaggatctccgctaggctcagacagtacgggaagatcgagggcaagaacgtcttctactggttccaaaaccacaaggccagggagagacagaagaagaggttcacctccgacaacgtccccatgcaaagacctgcaccaacaaatgctgcacctccttggaaacccgaccaagaccccattcacaccaagtactccaacatctcctccacaggaatctccagtgcatcctcctcctcagtcgagatgatcaccgtcggacaaatggggaactacgggtacggaagtgtgccaatggaaaagtccttcagagactgctccatatccgccggaggatcttccggtcatgttggaataaaccacaacctcggctgggtgggagtcgatccttactcttctgcatacgccaacttcttcgataaaataagaccaaacgaagagaccctcgaggaagaagaagaggaggaggaggaggaagaagaagaggacggaggagcagaaattgagaccctccccctgttcccaatgcacggagaggacattcacggctactgcaacctcaagtccaacagttacaactacgacggcaacggctggtatcacagtgaggatggcttcaaaaacggcagtagggcctccctcgagctctccctcaactcttacaccagaagatcccccgacttcgcatag

SEQ ID NO: 176 - protein, 287 aa, Phaseolus vulgaris
MEPQQPQGSQPNEDGGSGKGGFLSRQSSTRWTPTTDQIRILKDLYYNNGIRSPSAEQIQRISARLRQYGKIEGKNVFYWFQNHKARERQKKRFTSDNVPMQRPAPTNAAPPWKPDQDPIHTKYSNISSTGISSASSSSVEMITVGQMGNYGYGSVPMEKSFRDCSISAGGSSGHVGINHNLGWVGVDPYSSAYANFFDKIRPNEETLEEEEEEEEEEEEEDGGAEIETLPLFPMHGEDIHGYCNLKSNSYNYDGNGWYHSEDGFKNGSRASLELSLNSYTRRSPDFA

SEQ ID NO: 177 - DNA, 963 bp, Zea mays
atggcggccaacgtgggcgcgggcaggagtgctggcggcggcggagccggcactggcactggcactgctgctggcagcggcggcgtgtcgacggccgtgtgccgccctagcggctcgcggtggacgccgacgccggagcagatcaggatcctcaaggagctctactacggctgcggcatccggtcgcccaactcggagcagatccagcgcatcaccgccatgctgcggcagcacggcaagatcgagggcaagaacgtcttctactggttccagaaccacaaggcccgcgagcgccagaagcgccgcctcaccaacctcgacgtcaacgtgcccgtcgccgccgacgacagcgcccaccgccttggcgtcctctcgttgtcgccttcttcaggttgttcaggcgcggcgcctccgtcgcccaccctcggcttctacgccggcggcaatggctccgctgtgatgctggacacgagttccgattggggcagcgctgctgccatggccactgaggcatgcttcatgcaggactacatgggcgtgatgggcggcgcgtcaccgtgggcatgctcctcctcgtcgtcggaggacccgatggcggcgctggcgctggcgccgaaggtgacccgggcgcccgagacgctccctctcttcccgaccggcggcggcggagacgataggcagcccccgcggccgcggcagtctgtcccagcaggcgaggccatccgcggcggcagcagcagcagcagctaccttccgttctggggtgccgcgcccaccccaactggcagtgccacttccgttgcgatccagcagcaacaccagctgatgcagatgcaagagcagtacagcttttacagcaacgcccagctgctgcccggcaccggcagccaggatgcagcagcaacatccctggagctgagcctcagctcctggtgctccccttaccctgcagggaccatgtga

SEQ ID NO: 178 - protein, 320 aa, Zea mays
MAANVGAGRSAGGGGAGTGTGTAAGSGGVSTAVCRPSGSRWTPTPEQIRILKELYYGCGIRSPNSEQIQRITAMLRQHGKIEGKNVFYWFQNHKARERQKRRLTNLDVNVPVAADDSAHRLGVLSLSPSSGCSGAAPPSPTLGFYAGGNGSAVMLDTSSDWGSAAAMATEACFMQDYMGVMGGASPWACSSSSSEDPMAALALAPKVTRAPETLPLFPTGGGGDDRQPPRPRQSVPAGEAIRGGSSSSSYLPFWGAAPTPTGSATSVAIQQQHQLMQMQEQYSFYSNAQLLPGTGSQDAAATSLELSLSSWCSPYPAGTM

SEQ ID NO: 179 - DNA, 978 bp, Zea mays
atggcggccaatgcgggcggcggtggagcgggaggaggcagcggcagcggcagcgtggctgcgccggcggtgtgccgccccagcggctcgcggtggacgccgacgccggagcagatcaggatgctgaaggagctctactacggctgcggcatccggtcgcccagctcggagcagatccagcgcatcaccgccatgctgcggcagcacggcaagatcgagggcaagaacgtcttctactggttccagaaccacaaggcccgcgagcgccagaagcgccgcctcaccagcctcgacgtcaacgtgcccgccgccggcgcggccgacgccaccaccagccaactcggcgtcctctcgctgtcgtcgccgccttcaggcgcggcgcctccctcgcccaccctcggcttctacgccgccggcaatggcggcggatcggctgggctgctggacacgagttccgactggggcagcagcggcgctgccatggccaccgagacatgcttcctgcaggactacatgggcgtgacggacacgggcagctcgtcgcagtggccatgcttctcgtcgtcggacacgataatggcggcggcggcggccgcggcgcgggtggcgacgacgcgggcgcccgagacactccctctcttcccgacctgcggcgacgacgacgacgacgacagccagcccccgccgcggccgcggcacgcagtcccagtcccggcaggcgagaccatccgcggcggcggcggcagcagcagcagctacttgccgttctggggtgccggtgccgcgtccacaactgccggcgccacttcttccgttgcgatccagcagcaacaccagctgcaggagcagtacagcttttacagcaacagcacccagctggccggcaccggcagccaagacgtatcggcttcagcggccgccctggagctgagcctcagctcatggtgctccccttaccctgctgcagggagcatgtga

SEQ ID NO: 180 - protein, 325 aa, Zea mays
MAANAGGGGAGGGSGSGSVAAPAVCRPSGSRWTPTPEQIRMLKELYYGCGIRSPSSEQIQRITAMLRQHGKIEGKNVFYWFQNHKARERQKRRLTSLDVNVPAAGAADATTSQLGVLSLSSPPSGAAPPSPTLGFYAAGNGGGSAGLLDTSSDWGSSGAAMATETCFLQDYMGVTDTGSSSQWPCFSSSDTIMAAAAAAARVATTRAPETLPLFPTCGDDDDDDSQPPPRPRHAVPVPAGETIRGGGGSSSSYLPFWGAGAASTTAGATSSVAIQQQHQLQEQYSFYSNSTQLAGTGSQDVSASAAALELSLSSWCSPYPAAGSM

SEQ ID NO: 181 - DNA, 666 bp, Zea mays
atggaggcgctgagcgggcgggtaggcgtcaagtgcgggcggtggaaccctacggcggagcaggtgaaggtcctgacggagctcttccgcgcggggctgcggacgcccagcacggagcagatccagcgcatctccacccacctcagcgccttcggcaaggtggagagcaagaacgtcttctactggttccagaaccacaaggcccgcgagcgccaccaccacaagaagcgacgccgcggcgcgtcgtcgtcctcccccgacagcggcagcggcaggggaagcaacaacgaggaagacggccgtggtgccgcctcgcagtcgcacgacgccgacgccgacgccgacctcgtgctgcaaccgccagagagcaagcgggaggccagaagctatggccaccatcaccggctcgtgacatgctacgtcagggacgtggtggagcagcaggaggcgtcgccgtcgtgggagcggccgacgagggaggtggagacgctagagctcttccccctcaagtcgtacggcgacctcgaggcggcggagaaggtccggtcgtacgtcagaggaagcggcgccaccagcgagcagtgcagggagttgtccttcttcgacgtcgtctccgccggccgggatccgccgctcgagctcaggctctgcagcttcggtccctag

SEQ ID NO: 182 - protein, 221 aa, Zea mays
MEALSGRVGVKCGRWNPTAEQVKVLTELFRAGLRTPSTEQIQRISTHLSAFGKVESKNVFYWFQNHKARERHHHKKRRRGASSSSPDSGSGRGSNNEEDGRGAASQSHDADADADLVLQPPESKREARSYGHHHRLVTCYVRDVVEQQEASPSWERPTREVETLELFPLKSYGDLEAAEKVRSYVRGSGATSEQCRELSFFDVVSAGRDPPLELRLCSFGP

SEQ ID NO: 183 - DNA, 975 bp, Zea mays
atggagacgccacagcagcaatccgccgccgccgccgccgccgccgcccacgggcaggacgacggcgggtcgccgccgatgtcgccggcctccgccgcggcggcggcgctggcgaacgcgcggtggaacccgaccaaggagcaggtggccgtgctggaggggctgtacgagcacggcctgcgcacccccagcgcggagcagatacagcagatcacgggcaggctgcgggagcacggcgccatcgagggcaagaacgtcttctactggttccagaaccacaaggcccgccagcgccagaggcagaagcaggacagcttcgcctacttcagcaggctcctccgccggcccccgccgctgcccgtgctctccatgccccccgcgccaccgtaccatcacgcccgcgtcccggcgccgcccgcgataccgatgccgatggcgccgccgccgcccgctgcatgcaacgacaacggcggcgcgcgtgtgatctacaggaacccattctacgtggctgcgccgcaggcgccccctgcaaatgccgcctactactacccacagccacagcagcagcagcagcagcaggtgacagtcatgtaccagtacccgagaatggaggtagccggccaggacaagatgatgaccagggccgcggcgcaccagcagcagcagcacaacggcgccgggcaacaaccgggacgcgccggccaccccagccgcgagacgctccagctgttcccgctccagcccaccttcgtgctgcggcacgacaaggggcgcgccgccaacggcagtaataacgactccctgacgtcgacgtcgacggcgactgcgacagcgacagcgacagcgacagcgtccgcttccatctccgaggactcggatggcctggagagcggcagctccggcaagggcgtcgaggaggcgcccgcgctgccgttctatgacttcttcgggctccagtcctccggaggccgctga

SEQ ID NO: 184 - protein, 324 aa, Zea mays
METPQQQSAAAAAAAAHGQDDGGSPPMSPASAAAAALANARWNPTKEQVAVLEGLYEHGLRTPSAEQIQQITGRLREHGAIEGKNVFYWFQNHKARQRQRQKQDSFAYFSRLLRRPPPLPVLSMPPAPPYHHARVPAPPAIPMPMAPPPPAACNDNGGARVIYRNPFYVAAPQAPPANAAYYYPQPQQQQQQQVTVMYQYPRMEVAGQDKMMTRAAAHQQQQHNGAGQQPGRAGHPSRETLQLFPLQPTFVLRHDKGRAANGSNNDSLTSTSTATATATATATASASISEDSDGLESGSSGKGVEEAPALPFYDFFGLQSSGGR

SEQ ID NO: 185 - DNA, 543 bp, Zea mays
atgcatggtgtacgtacgtatctcttaattttcattgtatcaaagctgcaggtgcaagtgccgccgacgacgacgacggtgggtggcacgacgcggtggaacccgtcgccggaccagataagggtgctggagatgctgtaccgcggggggatgcgcacgcccaactcgttccagatcgagcagatcacggaggagctcggcaagtacggccggatcgagggcaagaacgtcttctactggttccagaaccacaaggcccgcgagcgccagaagcagaagcgagctgccctcctcaccctcagcaccaccaccactgcttccacgctgctaccaccagctgctgaaaccaaggagggagtggagacgaaaaaagaagaagcgtgtgaagatgcatcgagccgcaagcggaggtgcagggcctgggaagatgtcgtcgtccatggtggcggcgacgatgccggtacggaggtagctgacgactactacaccgacgacgatgtgaccctggagctcttcccgctgcgtcctgatcaggggaaataa

SEQ ID NO: 186 - protein, 180 aa, Zea mays
MHGVRTYLLIFIVSKLQVQVPPTTTTVGGTTRWNPSPDQIRVLEMLYRGGMRTPNSFQIEQITEELGKYGRIEGKNVFYWFQNHKARERQKQKRAALLTLSTTTTASTLLPPAAETKEGVETKKEEACEDASSRKRRCRAWEDVVVHGGGDDAGTEVADDYYTDDDVTLELFPLRPDQGK

SEQ ID NO: 187 - DNA, 708 bp, Zea mays
atggacacggaggcgccgagcgggcgggtgggcgtcaagtgcgggcggtggaacccgacgccggagcaggtgaaggtcctgacggagctcttccgcgcggggctgcggacgcccagcacggaccagatccagcgcatctccgcccacctcggcgccttcggcaaggtggagagcaagaacgtcttctactggttccagaaccacaaggcccgcgagcgccaccaccacaagaagaagaagcgccgccgacgcggcgcggcaatggcatcgtcgtcctcccccgacagcggcagcggcagcgggagcagcgaggaagacggccgtgttgccgccgccgccgacgccgacctcgtgctgcaaccatcgccgggaagaagcaaaagcaaacgggaggccagaagaagctacggcggcggccaccatcgccggctcgttacatgtaagcagctagcgcacacacatcgctacgtcagggacgttgtggagcagcaggaggaggacacgtgggagcggccgacgagggaggcggtggagactctggagctcttccccctcaagtcgtacgtcgacctcgaggcggagaaggtccggcggtacgtcgtcagggccggcgccagcgagcagtgcagggacttctccttcttcgacgtgtccggcggtcgggatccgccgcttcttgagcttaggctctgcagcttcggtccctag

SEQ ID NO: 188 - protein, 235 aa, Zea mays
MDTEAPSGRVGVKCGRWNPTPEQVKVLTELFRAGLRTPSTDQIQRISAHLGAFGKVESKNVFYWFQNHKARERHHHKKKKRRRRGAAMASSSSPDSGSGSGSSEEDGRVAAAADADLVLQPSPGRSKSKREARRSYGGGHHRRLVTCKQLAHTHRYVRDVVEQQEEDTWERPTREAVETLELFPLKSYVDLEAEKVRRYVVRAGASEQCRDFSFFDVSGGRDPPLLELRLCSFGP

SEQ ID NO: 189 - DNA, 1545 bp, Zea mays
atggcctcctccttcaacaacaaaaccagtcactggccgagcatgtttaggtccaagcacgccgctgagccgtggcaggcgcagcctgacatcagcagctcgccgccgtcgctcctctcaggtggcggctctagcagcaccaccaccatcggccgctgcctcaagcaccccctctcaggttactcaggtggcgaggagcggaccccggatccgaagccccggtggaaccccaggccggagcagatccggattctggaggccatcttcaactccggcatggtcaacccgccgcgcgacgagatcccccgcatccgcatgcgcctgcaggagtacggccaggtcggcgacgccaacgtcttctactggttccagaaccgcaagtcccgctccaagaacaagcagcgcaccggacagctggggctgggccttgcgcgcgcgccgggttgcggggccgctgcgccgcccgtcacgccgcagcccttgatccagaaccaattccaggtgctcgcctcgcccgcgcaggcgccagcttcctcgtcctcgtcctcctccgaccgctcctctgggtccagcaagccggcgccgcagccgatgtccgcgacggcagcggccatgaactttccagggccgctcggcgcggcgtgtgcgcagatgtactaccaagcccaccccgtggcgccggtctcggcgttgccagcgcacaaggtgcaggaccctgtagcctccgacgagcccgtcttccagccgtggccacaaggctacttcctgtcggctgccgaggtcgccagcattctcgggggccagtacaggcacgacgtgcccgtgcagcagcagccaccggcgacgttgcctgcgggagcgttcttggggctgtacaacgaggtgacagagccgactgtcactggtcacaggacatgcgcctggggcccggcggggctcgggcagttctggcccgtgggcggcgctgatcaccatcagcaccacaagcacaataccaccgcggcgaccaacaccgtagcaagggacgcggcgcacgagcacgccacgacgctggggttgctgcagtacggcttcgaagctagcgcggccatggagacggcttccgcggcggtgccccttgctgcgtcgccgggaaccgctgcgagcgtggcgacggctgggctcacatctttgcctgcaagtactaatgctgttgtcgtcaactatgatctgctgcaaggactggcagtgcccgggtccgggtccggggccgtcggtgtcagcaccggcggtgcaccgcctgtcgccgttgccgcggcgcccacggcagcgcaggagggcgtcgtcgtagcactgtgcatcacggacagcgtcacgggcaagagcgtggcacacaacgtcgcggctgccaggctcgacgtgagggcgcagttcggcgaggcggccgttctgctccgcgccgtcggcgaccgcggcgggctcgacctcgtgcccgtccccgtcgacgcgttgggctgcacagtggagccgctccagcacggtgccttttactacgtgctggtataa

SEQ ID NO: 190 - protein, 514 aa, Zea mays
MASSFNNKTSHWPSMFRSKHAAEPWQAQPDISSSPPSLLSGGGSSSTTTIGRCLKHPLSGYSGGEERTPDPKPRWNPRPEQIRILEAIFNSGMVNPPRDEIPRIRMRLQEYGQVGDANVFYWFQNRKSRSKNKQRTGQLGLGLARAPGCGAAAPPVTPQPLIQNQFQVLASPAQAPASSSSSSSDRSSGSSKPAPQPMSATAAAMNFPGPLGAACAQMYYQAHPVAPVSALPAHKVQDPVASDEPVFQPWPQGYFLSAAEVASILGGQYRHDVPVQQQPPATLPAGAFLGLYNEVTEPTVTGHRTCAWGPAGLGQFWPVGGADHHQHHKHNTTAATNTVARDAAHEHATTLGLLQYGFEASAAMETASAAVPLAASPGTAASVATAGLTSLPASTNAVVVNYDLLQGLAVPGSGSGAVGVSTGGAPPVAVAAAPTAAQEGVVVALCITDSVTGKSVAHNVAAARLDVRAQFGEAAVLLRAVGDRGGLDLVPVPVDALGCTVEPLQHGAFYYVLV

SEQ ID NO: 191 - DNA, 663 bp, Gnetum gnemon
atggaagaaaacagcaacagcagcagaagcagcaacagcggcgcacgttggaatccgacgccggagcagctgagcattctgaaagagctgtatcatggccgcggaatcaggtcgcccagcgccgaacagatccaccatatctcatggaaactcagctcctacggcaaaatcgagggcaagaacgtcttctactggttccagaaccataaggcccgccagcgtcaaaaagagcgtctcggttccgtcatgcctgcttctgcttcttcttcttcttttgcatctccttctcagggagctgtcggcattcgaaggggaagtacggtgctatgtcttaaggaaacttcagcttcatcttcatcttattcttctgttccgcgttcggtatcagctgtgcgccagtgtgctgcatctcgtgactgtggcttgcaccatgatctgacaactctggagctgtttcccctgcaccgtgaaagtagaatagacgctggggaggaagacgaggagcaacaggaggtggtggtgctagataataataataacacctggacaaggcaccaaaatgtaaatgtgaatcatgcaaataatgacgatgagccacagcatggtcatgggcagattgatattgatgtagggcttcgtctttgcctcggtggatttcgctga

SEQ ID NO: 192 - protein, 220 aa, Gnetum gnemon
MEENSNSSRSSNSGARWNPTPEQLSILKELYHGRGIRSPSAEQIHHISWKLSSYGKIEGKNVFYWFQNHKARQRQKERLGSVMPASASSSSFASPSQGAVGIRRGSTVLCLKETSASSSSYSSVPRSVSAVRQCAASRDCGLHHDLTTLELFPLHRESRIDAGEEDEEQQEVVVLDNNNNTWTRHQNVNVNHANNDDEPQHGHGQIDIDVGLRLCLGGFR

SEQ ID NO: 193 - DNA, 987 bp, Malus domestica
atggaccctcaacagaacccaaatgaagtacaagaaggaggcaacaggcaggggggtggaatcatgtgcaggcaaagcagtacgcggtggacacccacaactgatcagataaaaatcttgaaggacctttactacaacaatggcattaggtcacccagcgctgagcagattcagaggatctctgctaagctgcgacagttcggcaagatcgaaggcaagaacgttttctattggtttcagaaccacaaagctcgtgagaggcagaagaaaagattcacttcttcttctgctcctgatcaccatcatcatgcagcaccaccagtgccagctgtaccaccagaatccaataatatcaggcaaagatcatcaggggttgggattgatattaatgcaactgctgctgctgcttatgaacaagcacccattaatcaccaccgcaagtattccaacatttctgctccaccagccgggttttcttctgcatcttcttcttcagttggtgtgaatgtttctgttggggcacagatgggaaactatgggtatggatccattgctatggagaagagctttagggagtgctcaatatcatctggaggaagtactagcactggtcatgtgggtggatctaattataatacttttaatcacaactatggatcatgggttggtgttgatccatattcctcgccctacactatctttgacaagaaatcctcatcaaaaccagtgtttggtgaccaggaaaatatgacggaagaagaatactacaatctgcaagcttcccaagagattgagactctcccactcttccccatgcacggtgaagacattcatggctttggcaacatcaagtcatcctctatggatggctactactccggctggtacaggtccgatggcggcaacgatggtggctctcgcacttcccttgagcttagcctcaattcctacggtcacatgacccatgattacttcagatcatattga

SEQ ID NO: 194 - protein, 328 aa, Malus domestica
MDPQQNPNEVQEGGNRQGGGIMCRQSSTRWTPTTDQIKILKDLYYNNGIRSPSAEQIQRISAKLRQFGKIEGKNVFYWFQNHKARERQKKRFTSSSAPDHHHHAAPPVPAVPPESNNIRQRSSGVGIDINATAAAAYEQAPINHHRKYSNISAPPAGFSSASSSSVGVNVSVGAQMGNYGYGSIAMEKSFRECSISSGGSTSTGHVGGSNYNTFNHNYGSWVGVDPYSSPYTIFDKKSSSKPVFGDQENMTEEEYYNLQASQEIETLPLFPMHGEDIHGFGNIKSSSMDGYYSGWYRSDGGNDGGSRTSLELSLNSYGHMTHDYFRSY

SEQ ID NO: 195 - DNA, 867 bp, Manihot esculenta
atggaacctcaacaacaacagcagcagcagcaaaaccaacaacaaccaaacgatgacaatagcagcggtgccaaaggaaactttctttgcaggcaaagcagtactaggtggactcccacaactgaccaaataagaatattgaaggacctttactacaacagtggagttaggtccccaagtgcagagcagattcagaggatatctgctaggcttagacagtacggtaagattgaaggcaagaatgtcttttattggtttcagaaccataaagctcgtgagaggcagaagaaaaggttcaccactgatgtccccatgcaacaaagaactgtttcgaatgcttctagttggaagcctgaagactattccttccacaacaaataccccaacattgctcctgggttttcttctgcatctccatcctcagctgctgggcttcctgttggacagatgggaaactatgggtatggatctgtaactatggagaagagttttagggactgctcaatatcagctactgccaacggtggtgttggtggatccatgagccccaactgtgggtgggttggcattgatccctactgttcatcctactctctctttgacaagcaaaaatcaactaatgaaaccctagaagatgaagaacaagatcaagatcaagaagaggaagcaactccagggattgaaaccctccctctcttccctacccagagagaagacatcaatggcttctgcaacatgaagcaccaccccatctgctactccgaaaactactgctatggctctgacgatggaaacaacgcttcgcgtacttccctcgaacttagcctcaactcttacagcaatgggcaggcacgggattccatctaa

SEQ ID NO: 196 - protein, 288 aa, Manihot esculenta
MEPQQQQQQQQNQQQPNDDNSSGAKGNFLCRQSSTRWTPTTDQIRILKDLYYNSGVRSPSAEQIQRISARLRQYGKIEGKNVFYWFQNHKARERQKKRFTTDVPMQQRTVSNASSWKPEDYSFHNKYPNIAPGFSSASPSSAAGLPVGQMGNYGYGSVTMEKSFRDCSISATANGGVGGSMSPNCGWVGIDPYCSSYSLFDKQKSTNETLEDEEQDQDQEEEATPGIETLPLFPTQREDINGFCNMKHHPICYSENYCYGSDDGNNASRTSLELSLNSYSNGQARDSI

SEQ ID NO: 197 - DNA, 960 bp, Kalanchoe fedtschenkoi
atggaagctcaacagcaacagcataatacaatgatgggtgatgaccttggcggtggcaagttggcagccaccagcttcacaagagcgcaaaccaacagcagcaacaaccacagcctagttaataacaacggcggcagaagaagcagcacgaggtggacaccaacaacagaccagataagaatactcaaagatctttactacaacaatggagtgaggtctcccacggtggagcagattcagaggatctctgctaggttgagacagtacggtaagatcgagggcaaaaatgtcttctactggtttcagaaccaaaaggctcgtgaaagacagaagaggaggttcaacacaaccagcaccaccaacaacaacactgctcccgctcctctccctccatcttctactgtttgtaaaccttcttcgctagactcatccactccacacattcacactgcagcagcagctgctgctgctgcctccaaatactcagacatcaacaacaaccaaaaccttatctacccagctgggcacaatcagatgtcaggtttcggatatgctgcctccgtaacaatggagaagagcttcagagattgttctatatcgacgggcgggtcatctttcggttgggctaaaggaggaatgacagatcaccatctgtctcgtcatccctacccgcacacttcaccctatgcaatctacaaccagcggaaatcaataaacagtgatgagtatcacgagctactggcatcatcaacttcggatcatcatgaacatggggataatcggggtccggagattgaaaccctgccactatttcccatgcacggcgaggacatcaactacggcttctgccaccttaattcagccgagactgatggctggttcaatcgcgatgtgggtagtggctctcgtgcgtccctcgagctcagtctcaactcttacgcaggaatggaccacacctag

SEQ ID NO: 198 - protein, 319 aa, Kalanchoe fedtschenkoi
MEAQQQQHNTMMGDDLGGGKLAATSFTRAQTNSSNNHSLVNNNGGRRSSTRWTPTTDQIRILKDLYYNNGVRSPTVEQIQRISARLRQYGKIEGKNVFYWFQNQKARERQKRRFNTTSTTNNNTAPAPLPPSSTVCKPSSLDSSTPHIHTAAAAAAAASKYSDINNNQNLIYPAGHNQMSGFGYAASVTMEKSFRDCSISTGGSSFGWAKGGMTDHHLSRHPYPHTSPYAIYNQRKSINSDEYHELLASSTSDHHEHGDNRGPEIETLPLFPMHGEDINYGFCHLNSAETDGWFNRDVGSGSRASLELSLNSYAGMDHT

SEQ ID NO: 199 - DNA, 840 bp, Gossypium hirsutum
atggaaccccagcaacagcaacagcaaaaccaacaagctccaaatgaggattgtggtggtggcagtggcaaaggaagctttctttgcaggcaaagtagtacacggtggactcctaccactgaccagattagaatattgaaggacctttactacaacaatggagttaggtccccgagtgctgatcagattcaaaggatctctgctagacttagacagtacggaaaaatcgaaggcaagaatgtcttttattggtttcagaaccacaaggctcgtgagaggcagaagaaaaggttcaccaccacgactaatcatcatgtccccatgcaaagccctaccactgctgcaaataacaagtatcccaacataactcctggttattctcctacatctctttcttcaactggtgctcttactgttgggcagataggaaactatggctatgggtctataactatggaaaagagttttagggattgctcaatatcagcatgtggtagtagtacaagtgtaggcgaatccctgagtcacaactttggatgggttgggttcgatcctacttattcttcgtcctacacattctttgagcacaaaaaattcatggaagagagacaaaaagatgaagatgatgcagaagaagaagctgctgctccacaaattgagaccctccctctctttcccatgcacagtgaagacgctaatggtttttgcagtaatattaggcccagactagacagctgctactctgggtggtacaggtctgaagatggctacactggttctcgtgcctcacttgagctcagcctcaacccatatgcaggcagaccgcaagattctatctga

SEQ ID NO: 200 - protein, 279 aa, Gossypium hirsutum
MEPQQQQQQNQQAPNEDCGGGSGKGSFLCRQSSTRWTPTTDQIRILKDLYYNNGVRSPSADQIQRISARLRQYGKIEGKNVFYWFQNHKARERQKKRFTTTTNHHVPMQSPTTAANNKYPNITPGYSPTSLSSTGALTVGQIGNYGYGSITMEKSFRDCSISACGSSTSVGESLSHNFGWVGFDPTYSSSYTFFEHKKFMEERQKDEDDAEEEAAAPQIETLPLFPMHSEDANGFCSNIRPRLDSCYSGWYRSEDGYTGSRASLELSLNPYAGRPQDSI

SEQ ID NO: 201 - DNA, 969 bp, Zostera marina
atggaacatcatcatcagcagcagttccacggtggccagccgcagctgatgagtgaaaatgaagagatgaacaacaatgggagcgggggtgggagtagtaagagcagttttctttgcagacagtcgagcacaaggtggatacccactactgatcagataaggatactgaaggatctatactacaacagtggactgagatccccaaacgccgatcagatccaaagaatatccgccagactgaggcagtacggaaagatcgagggtaagaatgttttctactggtttcaaaatcacaaagcccgagagaggcagaagaagagactcaccgtcgatattgctgcagcggcaactaccaacaaattctccaacaacactaatatgtcttcttcttcttctccctcagggatttctcctgcttctcatgcagtgtatgcaggattagggcagatggggagcaatggcggtggatcagtcgtgatggagagaacttcttacatggagtgttccttgccaggtgggatgccgatgcccgtacctgaacccaatgtgggagtcggagtgggatgggtgagtgttgaaacaggagctactactatgcaacaattctactaccatcaacagagaccaaccacaccctttcctgctcctcatcatcaccaccattactacgacgacggttactattccaataataacaaacttcaagcccatcacctacatatacgcgaggaaaatcaacatccagaagatgacgacgaagaagaagaagaagaagaagaagatgaagagatagaaacacttccattgttcccaatccactcacaggagacacagtcttacttcctggaccaacaacatgcaatccacaatcaagaaagcaataacatggaaacctctttggagctcaccctaaactcctactatgctgcttccagtagcagtactccacatggatcagagcatgattaa

SEQ ID NO: 202 - protein, 322 aa, Zostera marina
MEHHHQQQFHGGQPQLMSENEEMNNNGSGGGSSKSSFLCRQSSTRWIPTTDQIRILKDLYYNSGLRSPNADQIQRISARLRQYGKIEGKNVFYWFQNHKARERQKKRLTVDIAAAATTNKFSNNTNMSSSSSPSGISPASHAVYAGLGQMGSNGGGSVVMERTSYMECSLPGGMPMPVPEPNVGVGVGWVSVETGATTMQQFYYHQQRPTTPFPAPHHHHHYYDDGYYSNNNKLQAHHLHIREENQHPEDDDEEEEEEEEDEEIETLPLFPIHSQETQSYFLDQQHAIHNQESNNMETSLELTLNSYYAASSSSTPHGSEHD

SEQ ID NO: 203 - DNA, 693 bp, Amborella trichopoda
atggatcattctgataactgcccaggtaacaacaacaactctggttctggttctggttctggaaccaagtctggttacatgtgcagacaatctaactctagatggatcccaaccgctgaacaaatcagaatccttagagaactttactactctaacggtgttagatctccaaccgctgaacaaatccaaagaatctctgctagacttagacaatacggtaagatcgaaggtaagaacgttttttactggtttcaaaaccataaggctagagaaagacaaaagaagagacttaccgttgatcttgctgttcaaagagctgctgctacctctggtggtcttccaccaggtgttcttaacgtttctcatatcgctggttctacctgcggttctgttcttatggaatcttctcttatggattgctgctctacctctgctcttgaaaaccataacggtagaaaggaaagagctaacggtgatatgatcgttgaaagagaaagatctgctccaggtaaggaaacccttcaactttttccaatgcatcattctccacaaaacgatgataccatcgctgatgattacttttttaacgatgaagaagaaaagccagtttgcatggcttctcttgaacttacccttaactcttttgatagagtttaccatccagattctgattttagatctcattcttcttaa

SEQ ID NO: 204 - protein, 230 aa, Amborella trichopoda
MDHSDNCPGNNNNSGSGSGSGTKSGYMCRQSNSRWIPTAEQIRILRELYYSNGVRSPTAEQIQRISARLRQYGKIEGKNVFYWFQNHKARERQKKRLTVDLAVQRAAATSGGLPPGVLNVSHIAGSTCGSVLMESSLMDCCSTSALENHNGRKERANGDMIVERERSAPGKETLQLFPMHHSPQNDDTIADDYFFNDEEEKPVCMASLELTLNSFDRVYHPDSDFRSHSS

SEQ ID NO: 205 - DNA, 834 bp, Aquilegia coerulea
atggaacctcaacaagatcccaataaccaacaacaacaacttcaacaacaacaacatgaagaaaacagcagtggaagtagtagcaaaagcagttttctttgcaggcaaactagtacaaggtggacacccacaagtgatcagataagaatcttgaaagacctttactacaacaatggagttaggtctccaagtgcagagcaaatacagagaatctcagcaaggttaaggcagtacggtaagattgaaggcaagaatgttttctattggtttcagaaccacaaagctcgtgagagacaaaagaagagattcacaaatgatacaacaaccatgtccatgcaaagagctactactgcaactggtcatgccaaatacattactacttctcctgggatttcatctccatcttctgctggtgtacttggtgttggacagatgggaagcaacatgggatatggatctgttgttatggagaagagttttagagactgttcaatatctcctgctgctggtggtggtggtggtggtggcagtaatatgggtggatatggatccatgaacaacaattttggttggattggtgcgggtgtcgagccatatccatttttcaacaagacaaagcatattcaaaaatatgaagaagaagatttctcccaaactgagattgaaacactaccactatttcccatgcatggtgaagacagtacaaggtttggttcatctggcaacccaaacccgaattggaactggtttcgaacaggagatgaaatgattggatctagaacatcattggagcttagcttgaattcttactctggcgggtcaattaataactga

SEQ ID NO: 206 - protein, 277 aa, Aquilegia coerulea
MEPQQDPNNQQQQLQQQQHEENSSGSSSKSSFLCRQTSTRWTPTSDQIRILKDLYYNNGVRSPSAEQIQRISARLRQYGKIEGKNVFYWFQNHKARERQKKRFTNDTTTMSMQRATTATGHAKYITTSPGISSPSSAGVLGVGQMGSNMGYGSVVMEKSFRDCSISPAAGGGGGGGSNMGGYGSMNNNFGWIGAGVEPYPFFNKTKHIQKYEEEDFSQTEIETLPLFPMHGEDSTRFGSSGNPNPNWNWFRTGDEMIGSRTSLELSLNSYSGGSINN

SEQ ID NO: 207 - DNA, 969 bp, Amaranthus hypochondriacus
atggagtttcaacaacaacaagatgaagagatgataaaccatgttgggaaaatgagcaacaacacaagtaacaataataataataataataactatttatgtagacaaagtagcacaagatggactccaacaacagaacaaataaagcttttaaaagatctttattatttacaaggaattagatctcctactgctgatcaaattcaaagcatttgtgctaggttacgtcgttatggaaaaattgaaggcaaaaatgttttttattggtttcaaaatcataaggctagggaaagacaaaaaaagaagcttactcctacttctcctaataataataataataataataataataatttcataagaaataataataataataataataatggaaatattaacacttttcatgctaaatatccttgttccttcaataataatcccggggtttcttgttcaagttcaccagcaggtgtgatttctggaggtgggcaattgatggggagttttgggtatggagctgtgactatggagactaaatttagggtaagaggaggtattcctattccaaatggagcaaatcaatggagtaactatttcaacccaaacaatccaacatcttactcaaatttctttattgacaaggtatcatcaaatgttgatcatcattatccatacattaaccatcatgatcatgatcatgatcatgatcatcatgatcatgatcattatggcccacaatcacctcatgagattcagactcttcctctctttcccatgcacaatgatcatcatgatctcgatctcgatctcgatctcgatcacgatcaagggttctacacctataagcctcaatcggacggctgtaattataccggaggatatcgatggtcatctaatgttaatggtggacatacttctcttgagcttagtcttaactcttatggatttggatgctattcacctaattaa

SEQ ID NO: 208 - protein, 322 aa, Amaranthus hypochondriacus
MEFQQQQDEEMINHVGKMSNNTSNNNNNNNNYLCRQSSTRWTPTTEQIKLLKDLYYLQGIRSPTADQIQSICARLRRYGKIEGKNVFYWFQNHKARERQKKKLTPTSPNNNNNNNNNNFIRNNNNNNNNGNINTFHAKYPCSFNNNPGVSCSSSPAGVISGGGQLMGSFGYGAVTMETKFRVRGGIPIPNGANQWSNYFNPNNPTSYSNFFIDKVSSNVDHHYPYINHHDHDHDHDHHDHDHYGPQSPHEIQTLPLFPMHNDHHDLDLDLDLDHDQGFYTYKPQSDGCNYTGGYRWSSNVNGGHTSLELSLNSYGFGCYSPN

SEQ ID NO: 209 - DNA, 924 bp, Cucumis sativus
atggaacatcctgccaaacaacaacaacaagaacaaggaattaatgatcaaggtggtgaaggtggtggtggaagcaatggaaaaggtgggtttttgtgtaggcaaagtagcagtcgatggactccaacaactgaccaaatacgaatattgaaagagctttattataacaatggtgttcgctccccaagcgctgatcaaattcagaggatctctgctaggcttagacagtacggtaaaatcgaaggcaaaaacgttttttattggtttcaaaaccataaggctcgtgaaagacagaagaaaagattcacttcaaattctacttctcctattactacctccaatactactacaactactactgattttaaaatttcttcaactaataataatattaactggaagtctgaagatcattcctcctcttctcataacaaatttcctccaggaataacaattgctttaattgattcttgtttttgcagctccttcttcttcggttatggtcgccgttggccatatgggaaattacggatatgggagtgttcaatatcgtcgggaggaaatagcagtgtcgtcggttaccggagccacaacatgggatcatggatcggtatcgatccgtattcttctccggcagctgccgcggcggggggatcagccaatgtgtttgaaaaaacaaaatatgttgaagaaagcatggaagatcacgaggagcaagagatcgaaactctcccccttttccccattcatggtgaccggaataatctcggtggtttctgcagcatgaagccggaatattcagagagctactacaccaccacttggtacgggcggtctgacgataatggagccgccggttctcgggcttcgctggaactcagcctcaactcttacgccaccatctcacctgatgatggaatgtga

SEQ ID NO: 210 - protein, 307 aa, Cucumis sativus
MEHPAKQQQQEQGINDQGGEGGGGSNGKGGFLCRQSSSRWTPTTDQIRILKELYYNNGVRSPSADQIQRISARLRQYGKIEGKNVFYWFQNHKARERQKKRFTSNSTSPITTSNTTTTTTDFKISSTNNNINWKSEDHSSSSHNKFPPGITIALIDSCFCSSFFFGYGRRWPYGKLRIWECSISSGGNSSVVGYRSHNMGSWIGIDPYSSPAAAAAGGSANVFEKTKYVEESMEDHEEQEIETLPLFPIHGDRNNLGGFCSMKPEYSESYYTTTWYGRSDDNGAAGSRASLELSLNSYATISPDDGM

SEQ ID NO: 211 - DNA, 840 bp, Pinus taeda
atggaatctgctgaaagaatcggttcttacgatgtttacagacaaccatcttctaccagatggaacccaacctctgaacaactttctatccttagagaactttactacaccaacggtatcagatctccaaccgttgatgaaatccatagaatctctatgaagctttctagatacggtaagatcgaaggtaagaacgttttttactggtttcaaaaccataaggctagacatagacaaaagaccagactttctgctatgaacgttggtaagccagctgcttctccagctctttctcaaaccaccagaaagcataagcaatgctacatcaccaccaacatcgttcttacccttaaccaacattgctacaccaagaccaacatggttcttcaaatcatctggtctcttggtcttggtaacaagtctcaaaccaccaagatggtttgggaaatcaagatcaccgcttttccaaccatccataccgaatctttttacgaaaacagaatggctggtgaaaactcttcttgcaaggaagctgcttgctgctctcttgaacaaatgtacgctgttaagcatcatgatgttatgaaggctatggaagaaaaccaacttcaagaaggtaagatcaacagacatgttgaaacccttgaactttttccaacccattgcgaagatagatctccagaaccatctgaaaagaagtcttgctgctggggttcttgcgaaaccaaggaaaaccataacaacaacccaccaggtggttacaagggtaagcaaagagattctgttcttgatctttgcctttctcttggtaacaagtcttgcggtcttcatgataactaa

SEQ ID NO: 212 - protein, 279 aa, Pinus taeda
MESAERIGSYDVYRQPSSTRWNPTSEQLSILRELYYTNGIRSPTVDEIHRISMKLSRYGKIEGKNVFYWFQNHKARHRQKTRLSAMNVGKPAASPALSQTTRKHKQCYITTNIVLTLNQHCYTKTNMVLQIIWSLGLGNKSQTTKMVWEIKITAFPTIHTESFYENRMAGENSSCKEAACCSLEQMYAVKHHDVMKAMEENQLQEGKINRHVETLELFPTHCEDRSPEPSEKKSCCWGSCETKENHNNNPPGGYKGKQRDSVLDLCLSLGNKSCGLHDN

SEQ ID NO: 213 - DNA, 819 bp, Artificial Sequence
  WUS ortholog of Solanum lycopersicum with KpnI site replaced by changing C to T at 762bpSolanum lycopersicum coding sequence
atggaacatcaacacaacatagaagatggtggtaaaaatagtaacaacagtttcctgtgcaggcaaagtagtagccgttggacgccaacgagcgatcagataagaatattgaaggatctctactacaacaatggagttaggtctccaactgctgaacagattcagaggatatctgctaagttgagacagtacggtaagattgaaggcaaaaatgtgttttattggtttcagaaccataaagctcgtgaaagacaaaagaagaggctcattgctgctgcctctgccactgataataataatatctcttccatgcaaatgattccacatctttggagatctcctgatgatcaccacaagtacaacactactactactaatccaggtgttcagtgtccatcaccatcttcacatggggtattaccagtggtacagactggaaactatggttatggaactttggctatggagaagagctttagggagtgttcaatatcaccaccaggtggtagttatcatcaaaatttgacatgggttggtgttgatccttacaacaatatgagtactacttctccagcaacttacccttttcttgaaaaaagcaacaacaaacactatgaagaaaccctagatgaagagcaagaagaagaaaattaccaaaggggtaactctgctttagaaactctgtcacttttccccatgcatgaagagaacatcatctcaaatttctgcatcaaacatcatgaatcttctggaggatggtaccattctgataataacaatttggctgctcttgaacttactctcaactctttcccctaa

SEQ ID NO: 214 - protein, 272 aa, Solanum lycopersicum
MEHQHNIEDGGKNSNNSFLCRQSSSRWTPTSDQIRILKDLYYNNGVRSPTAEQIQRISAKLRQYGKIEGKNVFYWFQNHKARERQKKRLIAAASATDNNNISSMQMIPHLWRSPDDHHKYNTTTTNPGVQCPSPSSHGVLPVVQTGNYGYGTLAMEKSFRECSISPPGGSYHQNLTWVGVDPYNNMSTTSPATYPFLEKSNNKHYEETLDEEQEEENYQRGNSALETLSLFPMHEENIISNFCIKHHESSGGWYHSDNNNLAALELTLNSFP

SEQ ID NO: 215 - DNA, 2130 bp, Zea mays
atggccactgtgaacaactggctcgctttctccctctccccgcaggagctgccgccctcccagacgacggactccacgctcatctcggccgccaccgccgaccatgtctccggcgatgtctgcttcaacatcccccaagattggagcatgaggggatcagagctttcggcgctcgtcgcggagccgaagctggaggacttcctcggcggcatctccttctccgagcagcatcacaagtccaactgcaacttgatacccagcactagcagcacagtttgctacgcgagctcagctgctagcaccggctaccatcaccagctgtaccagcccaccagctccgcgctccacttcgcggactccgtcatggtggcctcctcggccggtgtccacgacggcggttccatgctcagcgcggccgccgctaacggtgtcgctggcgctgccagtgccaacggcggcggcatcgggctgtccatgatcaagaactggctgcggagccaaccggcgcccatgcagccgagggcggcggcggctgagggcgcgcaggggctctctttgtccatgaacatggcggggacgacccaaggcgctgctggcatgccacttctcgctggagagcgcgcacgggcgcccgagagtgtatcgacgtcagcacagggtggtgccgtcgtcgtcacggcgccgaaggaggatagcggtggcagcggtgttgccggtgctctagtagccgtgagcacggacacgggtggcagcggcggcgcgtcggctgacaacacggcaaggaagacggtggacacgttcgggcagcgcacgtcgatttaccgtggcgtgacaaggcatagatggactgggagatatgaggcacatctttgggataacagttgcagaagggaaggacaaactcgtaagggtcgtcaagtctatttaggtggctatgataaagaggagaaagctgctagggcttatgatcttgctgctctgaagtactggggtgccacaacaacaacaaattttccagtgagtaactacgaaaaggagctcgaggacatgaagcacatgacaaggcaggagtttgtagcgtctctgagaaggaagagcagtggtttctccagaggtgcatccatttacaggggagtgactaggcatcaccaacatggaagatggcaagcacggattggacgagttgcagggaacaaggatctttacttgggcaccttcagcacccaggaggaggcagcggaggcgtacgacatcgcggcgatcaagttccgcggcctcaacgccgtcaccaacttcgacatgagccgctacgacgtgaagagcatcctggacagcagcgccctccccatcggcagcgccgccaagcgtctcaaggaggccgaggccgcagcgtccgcgcagcaccaccacgccggcgtggtgagctacgacgtcggccgcatcgcctcgcagctcggcgacggcggagccctagcggcggcgtacggcgcgcactaccacggcgccgcctggccgaccatcgcgttccagccgggcgccgccaccacaggcctgtaccacccgtacgcgcagcagccaatgcgcggcggcgggtggtgcaagcaggagcaggaccacgcggtgatcgcggccgcgcacagcctgcaggacctccaccacttgaacctgggcgcggccggcgcgcacgactttttctcggcagggcagcaggccgccgccgcagctgcgatgcacggcctggctagcatcgacagtgcgtcgctcgagcacagcaccggctccaactccgtcgtctacaacggcggggtcggcgatagcaacggcgccagcgccgttggcagcggcggtggctacatgatgccgatgagcgctgccggagcaaccactacatcggcaatggtgagccacgagcagatgcatgcacgggcctacgacgaagccaagcaggctgctcagatggggtacgagagctacctggtgaacgcggagaacaatggtggcggaaggatgtctgcatgggggaccgtcgtctctgcagccgcggcggcagcagcaagcagcaacgacaacattgccgccgacgtcggccatggcggcgcgcagctcttcagtgtctggaacgacacttaa

SEQ ID NO: 216 - protein, 709 aa, Zea mays
MATVNNWLAFSLSPQELPPSQTTDSTLISAATADHVSGDVCFNIPQDWSMRGSELSALVAEPKLEDFLGGISFSEQHHKSNCNLIPSTSSTVCYASSAASTGYHHQLYQPTSSALHFADSVMVASSAGVHDGGSMLSAAAANGVAGAASANGGGIGLSMIKNWLRSQPAPMQPRAAAAEGAQGLSLSMNMAGTTQGAAGMPLLAGERARAPESVSTSAQGGAVVVTAPKEDSGGSGVAGALVAVSTDTGGSGGASADNTARKTVDTFGQRTSIYRGVTRHRWTGRYEAHLWDNSCRREGQTRKGRQVYLGGYDKEEKAARAYDLAALKYWGATTTTNFPVSNYEKELEDMKHMTRQEFVASLRRKSSGFSRGASIYRGVTRHHQHGRWQARIGRVAGNKDLYLGTFSTQEEAAEAYDIAAIKFRGLNAVTNFDMSRYDVKSILDSSALPIGSAAKRLKEAEAAASAQHHHAGVVSYDVGRIASQLGDGGALAAAYGAHYHGAAWPTIAFQPGAATTGLYHPYAQQPMRGGGWCKQEQDHAVIAAAHSLQDLHHLNLGAAGAHDFFSAGQQAAAAAAMHGLASIDSASLEHSTGSNSVVYNGGVGDSNGASAVGSGGGYMMPMSAAGATTTSAMVSHEQMHARAYDEAKQAAQMGYESYLVNAENNGGGRMSAWGTVVSAAAAAAASSNDNIAADVGHGGAQLFSVWNDT

SEQ ID NO: 217 - DNA, 2040 bp, Zea mays
atggcttcagcgaacaactggctgggcttctcgctctcgggccaggataacccgcagcctaaccaggacagctcgcctgccgccggtatcgacatctccggcgccagcgacttctatggcctgcccacgcagcagggctccgacgggcatctcggcgtgccgggcctgcgggacgatcacgcttcttatggtatcatggaggcctacaacagggttcctcaagaaacccaagattggaacatgaggggcttggactacaacggcggtggctcggagctctcgatgcttgtggggtccagcggcggcggcgggggcaacggcaagagggccgtggaagacagcgagcccaagctcgaagatttcctcggcggcaactcgttcgtctccgatcaagatcagtccggcggttacctgttctctggagtcccgatagccagcagcgccaatagcaacagcgggagcaacaccatggagctctccatgatcaagacctggctacggaacaaccaggtggcccagccccagccgccagctccacatcagccgcagcctgaggaaatgagcaccgacgccagcggcagcagctttggatgctcggattcgatgggaaggaacagcatggtggcggctggtgggagctcgcagagcctggcgctctcgatgagcacgggctcgcacctgcccatggttgtgcccagcggcgccgccagcggagcggcctcggagagcacatcgtcggagaacaagcgagcgagcggtgccatggattcgcccggcagcgcggtagaagccgtaccgaggaagtccatcgacacgttcgggcaaaggacctctatatatcgaggtgtaacaaggcatagatggacagggcggtatgaggctcatctatgggataatagttgtagaagggaagggcagagtcgcaagggtaggcaagtttaccttggtggctatgacaaggaggacaaggcagcaagggcttacgatttggcagctctcaagtattggggcactacgacaacaacaaatttccctataagcaactacgaaaaagagctagaagaaatgaaacatatgactagacaggagtacattgcatacctaagaagaaatagcagtggattttctcgtggggcatcaaagtatcgtggagtaactagacatcatcagcatgggagatggcaagcaaggatagggagagttgcaggaaacaaggatctttacttgggcacattcagcaccgaggaggaggcggcggaggcctacgacatcgccgcgatcaagttccgcggtctcaacgccgtcaccaacttcgacatgagccgctacgacgtgaagagcatcctcgagagcagcacactgcctgtcggcggtgcggccaggcgcctcaaggacgccgtggaccacgtggaggccggcgccaccatctggcgcgccgacatggacggcgccgtgatctcccagctggccgaagccgggatgggcggctacgcctcgtacggccaccacggctggccgaccatcgcgttccagcagccgtcgccgctctccgtccactacccgtacggccagccgtcccgcgggtggtgcaaacccgagcaggacgcggccgccgccgcggcgcacagcctgcaggacctccagcagctgcacctcggcagcgcggcccacaacttcttccaggcgtcgtcgagctccacagtctacaacggcggcgccggcgccagtggtgggtaccagggcctcggtggtggcagctctttcctcatgccgtcgagcactgtcgtggcggcggccgaccaggggcacagcagcacggccaaccaggggagcacgtgcagctacggggacgaccaccaggaggggaagctcatcggttacgacgccgccatggtggcgaccgcagctggtggagacccgtacgctgcggcgaggaacgggtaccagttctcgcagggctcgggatccacggtgagcatcgcgagggcgaacgggtacgctaacaactggagctctcctttcaacaacggcatggggtga

SEQ ID NO: 218 - protein, 679 aa, Zea mays
MASANNWLGFSLSGQDNPQPNQDSSPAAGIDISGASDFYGLPTQQGSDGHLGVPGLRDDHASYGIMEAYNRVPQETQDWNMRGLDYNGGGSELSMLVGSSGGGGGNGKRAVEDSEPKLEDFLGGNSFVSDQDQSGGYLFSGVPIASSANSNSGSNTMELSMIKTWLRNNQVAQPQPPAPHQPQPEEMSTDASGSSFGCSDSMGRNSMVAAGGSSQSLALSMSTGSHLPMVVPSGAASGAASESTSSENKRASGAMDSPGSAVEAVPRKSIDTFGQRTSIYRGVTRHRWTGRYEAHLWDNSCRREGQSRKGRQVYLGGYDKEDKAARAYDLAALKYWGTTTTTNFPISNYEKELEEMKHMTRQEYIAYLRRNSSGFSRGASKYRGVTRHHQHGRWQARIGRVAGNKDLYLGTFSTEEEAAEAYDIAAIKFRGLNAVTNFDMSRYDVKSILESSTLPVGGAARRLKDAVDHVEAGATIWRADMDGAVISQLAEAGMGGYASYGHHGWPTIAFQQPSPLSVHYPYGQPSRGWCKPEQDAAAAAAHSLQDLQQLHLGSAAHNFFQASSSSTVYNGGAGASGGYQGLGGGSSFLMPSSTVVAAADQGHSSTANQGSTCSYGDDHQEGKLIGYDAAMVATAAGGDPYAAARNGYQFSQGSGSTVSIARANGYANNWSSPFNNGMG

SEQ ID NO: 219 - DNA, 2133 bp, Zea mays
atggccactgtgaacaactggctcgctttctccctctccccgcaggagctgccgccctcccagacgacggactccacactcatctcggccgccaccgccgaccatgtctccggcgatgtctgcttcaacatcccccaagattggagcatgaggggatcagagctttcggcgctcgtcgcggagccgaagctggaggacttcctcggcggcatctccttctccgagcagcatcacaaggccaactgcaacatgatacccagcactagcagcacagtttgctacgcgagctcaggtgctagcaccggctaccatcaccagctgtaccaccagcccaccagctcagcgctccacttcgcggactccgtaatggtggcctcctcggccggtgtccacgacggcggtgccatgctcagcgcggccgccgctaacggtgtcgctggcgctgccagtgccaacggcggcggcatcgggctgtccatgattaagaactggctgcggagccaaccggcgcccatgcagccgagggtggcggcggctgagggcgcgcaggggctctctttgtccatgaacatggcggggacgacccaaggcgctgctggcatgccacttctcgctggagagcgcgcacgggcgcccgagagtgtatcgacgtcagcacagggtggagccgtcgtcgtcacggcgccgaaggaggatagcggtggcagcggtgttgccggcgctctagtagccgtgagcacggacacgggtggcagcggcggcgcgtcggctgacaacacggcaaggaagacggtggacacgttcgggcagcgcacgtcgatttaccgtggcgtgacaaggcatagatggactgggagatatgaggcacatctttgggataacagttgcagaagggaagggcaaactcgtaagggtcgtcaagtctatttaggtggctatgataaagaggagaaagctgctagggcttatgatcttgctgctctgaagtactggggtgccacaacaacaacaaattttccagtgagtaactacgaaaaggagctcgaggacatgaagcacatgacaaggcaggagtttgtagcgtctctgagaaggaagagcagtggtttctccagaggtgcatccatttacaggggagtgactaggcatcaccaacatggaagatggcaagcacggattggacgagttgcagggaacaaggatctttacttgggcaccttcagcacccaggaggaggcagcggaggcgtacgacatcgcggcgatcaagttccgcggcctcaacgccgtcaccaacttcgacatgagccgctacgacgtgaagagcatcctggacagcagcgccctccccatcggcagcgccgccaagcgcctcaaggaggccgaggccgcagcgtccgcgcagcaccaccacgccggcgtggtgagctacgacgtcggccgcatcgcctcgcagctcggcgacggcggagccctggcggcggcgtacggcgcgcactaccacggcgccgcctggccgaccatcgcgttccagccgggcgccgccagcacaggcctgtaccacccgtacgcgcagcagccaatgcgcggcggcgggtggtgcaagcaggagcaggaccacgcggtgatcgcggccgcgcacagcctgcaggacctccaccacctgaacctgggcgcggccggcgcgcacgactttttctcggcagggcagcaggccgccgccgctgcgatgcacggcctgggtagcatcgacagtgcgtcgctcgagcacagcaccggctccaactccgtcgtctacaacggcggggtcggcgacagcaacggcgccagcgccgtcggcggcagtggcggtggctacatgatgccgatgagcgctgccggagcaaccactacatcggcaatggtgagccacgagcaggtgcatgcacgggcctacgacgaagccaagcaggctgctcagatggggtacgagagctacctggtgaacgcggagaacaatggtggcggaaggatgtctgcatgggggactgtcgtgtctgcagccgcggcggcagcagcaagcagcaacgacaacatggccgccgacgtcggccatggcggcgcgcagctcttcagtgtctggaacgacacttaa

SEQ ID NO: 220 - DNA, 1680 bp, Oryza sativa
atggcctccatcaccaactggctcggcttctcctcctcctccttctccggcgccggcgccgaccccgtcctgccccacccgccgctgcaagagtgggggagcgcttatgagggcggcggcacggtggcggccgccggcggggaggagacggcggcgccgaagctggaggacttcctcggcatgcaggtgcagcaggagacggccgccgcggcggcggggcacggccgtggaggcagctcgtcggtcgttgggctgtccatgatcaagaactggctacgcagccagccgccgcccgcggtggttgggggagaagacgctatgatggcgctcgcggtgtcgacgtcggcgtcgccgccggtggacgcgacggtgccggcctgcatttcgccggatgggatggggtcgaaggcggccgacggcggcggcgcggccgaggcggcggcggcggcggcggcgcagaggatgaaggcggccatggacacgttcgggcagcggacgtccatctaccggggtgtcaccaagcacaggtggacaggaaggtatgaagcccatctttgggataacagctgcagaagagaaggtcagactcgcaaaggcagacaagtcaatgcaggaggatatgataaggaagaaaaagctgctagggcttatgatttggctgcccttaaatactggggcactacaacgacgacgaattttccggtaagcaactacgaaaaagagttggatgaaatgaagcacatgaataggcaggaatttgttgcatcccttagaagaaaaagcagtggattttcacgtggtgcttccatatatcgtggtgttacaagacaccatcagcatggaaggtggcaagcaaggataggacgggtggcaggaaacaaggatctgtatttgggcacatttggcacccaagaggaagctgcagaggcatatgatatcgctgcaatcaaattccgtggtctcaatgctgtgacaaactttgacatgagccggtacgatgtcaagagcatcattgaaagcagcaatctcccaattggtactggaaccacccggcgattgaaggactcctctgatcacactgataatgtcatggacatcaatgtcaataccgaacccaataatgtggtatcatcccacttcaccaatggggttggcaactatggttcgcagcattatggttacaatggatggtcgccaattagcatgcagccgatcccctcgcagtacgccaacggccagcccagggcatggttgaaacaagagcaggacagctctgtggttacagcggcgcagaacctgcacaatctacatcattttagttccttgggctacacccacaacttcttccagcaatctgatgttccagacgtcacaggtttcgttgatgcgccttcgaggtccagtgactcatactccttcaggtacaatggaacaaatggctttcatggtctcccgggtggaatcagctatgctatgccggttgcgacagcggtggaccaaggtcagggcatccatggctatggagaagatggtgtggcaggcattgacaccacacatgacctgtatggcagccgtaatgtgtactacctttccgagggttcgcttcttgccgatgtcgaaaaagaaggcgactatggccaatctgtggggggcaacagctgggttttgccgacaccgtag

SEQ ID NO: 221 - protein, 559 aa, Oryza sativa
MASITNWLGFSSSSFSGAGADPVLPHPPLQEWGSAYEGGGTVAAAGGEETAAPKLEDFLGMQVQQETAAAAAGHGRGGSSSVVGLSMIKNWLRSQPPPAVVGGEDAMMALAVSTSASPPVDATVPACISPDGMGSKAADGGGAAEAAAAAAAQRMKAAMDTFGQRTSIYRGVTKHRWTGRYEAHLWDNSCRREGQTRKGRQVNAGGYDKEEKAARAYDLAALKYWGTTTTTNFPVSNYEKELDEMKHMNRQEFVASLRRKSSGFSRGASIYRGVTRHHQHGRWQARIGRVAGNKDLYLGTFGTQEEAAEAYDIAAIKFRGLNAVTNFDMSRYDVKSIIESSNLPIGTGTTRRLKDSSDHTDNVMDINVNTEPNNVVSSHFTNGVGNYGSQHYGYNGWSPISMQPIPSQYANGQPRAWLKQEQDSSVVTAAQNLHNLHHFSSLGYTHNFFQQSDVPDVTGFVDAPSRSSDSYSFRYNGTNGFHGLPGGISYAMPVATAVDQGQGIHGYGEDGVAGIDTTHDLYGSRNVYYLSEGSLLADVEKEGDYGQSVGGNSWVLPTP

SEQ ID NO: 222 - DNA, 2104 bp, Oryza sativa
atggcttctgcaaacaactggctgggcttctcgctctccggccaagagaatccgcagcctcaccaggatagctcgcctccggcagccatcgacgtctccggcgccggcgacttctatggcctgccgacgtcgcagccgacggcggccgacgcgcacctcggcgtggcggggcatcatcacaacgcctcgtatggcatcatggaggccttcaataggggagctcaagaggcacaagattggaacatgagggggctggactacaacggcggcgcctcggagctgtcgatgctcgtcggctccagcggcggcaagagggcggcggcggtggaggagaccgagccgaagctggaggacttcctcggcggcaactcgttcgtctccgagcaagatcatcacgcggcggggggcttcctcttctccggcgtcccgatggccagcagcaccaacagcaacagcgggagcaacactatggagctctccatgatcaagacctggctccggaacaacggccaggtgcccgccggccaccagccgcagcagcagcagccggcggccgcggccgccgccgcgcagcagcaggcgcacgaggcggcggagatgagcaccgacgcgagcgcgagcagcttcgggtgctcctccgacgcgatggggaggagtaacaacggcggcgcggtctcggcggcggccggcgggacgagctcgcagagcctggcgctctcgatgagcacgggctcgcactcgcacctgcctatcgtcgtcgccggcggcgggaacgccagcggcggagcggccgagagcacatcgtcggagaacaagcgggccagcggcgccatggattcgccgggcggtggcgcgatagaggccgtgccgaggaagtccatcgacacgttcgggcaaaggacctcgatatatcgaggtgtaacaaggcatagatggacagggcgatatgaggctcatctctgggataatagctgtagaagagaagggcagagtcgcaagggtaggcaaggtggctatgacaaggaggataaagcagcgagagcttatgatttggcagctctgaagtattggggcacaacaacaacaacaaatttcccaataagtaactatgaaaaagagctagatgaaatgaaacatatgaccaggcaggagtatattgcatacctaagaaggaatagcagtggattttctcgtggtgcatcgaaatatcgtggtgtaaccaggcaccatcagcatgggagatggcaagcaaggatagggagggttgcaggaaacaaggacctctacttaggcaccttcagcaccgaggaggaggcggcggaggcgtacgacatcgcggcgatcaagttccgggggctcaacgccgtcaccaactttgacatgagccgctacgacgtcaagagcatcctggagagcagcacgctgccggtgggcggcgcggcgaggcggctgaaggaggcggcggaccacgcggaggcggccggcgccaccatctggcgcgccgccgacatggacggcgccggcgtcatctccggcctggccgacgtcgggatgggcgcctacgccgcctcgtaccaccaccaccaccaccacggctggccgaccatcgcgttccagcagccgccgccgctcgccgtgcactacccgtacggccaggcgccggcggcgccgtcgcgcgggtggtgcaagcccgagcaggacgccgccgtcgctgccgccgcgcacagcctccaggacctccagcagctgcacctcggcagcgccgccgcccacaacttcttccaggcgtcgtcgagctcgacggtctacaacggcggcggcggcgggtaccagggcctcggtggcaacgccttcttgatgccggcgagcaccgtcgtggccgaccaggggcacagcagcacggccaccaaccatggaaacacctgcagctacggcaacgaggagcaggggaagctcatcgggtacgacgccatggcgatggcgagcggcgccgccggcggcgggtaccagctgtcgcagggctcggcgtcgacggtgagcatcgcgagggcgaacggctactcggccaactggagctcgcctttcaatggcgccatgggatgat

SEQ ID NO: 223 - protein, 700 aa, Oryza sativa
MASANNWLGFSLSGQENPQPHQDSSPPAAIDVSGAGDFYGLPTSQPTAADAHLGVAGHHHNASYGIMEAFNRGAQEAQDWNMRGLDYNGGASELSMLVGSSGGKRAAAVEETEPKLEDFLGGNSFVSEQDHHAAGGFLFSGVPMASSTNSNSGSNTMELSMIKTWLRNNGQVPAGHQPQQQQPAAAAAAAQQQAHEAAEMSTDASASSFGCSSDAMGRSNNGGAVSAAAGGTSSQSLALSMSTGSHSHLPIVVAGGGNASGGAAESTSSENKRASGAMDSPGGGAIEAVPRKSIDTFGQRTSIYRGVTRHRWTGRYEAHLWDNSCRREGQSRKGRQGGYDKEDKAARAYDLAALKYWGTTTTTNFPISNYEKELDEMKHMTRQEYIAYLRRNSSGFSRGASKYRGVTRHHQHGRWQARIGRVAGNKDLYLGTFSTEEEAAEAYDIAAIKFRGLNAVTNFDMSRYDVKSILESSTLPVGGAARRLKEAADHAEAAGATIWRAADMDGAGVISGLADVGMGAYAASYHHHHHHGWPTIAFQQPPPLAVHYPYGQAPAAPSRGWCKPEQDAAVAAAAHSLQDLQQLHLGSAAAHNFFQASSSSTVYNGGGGGYQGLGGNAFLMPASTVVADQGHSSTATNHGNTCSYGNEEQGKLIGYDAMAMASGAAGGGYQLSQGSASTVSIARANGYSANWSSPFNGAMG

SEQ ID NO: 224 - DNA, 1977 bp, Oryza sativa
atggcttctgcagataactggctaggcttctcgctctccggccaaggcaacccacagcatcaccagaacggctcgccgtctgccgccggcgacgccgccatcgacatctccggctcaggcgacttctatggtctgccaacgccggacgcacaccacatcggcatggcgggcgaagacgcgccctatggcgtcatggatgctttcaacagaggcacccatgaaacccaagattgggcgatgaggggtttggactacggcggcggctcctccgacctctcgatgctcgtcggctcgagcggcggcgggaggaggacggtggccggcgacggcgtcggcgaggcgccgaagctggagaacttcctcgacggcaactcattctccgacgtgcacggccaagccgccggcgggtacctctactccggaagcgctgtcggcggcgccggtggttacagtaacggcggatgcggcggcggaaccatagagctgtccatgatcaagacgtggctccggagcaaccagtcgcagcagcagccatcgccgccgcagcacgctgatcagggcatgagcaccgacgccagcgcgagcagctacgcgtgctccgacgtgctggtggggagctgcggcggcggcggcgccgggggcacggcgagctcgcatgggcagggcctggcgctgtcgatgagcacggggtcggtggccgccgccggagggggcggcgccgtcgtcgcggccgagagctcgtcgtcggagaacaagcgggtggattcgccgggcggcgccgtggacggcgccgtcccgaggaaatccatcgacaccttcgggcaaaggacgtctatataccgaggtgtaacaaggcatagatggacaggaagatatgaagctcatctgtgggataatagctgtaggagagaaggccaaagtcgcaaggggagacaggtttgtgtaggcggttatgacaaagaagataaggcggctcgggcttatgatttggcagctctaaaatactggggcacgaccacaacaacaaatttcccaatgagtaattatgaaaaggagctagaggaaatgaaacacatgaccaggcaggagtacattgcacatcttagaaggaatagcagtggattttctcgtggtgcatccaaatatcgtggtgttactaggcatcatcagcatgggagatggcaggcaaggatagggcgagttgcaggcaacaaggatatctacctaggcaccttcagcaccgaggaggaggccgccgaggcgtacgacatcgccgccatcaagttccgcgggctcaacgccgtcaccaacttcgacatgagccggtacgacgtcaagagcatcctggacagcagcacgctgccggtcggcggcgcggcgcggcggctcaaggaggcggaggtcgccgccgccgccgcgggcggcggcgtgatcgtctcccacctggccgacggcggtgtgggtgggtactactacgggtgcggcccgaccatcgcgttcggcggcggcggccagcagccggcgccgctcgccgtgcactacccgtcgtacggccaggccagcgggtggtgcaagccggagcaggacgcggtgatcgcggccgggcactgcgcgacggacctccagcacctgcacctcgggagcggcggcgccgccgccacccacaacttcttccagcagccggcgtcaagctcggccgtctacggcaacggcggcggcggcggcggcaacgcgttcatgatgccgatgggcgccgtggtggccgccgccgatcacggcgggcagagcagcgcctacggcggtggcgacgagagcgggaggctcgtcgtggggtacgacggcgtcgtcgacccgtacgcggccatgagaagcgcgtacgagctctcgcagggctcgtcgtcgtcgtcggtgagcgtcgcgaaggcggcgaacgggtacccggacaactggagctcgccgttcaacggcatgggatga

SEQ ID NO: 225 - protein, 658 aa, Oryza sativa
MASADNWLGFSLSGQGNPQHHQNGSPSAAGDAAIDISGSGDFYGLPTPDAHHIGMAGEDAPYGVMDAFNRGTHETQDWAMRGLDYGGGSSDLSMLVGSSGGGRRTVAGDGVGEAPKLENFLDGNSFSDVHGQAAGGYLYSGSAVGGAGGYSNGGCGGGTIELSMIKTWLRSNQSQQQPSPPQHADQGMSTDASASSYACSDVLVGSCGGGGAGGTASSHGQGLALSMSTGSVAAAGGGGAVVAAESSSSENKRVDSPGGAVDGAVPRKSIDTFGQRTSIYRGVTRHRWTGRYEAHLWDNSCRREGQSRKGRQVYLGGYDKEDKAARAYDLAALKYWGTTTTTNFPMSNYEKELEEMKHMTRQEYIAHLRRNSSGFSRGASKYRGVTRHHQHGRWQARIGRVAGNKDIYLGTFSTEEEAAEAYDIAAIKFRGLNAVTNFDMSRYDVKSILDSSTLPVGGAARRLKEAEVAAAAAGGGVIVSHLADGGVGGYYYGCGPTIAFGGGGQQPAPLAVHYPSYGQASGWCKPEQDAVIAAGHCATDLQHLHLGSGGAAATHNFFQQPASSSAVYGNGGGGGGNAFMMPMGAVVAAADHGGQSSAYGGGDESGRLVVGYDGVVDPYAAMRSAYELSQGSSSSSVSVAKAANGYPDNWSSPFNGMG

SEQ ID NO: 226 - DNA, 2082 bp, Sorghum bicolor
atggcttcgacgaacaaccactggctgggtttctcgctctcgggccaggataacccgcagcctaatcatcaggacagctcgcctgccgccgccggcatcgacatctccggcgccagcgacttctatggcttgcccacgcagcagggctccgacgggaatctcggcgtgccgggcctgcgggacgatcacgcttcttatggcatcatggaggccttcaacagggttcctcaagaaacccaagattggaacatgaggggattggactacaacggcggtggctcggaactctcgatgcttgtggggtccagcggcggcggcgggggcggcggcaagagggccgtggaagacagcgagcccaagctcgaagatttcctcggcggcaactcgttcgtctccgagcatgatcagtccggcggttacctgttctctggagtcccgatggccagcagcaccaacagcaacagcgggagcaacaccatggagctctccatgatcaagacctggctccggaacaaccaggtgccccagccgcagccgccagcagctccgcatcaggcgccgcagactgaggagatgagcaccgacgccaacgccagcgccagcagctttggctgctcggattcgatggggaggaacggcacggtggcggctgctgggagctcccagagcctggcgctctcgatgagcacgggctcgcacctgccgatggttgtggccggcggcggcgccagcggagcggcctcggagagcacgtcatcggagaacaagcgagcgagcggcgccatggattcgcccggcagcgcggtagaagccgtcccgaggaagtccatcgacacgttcgggcaaaggacctctatatatcgaggtgtaacaagacatagatggacagggcgatatgaggctcatctatgggataatagttgtagaagagaagggcagagtcgcaagggtaggcaagtttaccttggtggctatgacaaggaagacaaggcagcaagggcttatgatttggcagctctcaagtattggggcactactacaacaacaaatttccctataagcaactatgaaaaggagctagaggaaatgaaacatatgactaggcaggagtatattgcatacctaagaagaaatagcagtggattttctcgtggcgcatcaaaatatcgtggagtaactagacatcatcagcatgggagatggcaagcaaggatagggagagttgcaggaaacaaggatctctacttgggcacattcagcaccgaggaggaggcggcggaggcctacgacatcgccgcgatcaagttccgcggtctgaacgccgtcaccaacttcgacatgagccgctacgacgtcaagagcatcctcgagagcagcacgctgcctgtcggcggcgcggccaggcgcctcaaggatgccgtggaccacgtggaggccggcgccaccatctggcgcgccgacatggacggcggcgtgatctcccagctcgccgaagccgggatgggcggctacgcctcgtacgggcaccacgcctggccgaccatcgcgttccagcagccgtcgccgctctccgtccactacccgtacgggcagccgccgtcccgcgggtggtgcaagcccgagcaggacgcggccgtcgccgccgccgcgcacagcctgcaggacctccagcagctgcacctcggcagcgcggcacacaacttcttccaggcgtcgtcgagctcggcagtctacaacagcggcggcggcggcgctagcggcgggtaccaccagggcctcggtggcggcagcagctccttcctcatgccgtcgagcactgtcgtggcgggggccgaccaggggcacagcagcagcacggccaaccaggggagcacgtgcagctacggggacgatcaccaggaagggaagctcatcgggtacgacgccatggtggcggcgaccgcagccggcggggacccgtacgccgcggcgaggagcgggtaccagttctcgtcgcagggctcgggatccacggtgagcatcgcgagggcgaacgggtactctaacaactggagctctcctttcaacggcggcatggggtga

SEQ ID NO: 227 - protein, 693 aa, Sorghum bicolor
MASTNNHWLGFSLSGQDNPQPNHQDSSPAAAGIDISGASDFYGLPTQQGSDGNLGVPGLRDDHASYGIMEAFNRVPQETQDWNMRGLDYNGGGSELSMLVGSSGGGGGGGKRAVEDSEPKLEDFLGGNSFVSEHDQSGGYLFSGVPMASSTNSNSGSNTMELSMIKTWLRNNQVPQPQPPAAPHQAPQTEEMSTDANASASSFGCSDSMGRNGTVAAAGSSQSLALSMSTGSHLPMVVAGGGASGAASESTSSENKRASGAMDSPGSAVEAVPRKSIDTFGQRTSIYRGVTRHRWTGRYEAHLWDNSCRREGQSRKGRQVYLGGYDKEDKAARAYDLAALKYWGTTTTTNFPISNYEKELEEMKHMTRQEYIAYLRRNSSGFSRGASKYRGVTRHHQHGRWQARIGRVAGNKDLYLGTFSTEEEAAEAYDIAAIKFRGLNAVTNFDMSRYDVKSILESSTLPVGGAARRLKDAVDHVEAGATIWRADMDGGVISQLAEAGMGGYASYGHHAWPTIAFQQPSPLSVHYPYGQPPSRGWCKPEQDAAVAAAAHSLQDLQQLHLGSAAHNFFQASSSSAVYNSGGGGASGGYHQGLGGGSSSFLMPSSTVVAGADQGHSSSTANQGSTCSYGDDHQEGKLIGYDAMVAATAAGGDPYAAARSGYQFSSQGSGSTVSIARANGYSNNWSSPFNGGMG

SEQ ID NO: 228 - DNA, 2112 bp, Sorghum bicolor
atggctactgtgaacaactggctcgctttctccctctccccgcaggagctgccgcccacccagacggactccaccctcatctctgccgccaccaccgacgatgtctccggcgatgtctgcttcaacatcccccaagattggagcatgaggggatccgagctttcggcgctcgtcgccgagccgaagctggaggacttcctcggcggaatctccttctccgagcagcaccacaaggccaactgcaacatgatccccagcactagcagcacagcttgctacgcgagctcgggtgctaccgccggctaccatcaccagctgtaccaccagcccaccagctccgcgctccacttcgctgactccgtcatggtggcctcctcggccggcggcgtccacgacggaggtgccatgctcagcgcggccagcgctaatggtagcgctggcgctggcgctgccagtgccaatggcagcggcagcatcgggctgtccatgatcaagaactggctgcggagccaaccagctcccatgcagccgagggtggcggcggctgagagcgtgcaggggctctctttgtccatgaacatggcgggggcgacgcaaggcgccgctggcatgccacttcttgctggagagcgcggccgggcgcccgagagtgtctcgacgtcggcacagggtggagccgtcgtcacggctccaaaggaggatagcggtggcagcggtgttgccgccaccggcgccctagtagccgtgagcacggacacgggtggcagcggcgcgtcggctgacaacacggcaaggaagacggtggacacgttcgggcagcgcacgtcgatttaccgtggcgtgacaaggcatagatggactgggagatatgaagcacatctgtgggacaacagttgcagaagggaaggacaaactcgcaagggtcgtcaagtctatttaggtggctatgataaagaggagaaagctgctagggcttatgatctggctgctcttaagtactggggtcccacgacaacaacaaattttccagtgaataactacgaaaaggagctggaggatatgaagcacatgacaaggcaggagtttgtagcgtctctgagaaggaagagcagtggtttctccagaggtgcatccatttacaggggagtgactaggcatcaccagcatggaagatggcaagcacggattggacgagttgcagggaacaaggatctctacttgggcaccttcagcacgcaggaggaggcagcggaggcatacgacattgcggcgatcaagttccgcggcctcaacgccgtcacaaacttcgacatgagccgctacgacgtcaagagcatcctggacagcagtgcgctccccatcggcagcgccgccaagcgtctcaaggaggccgaggccgccgcgtccgcacagcaccatgccggcgtggtgagctacgacgtcggccgcatagcctcacagctcggcgacggcggcgccctggcggcggcgtacggcgcgcactaccatggcgcctggccgaccatcgcgttccagccgagcgcggccacgggcctgtaccacccgtacgcgcagccgatgcgcgggtggtgcaagcaggagcaggaccacgcggtgatcgcggccgcgcacagcctgcaggagctccaccacctgaacctgggtgctgccgccggcgcgcacgacttcttctcggcggggcagcaggcggcgatgcacggcctgggtagcatggacaatgcatcactcgagcacagcaccggctccaactccgtcgtgtacaacggtgttggtgatagcaacggcagcaccgtcgtcggcagtggtggctacatgatgcctatgagcgctgccacggcgacggctaccacggcaatggtgagccacgagcaggtgcatgcacgggcacagggtgatcaccacgacgaagccaagcaggctgctcagatggggtacgagagctacctggtgaacgcagagaactatggcggcgggaggatgtctgcggcctgggcgactgtctcagcgccaccggcggcaagcagcaacgataacatggcggacgtcggccatggcggcgcacagctcttcagtgtctggaacgatacttaa

SEQ ID NO: 229 - protein, 703 aa, Sorghum bicolor
MATVNNWLAFSLSPQELPPTQTDSTLISAATTDDVSGDVCFNIPQDWSMRGSELSALVAEPKLEDFLGGISFSEQHHKANCNMIPSTSSTACYASSGATAGYHHQLYHQPTSSALHFADSVMVASSAGGVHDGGAMLSAASANGSAGAGAASANGSGSIGLSMIKNWLRSQPAPMQPRVAAAESVQGLSLSMNMAGATQGAAGMPLLAGERGRAPESVSTSAQGGAVVTAPKEDSGGSGVAATGALVAVSTDTGGSGASADNTARKTVDTFGQRTSIYRGVTRHRWTGRYEAHLWDNSCRREGQTRKGRQVYLGGYDKEEKAARAYDLAALKYWGPTTTTNFPVNNYEKELEDMKHMTRQEFVASLRRKSSGFSRGASIYRGVTRHHQHGRWQARIGRVAGNKDLYLGTFSTQEEAAEAYDIAAIKFRGLNAVTNFDMSRYDVKSILDSSALPIGSAAKRLKEAEAAASAQHHAGVVSYDVGRIASQLGDGGALAAAYGAHYHGAWPTIAFQPSAATGLYHPYAQPMRGWCKQEQDHAVIAAAHSLQELHHLNLGAAAGAHDFFSAGQQAAMHGLGSMDNASLEHSTGSNSVVYNGVGDSNGSTVVGSGGYMMPMSAATATATTAMVSHEQVHARAQGDHHDEAKQAAQMGYESYLVNAENYGGGRMSAAWATVSAPPAASSNDNMADVGHGGAQLFSVWNDT

SEQ ID NO: 230 - DNA, 2112 bp, Setaria italica; identical to SEQ ID NO: 228

SEQ ID NO: 231 - protein, 703 aa, Setaria italica; identical to SEQ ID NO: 229

SEQ ID NO: 232 - DNA, 2064 bp, Brachypodium distachyum
atggctaccgtgaacaactggctgggcttctccctctccccgcaggagctcccgtcctccgccgctgccgccgccggcgacgtctccggcgccgacgtctgcttcaacatcccgcaagattggggcatgaggggatcggagctgtcggcgctggtggcggagccgaagctggaggacttcctcggcggcatctcttcctactctgaccatcacaaggcagccagaagcaacaacatgaacatcaatggcgccgccgcctgctacgcgagctccggcagcagcggctaccagctttaccacgaccaccccaactccctccagttcgccgactctgtcatggtcgcttcctccgctggcggcgtccacaatgaacatggcatcatggcaagcaccactgccaatggtgcaggcaccaatggcggcatcgggctgtccatgatcaagagctggctgcggagccagccggcgccggcgcagcaggagcagcagagggcggaggggctgtcgctgtccatgaacatgccgctcctgcaggcggcggcggcggagactagcttgtccacgtcggcagcgcagcagggatctcggaaggagaataatggcagcagtagtgctggttctggagccgtggtgtcagccggtactaccagcgccggcgcggtggtggtggagtcgccggcagcggggaggaagaccgccgacacgttcgggcagcggacttcgatctaccgcggcgtcaccaggcatagatggacagggaggtatgaggctcacctgtgggacaacagctgcagaagagaaggacaaactcgcaagggtcgtcaagtctatctcggtggttatgacaaagaggagaaagctgcaagagcttatgatttggctgctctcaagtattggggccccaccacgacgacaaattttccagtagataactacgagaaggagctggaggagatgaagcacatgacaaggcaggagtttgtggcgtctctccgaaggaagagcagtggtttttcaagaggtgcatccatttatcgtggagtaactaggcaccaccaacatgggagatggcaagcaaggatagggagagttgcagggaacaaggatctctacttgggcactttcagcacgcaggaggaggcggcggaggcgtacgacatcgcggcgatcaagttccgggggctgaacgccgtcactaacttcgacatgtcccgctacgacgtcaagagcatcctcgacagcaccgccgcgctgcctgtcggcggcaccaagcgcctcagggacgcggctgccgccgatcagcactaccagcagcgcgccgggggcgtcgtcagctacgccgcgccgcagctcggtggtgtcaacgagaccgcccttgcctatggcgcgccctactaccaccaccaaacctccgccgcagcgtggccgaccatcgcgttccaggcggcgccgcaagcgtcgtcggggcacgggcacatgctgtaccacccgtacgggcagccattgatgcgcgggtggtgcaagcaagagcaggagcaagggcaagggcagcaggagccggaccacgcggtgatcgcggccgcgcacagcctgcaggacctccaccacctcaacctcggcgccggtgcgcacgacttcttctcccagcatgcccacgccatgcaccagcagcagcagcagcacggcggcctcggcagcgtcgacaacaacggcgcggcgtcgctggagcacagcactggctccaactccgtcgtctacaacggggccgctgccgccggggacaccaacaacagctacatgctgccgcccatgagcgctgcagcagcagctggcttcggcctccgcgatcagcaggacgaaggcgggaagatggcgtacgagaacttcctcctcggcgccgccaccgacggctactgtggccctggaaggatggcggccacctggacaccggtgtcggtttcggcggcccagccagtggcggcaacgagcagcggcagcgacatggccggtgccgtctgccatggcggcgcgcagctcttcagcgtctggaacgacgacagttag

SEQ ID NO: 233 - protein, 687 aa, Brachypodium distachyum
MATVNNWLGFSLSPQELPSSAAAAAGDVSGADVCFNIPQDWGMRGSELSALVAEPKLEDFLGGISSYSDHHKAARSNNMNINGAAACYASSGSSGYQLYHDHPNSLQFADSVMVASSAGGVHNEHGIMASTTANGAGTNGGIGLSMIKSWLRSQPAPAQQEQQRAEGLSLSMNMPLLQAAAAETSLSTSAAQQGSRKENNGSSSAGSGAVVSAGTTSAGAVVVESPAAGRKTADTFGQRTSIYRGVTRHRWTGRYEAHLWDNSCRREGQTRKGRQVYLGGYDKEEKAARAYDLAALKYWGPTTTTNFPVDNYEKELEEMKHMTRQEFVASLRRKSSGFSRGASIYRGVTRHHQHGRWQARIGRVAGNKDLYLGTFSTQEEAAEAYDIAAIKFRGLNAVTNFDMSRYDVKSILDSTAALPVGGTKRLRDAAAADQHYQQRAGGVVSYAAPQLGGVNETALAYGAPYYHHQTSAAAWPTIAFQAAPQASSGHGHMLYHPYGQPLMRGWCKQEQEQGQGQQEPDHAVIAAAHSLQDLHHLNLGAGAHDFFSQHAHAMHQQQQQHGGLGSVDNNGAASLEHSTGSNSVVYNGAAAAGDTNNSYMLPPMSAAAAAGFGLRDQQDEGGKMAYENFLLGAATDGYCGPGRMAATWTPVSVSAAQPVAATSSGSDMAGAVCHGGAQLFSVWNDDS

SEQ ID NO: 234 - DNA, 3769 bp, Sorghum bicolor
atggctactgtgaacaactggctcgctttctccctctccccgcaggagctgccgcccacccagacggactccaccctcatctctgccgccaccaccgacgatgtctccggcgatgtctgcttcaacatcccccaaggtatgcatctatcgatcgatatatgtacgtacagtgcgcatatatatatatatctgcagtttgtggtacgaatactgattgaagctagcatgaaatgtcgtttgttctttcagattggagcatgaggggatccgagctttcggcgctcgtcgccgagccgaagctggaggacttcctcggcggaatctccttctccgagcagcaccacaaggccaactgcaacatgatccccagcactagcagcacagcttgctacgcgagctcgggtgctaccgccggctaccatcaccagctgtaccaccagcccaccagctccgcgctccacttcgctgactccgtcatggtggcctcctcggccggcggcgtccacgacggaggtgccatgctcagcgcggccagcgctaatggtagcgctggcgctggcgctgccagtgccaatggcagcggcagcatcgggctgtccatgatcaagaactggctgcggagccaaccagctcccatgcagccgagggtggcggcggctgagagcgtgcaggggctctctttgtccatgaacatggcgggggcgacgcaaggcgccgctggcatgccacttcttgctggagagcgcggccgggcgcccgagagtgtctcgacgtcggcacagggtggagccgtcgtcacggctccaaaggaggatagcggtggcagcggtgttgccgccaccggcgccctagtagccgtgagcacggacacgggtggcagcggcgcgtcggctgacaacacggcaaggaagacggtggacacgttcgggcagcgcacgtcgatttaccgtggcgtgacaaggtaataagggtccggtattacaatgaatcgtcacttcgtcagagaactaaactagcacaaatcagcaatgaatcaagtaatatcatgaaatttagaaaagccgttagcaatgcaaggagctatcattatagatttgattgcatctagacagttctgaattaaatgagtagggcaatgtgtagcctttgatgatctcgctgattattaggagtgccatttgtattggctatgattgtggtatatacagcagtagacaattaacaaaaggctaccactttcgaattattttaggcatagatggactgggagatatgaagcacatctgtgggacaacagttgcagaagggaaggacaaactcgcaagggtcgtcaaggtaccaatataatgcaatacaccgtatttaaatatatatgcttttctgtaattaagtttatactttcacaaaactgacattacttcgcattatcatttttggattgtcgtcgtcatgattggcgggattgaaatgaactattgaatctacagtctatttaggtaagcgatttcacttggttattaatttgggaccaactacttaatccagtttgtttttcccctataaccattattttttcatctgtgttctcaactcttacttttccatcttgttccactgataggtggctatgataaagaggagaaagctgctagggcttatgatctggctgctcttaagtactggggtcccacgacaacaacaaattttccagtatgtatatgtagaatgcagttttacttcactgaagatcatacctttgctatgtctcaaatgccgttcattagttagtggatctgaagtgaaggttctgtaatttttgttaactatgtacattgctggaattgtacttaaagtcatttgtttttgtatatctaggtgaataactacgaaaaggagctggaggatatgaagcacatgacaaggcaggagtttgtagcgtctctgagaaggtcggtcgaacagcattgattaatcaatgccaactctattgaataaacatctactctgttaattgttaaagtttgagagaaagatctgcatgttagatcttaatagaccactgtatatgaatgcaggaagagcagtggtttctccagaggtgcatccatttacaggggagtgactaggtatgaattcatataatggcgtcaacaaacacacatacactttgattgaggaggcgaatgcacgcatggattgaatgtgaatggtgttttacttgaactatgtaattataggcatcaccagcatggaagatggcaagcacggattggacgagttgcagggaacaaggatctctacttgggcaccttcagtaagtatcagagatgttttctcattgtatatagaggagtacttctatatgtatatatacattcagttattcaccacacaaaagcaaattgcagtcaactaataacaatctcaacgcaatgagaagcaagtgttacagctgatagtacacatttgtagaccttctgcatatggatgttatatatgatgactattaaaaatgtgaccattgcatcaagtcatgcaaagttgcattgcagtagtacatacattacttagtgcatgctcctcaagtggctttttcaaacctgatcccatgtctggcgctattgttgtctcccattcacccgtgcatcaggtcaaaatagtactatgcctcaataagaaacacatgagcatgcactggcagcagcagactaatcaagttctatcatttactaataaactaattaggctacagcatccaaaagattctacccattaagccacaactgttcatgcatgcattcataaaccaggataccaccatgcatgcgtgcaccgtgttcgtgcttggaatattgagctgagccgagtgcacccttgcgtggatgcaggcacgcaggaggaggcagcggaggcatacgacattgcggcgatcaagttccgcggcctcaacgccgtcacaaacttcgacatgagccgctacgacgtcaagagcatcctggacagcagtgcgctccccatcggcagcgccgccaagcgtctcaaggaggccgaggccgccgcgtccgcacagcaccatgccggcgtggtgagctacgacgtcggccgcatagcctcacagctcggcgacggcggcgccctggcggcggcgtacggcgcgcactaccatggcgcctggccgaccatcgcgttccagccgagcgcggccacgggcctgtaccacccgtacgcgcagccgatgcgcgggtggtgcaagcaggagcaggaccacgcggtgatcgcggccgcgcacagcctgcaggagctccaccacctgaacctgggtgctgccgccggcgcgcacgacttcttctcggcggggcagcaggcggcgatgcacggcctgggtagcatggacaatgcatcactcgagcacagcaccggctccaactccgtcgtgtacaacggtgttggtgatagcaacggcagcaccgtcgtcggcagtggtggctacatgatgcctatgagcgctgccacggcgacggctaccacggcaatggtgagccacgagcaggtgcatgcacgggcacagggtgatcaccacgacgaagccaagcaggctgctcagatggggtacgagagctacctggtgaacgcagagaactatggcggcgggaggatgtctgcggcctgggcgactgtctcagcgccaccggcggcaagcagcaacgataacatggcggacgtcggccatggcggcgcacagctcttcagtgtctggaacgatacttaa

SEQ ID NO: 235 - DNA, 35833 bp, Artificial Sequence
  PHP8418-0005
gtttacccgccaatatatcctgtcaaacactgcggccgcacttgaccgcggatggagccggagctgtggtgaggccatcgacgggaggtgggggagaacacagtctcagtgttctttgtgagtccgcaaggtttttagcttttctgtattaattaaggttgctgttggctgtagaatacggtcgtggaagagctgtatcggtagctactacgtaagctattatatactggaagtctggagctcgtcgatctccggtcgtcttcctccatttctcctcgtcttgctttgactgctgctaccatttgcttctgttttctgatgaagcatgccatgtcggccaccagtgtttgtgtggtttttgcagggaatggctttcaagtgctgtgattgaatggccctcgtcgtcctcggctgagctcacatggacgcgtcatgtgagtgagatatatgatcatatgatgagtggggttcgggtgagtgcgtacttgaagtaggatcccgctttcactcattcattcattggcctttaaaccgggaaattttcgcgaggagatggagggaagcaagcagggtgacgagtgcagagtgccgcgagcgctttgtcaaaaggcaccgccgtaggcaaaaaaatcaatggccctgactgactcgatggtagtactactgtagagactagagagggttgctccccatatcttcgtgtgacttttactccagcattgcatttccgtcattgagacgttaattaatagcagctttcgggacagatgactgtggccatgtttcgtcacggccgcttcgtgccagctgggggtactatagtactgtgattttgttagtaaaaactttcattaggccaccattgacgaccgggccttcgcttttgctgcgctaattaaccatttcccggcgaccgaagggaacatgaacatgccccgacacatgagggcatgaggactagtgttctccctgtcgttcgttgacttgactagtgatagtttaaacgctcttcaactggaagagcggttactaccggttcactagctagctgctaatcgagctagttaccctatgaggtgacatgaagcgctcacggttactatgacggttagcttcacgactgttggtggcagtagcgtacgacttagctatagttccggacttacctagctaataacttcgtatagcatacattatacgaagttatggttaccgagctgttaccaagcggccgcacactgatagtttaaactgaaggcgggaaacgacaatctgatcatgagcggagaattaagggagtcacgttatgacccccgccgatgacgcgggacaagccgttttacgtttggaactgacagaaccgcaacgattgaaggagccactcagccgcgggtttctggagtttaatgagctaagcacatacgtcagaaaccattattgcgcgttcaaaagtcgcctaaggtcactatcagctagcaaatatttcttgtcaaaaatgctccactgacgttccataaattcccctcggtatccaattagagtctcatattcactcccatggcggccaatgcgggcggcggtggagcgggaggaggcagcggcagcggcagcgtggctgcgccggcggtgtgccgccccagcggctcgcggtggacgccgacgccggagcagatcaggatgctgaaggagctctactacggctgcggcatccggtcgcccagctcggagcagatccagcgcatcaccgccatgctgcggcagcacggcaagatcgagggcaagaacgtcttctactggttccagaaccacaaggcccgcgagcgccagaagcgccgcctcaccagcctcgacgtcaacgtgcccgccgccggcgcggccgacgccaccaccagccaactcggcgtcctctcgctgtcgtcgccgccgccttcaggcgcggcgcctccctcgcccaccctcggcttctacgccgccggcaatggcggcggatcggctgtgctgctggacacgagttccgactggggcagcagcggcgctgctatggccaccgagacatgcttcctgcaggactacatgggcgtgacggacacgggcagctcgtcgcagtggccacgcttctcgtcgtcggacacgataatggcggcggccgcggcgcgggcggcgacgacgcgggcgcccgagacgctccctctcttcccgacctgcggcgacgacggcggcagcggtagcagcagctacttgccgttctggggtgccgcgtccacaactgccggcgccacttcttccgttgcgatccaacagcaacaccagctgcaggagcagtacagcttttacagcaacagcaacagcacccagctggccggcaccggcaaccaagacgtatcggcaacagcagcagcagccgccgccctggagctgagcctcagctcatggtgctccccttaccctgctgcagggagtatgtgagagcaacgcgagctgccactgctcttcactgatgtctctggaatggaaggaggaggaagtgagaacagatcattcgacaaagcagcattagtccgttgatcggtggaagaccactcgtcagtgttgagttgaatgtttgatcaataaaatacggcaatgctgtaagggttgttttttatgccattgataatacactgtactgttcagttgttgaactctatttcttagccatgccaagtgcttttcttattttgaataacattacagcaaaaagttgaaagacaaaaaaaaaaacccccgaacagagtgctttgggtcccaagcttctttagactgtgttcggcgttccccctaaatttctccccctatatctcactcacttgtcacatcagcgttctctttccccctatatctccacgctctacagcagttccacctatatcaaacctctataccccaccacaacaatattatatactttcatcttcaactaactcatgtaccttccaatttttttctactaataattatttacgtgcacagaaacttagcaaggagagagagagcgggaatttaaatgctcggcgttaggcttttagtccgctaggtggctagaccgaggttaggacgctagttcactaggggcctagtggtgttttaagacgtcacggtcactacgaatcgaccgaagcttgcatgggccgcatcgagcagctggcttgtggggaccagacaaaaaaggaatggtgcagaattgttaggcgcacctaccaaaagcatctttgcctttattgcaaagataaagcagattcctctagtacaagtggggaacaaaataacgtggaaaagagctgtcctgacagcccactcactaatgcgtatgacgaacgcagtgacgaccacaaaactcgagcaacgagatcatgagccaatcaaagaggagtgatgtagacctaaagcaataatggagccatgacgtaagggcttacgcccatacgaaataattaaaggctgatgtgacctgtcggtctctcagaacctttactttttatgtttggcgtgtatttttaaatttccacggcaatgacgatgtgaccgtcgacccactaaaacattgctttgtcaaaagctaaaaaagatgatgcccgacagccacttgtgtgaagcatgagaagccggtccctccactaagaaaattagtgaagcatcttccagtggtccctccactcacagctcaatcagtgagcaacaggacgaaggaaatgacgtaagccatgacgtctaatcccagggccagcttgcatgcctgcagtgcagcgtgacccggtcgtgcccctctctagagataatgagcattgcatgtctaagttataaaaaattaccacatattttttttgtcacacttgtttgaagtgcagtttatctatctttatacatatatttaaactttactctacgaataatataatctatagtactacaataatatcagtgttttagagaatcatataaatgaacagttagacatggtctaaaggacaattgagtattttgacaacaggactctacagttttatctttttagtgtgcatgtgttctcctttttttttgcaaatagcttcacctatataatacttcatccattttattagtacatccatttagggtttagggttaatggtttttatagactaatttttttagtacatctattttattctattttagcctctaaattaagaaaactaaaactctattttagtttttttatttaataatttagatataaaatagaataaaataaagtgactaaaaattaaacaaataccctttaagaaattaaaaaaactaaggaaacatttttcttgtttcgagtagataatgccagcctgttaaacgccgtcgacgagtctaacggacaccaaccagcgaaccagcagcgtcgcgtcgggccaagcgaagcagacggcacggcatctctgtcgctgcctctggacccctctcgagagttccgctccaccgttggacttgctccgctgtcggcatccagaaattgcgtggcggagcggcagacgtgagccggcacggcaggcggcctcctcctcctctcacggcaccggcagctacgggggattcctttcccaccgctccttcgctttcccttcctcgcccgccgtaataaatagacaccccctccacaccctctttccccaacctcgtgttgttcggagcgcacacacacacaaccagatctcccccaaatccacccgtcggcacctccgcttcaaggtacgccgctcgtcctcccccccccccctctctaccttctctagatcggcgttccggtccatgcatggttagggcccggtagttctacttctgttcatgtttgtgttagatccgtgtttgtgttagatccgtgctgctagcgttcgtacacggatgcgacctgtacgtcagacacgttctgattgctaacttgccagtgtttctctttggggaatcctgggatggctctagccgttccgcagacgggatcgatttcatgattttttttgtttcgttgcatagggtttggtttgcccttttcctttatttcaatatatgccgtgcacttgtttgtcgggtcatcttttcatgcttttttttgtcttggttgtgatgatgtggtctggttgggcggtcgttctagatcggagtagaattctgtttcaaactacctggtggatttattaattttggatctgtatgtgtgtgccatacatattcatagttacgaattgaagatgatggatggaaatatcgatctaggataggtatacatgttgatgcgggttttactgatgcatatacagagatgctttttgttcgcttggttgtgatgatgtggtgtggttgggcggtcgttcattcgttctagatcggagtagaatactgtttcaaactacctggtgtatttattaattttggaactgtatgtgtgtgtcatacatcttcatagttacgagtttaagatggatggaaatatcgatctaggataggtatacatgttgatgtgggttttactgatgcatatacatgatggcatatgcagcatctattcatatgctctaaccttgagtacctatctattataataaacaagtatgttttataattattttgatcttgatatacttggatgatggcatatgcagcagctatatgtggatttttttagccctgccttcatacgctatttatttgcttggtactgtttcttttgtcgatgctcaccctgttgtttggtgttacttctgcaggtcgactttaacttagcctaggatccatggccactgtgaacaactggctcgctttctccctctccccgcaggagctgccgccctcccagacgacggactccacactcatctcggccgccaccgccgaccatgtctccggcgatgtctgcttcaacatcccccaagattggagcatgaggggatcagagctttcggcgctcgtcgcggagccgaagctggaggacttcctcggcggcatctccttctccgagcagcatcacaaggccaactgcaacatgatacccagcactagcagcacagtttgctacgcgagctcaggtgctagcaccggctaccatcaccagctgtaccaccagcccaccagctcagcgctccacttcgcggactccgtaatggtggcttcctcggccggtgtccacgacggcggtgccatgctcagcgcggccgccgctaacggtgtcgctggcgctgccagtgccaacggcggcggcatcgggctgtccatgattaagaactggctgcggagccaaccggcgcccatgcagccgagggtggcggcggctgagggcgcgcaggggctctctttgtccatgaacatggcggggacgacccaaggcgctgctggcatgccacttctcgctggagagcgcgcacgggcgcccgagagtgtatcgacgtcagcacagggtggagccgtcgtcgtcacggcgccgaaggaggatagcggtggcagcggtgttgccggcgctctagtagccgtgagcacggacacgggtggcagcggcggcgcgtcggctgacaacacggcaaggaagacggtggacacgttcgggcagcgcacgtcgatttaccgtggcgtgacaaggcatagatggactgggagatatgaggcacatctttgggataacagttgcagaagggaagggcaaactcgtaagggtcgtcaagtctatttaggtggctatgataaagaggagaaagctgctagggcttatgatcttgctgctctgaagtactggggtgccacaacaacaacaaattttccagtgagtaactacgaaaaggagctcgaggacatgaagcacatgacaaggcaggagtttgtagcgtctctgagaaggaagagcagtggtttctccagaggtgcatccatttacaggggagtgactaggcatcaccaacatggaagatggcaagcacggattggacgagttgcagggaacaaggatctttacttgggcaccttcagcacccaggaggaggcagcggaggcgtacgacatcgcggcgatcaagttccgcggcctcaacgccgtcaccaacttcgacatgagccgctacgacgtgaagagcatcctggacagcagcgccctccccatcggcagcgccgccaagcgcctcaaggaggccgaggccgcagcgtccgcgcagcaccaccacgccggcgtggtgagctacgacgtcggccgcatcgcctcgcagctcggcgacggcggagccctggcggcggcgtacggcgcgcactaccacggcgccgcctggccgaccatcgcgttccagccgggcgccgccagcacaggcctgtaccacccgtacgcgcagcagccaatgcgcggcggcgggtggtgcaagcaggagcaggaccacgcggtgatcgcggccgcgcacagcctgcaggacctccaccacctgaacctgggcgcggccggcgcgcacgactttttctcggcagggcagcaggccgccgccgctgcgatgcacggcctgggtagcatcgacagtgcgtcgctcgagcacagcaccggctccaactccgtcgtctacaacggcggggtcggcgacagcaacggcgccagcgccgtcggcggcagtggcggtggctacatgatgccgatgagcgctgccggagcaaccactacatcggcaatggtgagccacgagcaggtgcatgcacgggcctacgacgaagccaagcaggctgctcagatggggtacgagagctacctggtgaacgcggagaacaatggtggcggaaggatgtctgcatgggggactgtcgtgtctgcagccgcggcggcagcagcaagcagcaacgacaacatggccgccgacgtcgggcatggcggcgcgcagctcttcagtgtctggaacgacacttaagcgtacctagtggtacctgacatcttatagtctgcaacctctcgtgtctgaattcctatctttatcaagtgttattgcttccacgactataggacagctttcgtcgaaagcttttgctcatgtgatctcgaaggattcatctagtctgatttttcgtgacttgtatcggttttattggattcatccaacatatatcaataaaaaatgagttgtgtttcctttcttcctagttcagttaaaattatttccctcctgcgcttgtgctgtaattgtctgtgtacctgttgtttgtgactgtgttagttcccttggatatgatttcgtatttgatatgtacatggagatagcttagcttcattattggagtatgaagttagtatgacatagtcactctcctggaaaattgacactgcaaaccatatttttattctgaaccacaaatcctagtcagtccgctggcatatgccgtccgtttgctgaatccagaacgtgggtttggagatgtacggctgagatgcctctatgcgaaggggatttcgtggtgaaacgagatgggagtagagcaacgcccgtggaagatgcttcaaacttccacacttttgagcaacgatcggcagtagtaaggtagacgatttcaagatcaaagcatatgaagataaacaacatcaacaacaaaatttgttggggttctatagagagaaacagagctacatacatacactgttttgtatctaccatctgagatgatgaaaagatgaaaaactaaagaatgccccggcgccaacgccaggacacgccgcgcgcgcgtcacccgagccatctcttgacccagccggcgctgtatatttacacacgttgcagcatcgatcaccacctgttcgatcgcgtcgccgtcaccggcgcgccgcgacttattgaactagtctagggcgcggctaacaacctagcttagattgccttgtctaaacccttaggctaacgcgccacccgcggttcaaagccaatgactgttgttaggtccagtttctaaggacgaatcatccaatcactggttctttctgaacaaaacaaagagctatagagttacgttactgtagccgagacagagcctgcaatctggttatgccacatactaggttctttcttaaagttgactcactctatcctaagttctacttacaaggagctacaacaaattggtcataaccggagagcgttcaaggaggtaatatcccatcttactctgtagcaaggctacaaaaggagagctaaagaactaggctacaaaaagagagctaaagaactaactatctagcaagactacagagctatagtgtagagatttcataaccggtgagcgttcaaggatactttgaagagaagaggtaatatctcaactagcaagactacaaaaaaatggagatataaaactaactgtctaacaagactacagagctatagtagagatagatacgttcgacacttaagcatgagaattcgagctcggtaccctggttcacaaactcaatacaacacacagtggagtagggtattacgctccggcggcccgaaccactctaaatccttgtgtcctcgtgtgctcttccaccattaatgactgtaattgcagggacacgaagagttgtagcgcttttgccaacaagatccgctatatgctagtagagtggaacctgcacagcaacaagcatccaataatctgagaataagaattatgtgtggtgatggttctcatctctgcaactcgccattttcgcgagagaaccaaatccaagttggtgaagatcatgatttgggctcatgggctggcatagtagctattacctttgcaattgtggttcgaatctatccgatattctccttttcagggagagctaatgcttatgcttattgggtattttggtttgacactgcttcacgcccaaaaaaaggcaactatgtctgagttggatatggcccaaaaaaaggcagctatgtctgagttggatatggaagtcttctttcgtttagggtgaagtaagaccaagctcatgagcttattatcttaggtcggaacaaattagttgataggcatggcacatttatcaaattataatgattttaacagaaaagcaacacctctttttcagcagcaccagctttgcaagctgcaattgacactccaagcatagtatttgctccaaactcagcctgcatttcgcacaatatcatatctatttccatttggataaaatatattttccagaaatatgggaacagaatcaagatacagaaaaaagttgtggtagtagtggtaagtggaaacacaagtacagtgaaaagatagcattatttctgaacagtcaaattaaccgaaataagtagtatcacatactgcccctaaattgactacacccaatgtaaagaattgcttgagcatattgagccatcagttgtttgtttgtgtaacggatttgacaatgcagagttcaggagcaaaaaaccgcaaaggagagaaagagggaaaggatctcctagtatcccaccttgtggcgcgccctgtcaagtgcatgatggcctggtcgatctgcgtctgctgctgcggttccatcccaacgagtgcctccgacaccttgtcgttgatcacccgcaccgcgtaggcgacccccctggcgaggaacttccgcctctcggaggccccggccgcgtcggcggcggcgccctcgagcgcgcccacgctagccgtagatgctcggtgcacggccttgttggtgtgcaactcgacctcaacggccggtgcgctacgcccgtcaaggatctggcgcgcccgcaccctcgtgatcacggtgggcgcctcccgcctcatgtggccgacgatgaaaagcgccgggttaggggccttggcgcgcaccgccgtattcagggcctcctcgctcttgcgcgagagcaggtgcttccccaggtactcctgcactgacaaggctgccacagcggtggaatttgtcctcacgacttcgccacgtcgtcctcacctccctggcttcccacgactccgccgtatcgaggtgctcggtgggtcgtcttaatccgaagtccgaactaggaagacgagacagagaggtctgaggaatgggcctcgtttgatgttgagctgaattatttttccagcataagcccaggtcttggtccatgaacaaaattactagaaacccagcccagtactacgatctaaaagagggactgccactggatagctctctctagcattctccacgctccaatacagcggcgtcgtgtctatccgggtctatccgcgaacacgtgagaactctccagaaactgctttctcctccacttcatctctctcgctttccctctataaaaagaccccttctaggaattgagggagacagcaagcaccaagcagcgatccgaagctcaatcaattcactcaaacctcttccccaaatcttcgattagatcttcgttgacaagaagactagaaccgaacctgacatgtccaacctgctcacggttcaccagaaccttccggctcttccagtggacgcgacgtccgatgaagtcaggaagaacctcatggacatgttccgcgacaggcaagcgttcagcgagcacacctggaagatgctgctctccgtctgccgctcctgggctgcatggtgcaagctgaacaacaggaagtggttccccgctgagcccgaggacgtgagggattaccttctgtacctgcaagcgcgaggtttgtttctgcttctacctttgatatatatataataattatcattaattagtagtaatataatatttcaaatatttttttcaaaataaaagaatgtagtatatagcaattgcttttctgtagtttataagtgtgtatattttaatttataacttttctaatatatgaccaaaacatggtgatgcctaggtctggcagtgaagaccatccagcaacaccttggacaactgaacatgcttcacaggcgctccggcctcccgcgccccagcgactcgaacgccgtgagcctcgtcatgcgccgcatcaggaaggaaaacgtcgatgccggcgaaagggcaaagcaggccctcgcgttcgagaggaccgatttcgaccaggtccgcagcctgatggagaacagcgacaggtgccaggacattaggaacctggcgttcctcggaattgcatacaacacgctcctcaggatcgcggaaattgcccgcattcgcgtgaaggacattagccgcaccgacggcggcaggatgcttatccacattggcaggaccaagacgctcgtttccaccgcaggcgtcgaaaaggccctcagcctcggagtgaccaagctcgtcgaacgctggatctccgtgtccggcgtcgcggacgacccaaacaactacctcttctgccgcgtccgcaagaacggggtggctgcccctagcgccaccagccaactcagcacgagggccttggaaggtattttcgaggccacccaccgcctgatctacggcgcgaaggatgacagcggtcaacgctacctcgcatggtccgggcactccgcccgcgttggagctgctagggacatggcccgcgccggtgtttccatccccgaaatcatgcaggcgggtggatggacgaacgtgaacattgtcatgaactacattcgcaaccttgacagcgagacgggcgcaatggttcgcctcctggaagatggtgactgaggtacccaacctagacttgtccatcttctggattggccaacttaattaatgtatgaaataaaaggatgcacacatagtgacatgctaatcactataatgtgggcatcaaagttgtgtgttatgtgtaattactagttatctgaataaaagagaaagagatcatccatatttcttatcctaaatgaatgtcacgtgtctttataattctttgatgaaccagatgcatttcattaaccaaatccatatacatataaatattaatcatatataattaatatcaattgggttagcaaaacaaatctagtctaggtgtgttttgcgatccgatatcgaattggccacggtaccagctgctgctgttctagggttcacaagtctgcctatttgtcttccccaatggagctatggttgtctggtctggtccttggtcgtgtcccgtttcattgtgtactatttacctgtaatgtgtatccttaagtctggtttgatggtgtctgaaacgttttgctgtggtagagcagcatggaagaactataatgaataagtgatccctaatcattgtgtccaaattttgcttctgctatacccttttgtgctgtttcttatgttttgcttaaaaatttgatctgacaaacaaatttgtctaaattatgctcttgttctgactgtgtactgtacacatttgtattgctaccggtttggcacatagttttctctttgattgcagatcaaacccttctgattgcagattgcttggctatggctgatgtgctcactgttcttctttagcttgtatattgctgatggtggcttggctacggctgaaaaagttgctgctgcgccgacttggcaactgttgctccagtaatgctttgtcctctcttcctagccgccgacttggcacttggcagctgttgctcctgtaatgcgttgttatctcttatctcttgagatgtactatgattttgaggctgtttgacttgtgccagattgccagtgctgatgctatattatctcaggtttttatgctagtatatgttttactgtgtgctgcctgtgtcgagttacgtaatctattgaaccgctatgcgtgttgatgccctgttgttgcttgccagattgatgcccctgttgcttgcagcttgcaagctgtagtgaaatcctaaaattccaaaccaaatctattctgaacttttgaagatctgtgatgtccggaagaaaagattcaaacagataaacgggactctccagaatctataaaataaatgatcgacaaacgctttgctttggtaggcttcataacttcgtatagcatacattatacgaagttataagcttttaattaagtcatctagttgaaggatcgctatcaactttgtatagaaaagttgggccgaattcgagctcggtacggccagaatggcccggaccgacctgcagtgcagcgtgacccggtcgtgcccctctctagagataatgagcattgcatgtctaagttataaaaaattaccacatattttttttgtcacacttgtttgaagtgcagtttatctatctttatacatatatttaaactttactctacgaataatataatctatagtactacaataatatcagtgttttagagaatcatataaatgaacagttagacatggtctaaaggacaattgagtattttgacaacaggactctacagttttatctttttagtgtgcatgtgttctcctttttttttgcaaatagcttcacctatataatacttcatccattttattagtacatccatttagggtttagggttaatggtttttatagactaatttttttagtacatctattttattctattttagcctctaaattaagaaaactaaaactctattttagtttttttatttaataatttagatataaaatagaataaaataaagtgactaaaaattaaacaaataccctttaagaaattaaaaaaactaaggaaacatttttcttgtttcgagtagataatgccagcctgttaaacgccgtcgacgagtctaacggacaccaaccagcgaaccagcagcgtcgcgtcgggccaagcgaagcagacggcacggcatctctgtcgctgcctctggacccctctcgagagttccgctccaccgttggacttgctccgctgtcggcatccagaaattgcgtggcggagcggcagacgtgagccggcacggcaggcggcctcctcctcctctcacggcaccggcagctacgggggattcctttcccaccgctccttcgctttcccttcctcgcccgccgtaataaatagacaccccctccacaccctctttccccaacctcgtgttgttcggagcgcacacacacacaaccagatctcccccaaatccacccgtcggcacctccgcttcaaggtacgccgctcgtcctcccccccccccctctctaccttctctagatcggcgttccggtccatgcatggttagggcccggtagttctacttctgttcatgtttgtgttagatccgtgtttgtgttagatccgtgctgctagcgttcgtacacggatgcgacctgtacgtcagacacgttctgattgctaacttgccagtgtttctctttggggaatcctgggatggctctagccgttccgcagacgggatcgatttcatgattttttttgtttcgttgcatagggtttggtttgcccttttcctttatttcaatatatgccgtgcacttgtttgtcgggtcatcttttcatgcttttttttgtcttggttgtgatgatgtggtctggttgggcggtcgttctagatcggagtagaattctgtttcaaactacctggtggatttattaattttggatctgtatgtgtgtgccatacatattcatagttacgaattgaagatgatggatggaaatatcgatctaggataggtatacatgttgatgcgggttttactgatgcatatacagagatgctttttgttcgcttggttgtgatgatgtggtgtggttgggcggtcgttcattcgttctagatcggagtagaatactgtttcaaactacctggtgtatttattaattttggaactgtatgtgtgtgtcatacatcttcatagttacgagtttaagatggatggaaatatcgatctaggataggtatacatgttgatgtgggttttactgatgcatatacatgatggcatatgcagcatctattcatatgctctaaccttgagtacctatctattataataaacaagtatgttttataattattttgatcttgatatacttggatgatggcatatgcagcagctatatgtggatttttttagccctgccttcatacgctatttatttgcttggtactgtttcttttgtcgatgctcaccctgttgtttggtgttacttctgcaggtcgactctagaggatccaccggtcgccaccatggcaccgaagaagaagcgcaaggtgatggacaagaagtacagcatcggcctcgacatcggcaccaactcggtgggctgggccgtcatcacggacgaatataaggtcccgtcgaagaagttcaaggtcctcggcaatacagaccgccacagcatcaagaaaaacttgatcggcgccctcctgttcgatagcggcgagaccgcggaggcgaccaggctcaagaggaccgccaggagacggtacactaggcgcaagaacaggatctgctacctgcaggagatcttcagcaacgagatggcgaaggtggacgactccttcttccaccgcctggaggaatcattcctggtggaggaggacaagaagcatgagcggcacccaatcttcggcaacatcgtcgacgaggtaagtttctgcttctacctttgatatatatataataattatcattaattagtagtaatataatatttcaaatatttttttcaaaataaaagaatgtagtatatagcaattgcttttctgtagtttataagtgtgtatattttaatttataacttttctaatatatgaccaaaacatggtgatgtgcaggtggcctaccacgagaagtacccgacaatctaccacctccggaagaaactggtggacagcacagacaaggcggacctccggctcatctaccttgccctcgcgcatatgatcaagttccgcggccacttcctcatcgagggcgacctgaacccggacaactccgacgtggacaagctgttcatccagctcgtgcagacgtacaatcaactgttcgaggagaaccccataaacgctagcggcgtggacgccaaggccatcctctcggccaggctctcgaaatcaagaaggctggagaaccttatcgcgcagttgccaggcgaaaagaagaacggcctcttcggcaaccttattgcgctcagcctcggcctgacgccgaacttcaaatcaaacttcgacctcgcggaggacgccaagctccagctctcaaaggacacctacgacgacgacctcgacaacctcctggcccagataggagaccagtacgcggacctcttcctcgccgccaagaacctctccgacgctatcctgctcagcgacatccttcgggtcaacaccgaaattaccaaggcaccgctgtccgccagcatgattaaacgctacgacgagcaccatcaggacctcacgctgctcaaggcactcgtccgccagcagctccccgagaagtacaaggagatcttcttcgaccaatcaaaaaacggctacgcgggatatatcgacggcggtgccagccaggaagagttctacaagttcatcaaaccaatcctggagaagatggacggcaccgaggagttgctggtcaagctcaacagggaggacctcctcaggaagcagaggaccttcgacaacggctccatcccgcatcagatccacctgggcgaactgcatgccatcctgcggcgccaggaggacttctacccgttcctgaaggataaccgggagaagatcgagaagatcttgacgttccgcatcccatactacgtgggcccgctggctcgcggcaactcccggttcgcctggatgacccggaagtcggaggagaccatcacaccctggaactttgaggaggtggtcgataagggcgctagcgctcagagcttcatcgagcgcatgaccaacttcgataaaaacctgcccaatgaaaaagtcctccccaagcactcgctgctctacgagtacttcaccgtgtacaacgagctcaccaaggtcaaatacgtcaccgagggcatgcggaagccggcgttcctgagcggcgagcagaagaaggcgatagtggacctcctcttcaagaccaacaggaaggtgaccgtgaagcaattaaaagaggactacttcaagaaaatagagtgcttcgactccgtggagatctcgggcgtggaggatcggttcaacgcctcactcggcacgtatcacgacctcctcaagatcattaaagacaaggacttcctcgacaacgaggagaacgaggacatcctcgaggacatcgtcctcaccctgaccctgttcgaggaccgcgaaatgatcgaggagaggctgaagacctacgcgcacctgttcgacgacaaggtcatgaaacagctcaagaggcgccgctacactggttggggaaggctgtcccgcaagctcattaatggcatcagggacaagcagagcggcaagaccatcctggacttcctcaagtccgacgggttcgccaaccgcaacttcatgcagctcattcacgacgactcgctcacgttcaaggaagacatccagaaggcacaggtgagcgggcagggtgactccctccacgaacacatcgccaacctggccggctcgccggccattaaaaagggcatcctgcagacggtcaaggtcgtcgacgagctcgtgaaggtgatgggccggcacaagcccgaaaatatcgtcatagagatggccagggagaaccagaccacccaaaaagggcagaagaactcgcgcgagcggatgaaacggatcgaggagggcattaaagagctcgggtcccagatcctgaaggagcaccccgtggaaaatacccagctccagaatgaaaagctctacctctactacctgcagaacggccgcgacatgtacgtggaccaggagctggacattaatcggctatcggactacgacgtcgaccacatcgtgccgcagtcgttcctcaaggacgatagcatcgacaacaaggtgctcacccggtcggataaaaatcggggcaagagcgacaacgtgcccagcgaggaggtcgtgaagaagatgaaaaactactggcgccagctcctcaacgcgaaactgatcacccagcgcaagttcgacaacctgacgaaggcggaacgcggtggcttgagcgaactcgataaggcgggcttcataaaaaggcagctggtcgagacgcgccagatcacgaagcatgtcgcccagatcctggacagccgcatgaatactaagtacgatgaaaacgacaagctgatccgggaggtgaaggtgatcacgctgaagtccaagctcgtgtcggacttccgcaaggacttccagttctacaaggtccgcgagatcaacaactaccaccacgcccacgacgcctacctgaatgcggtggtcgggaccgccctgatcaagaagtacccgaagctggagtcggagttcgtgtacggcgactacaaggtctacgacgtgcgcaaaatgatcgccaagtccgagcaggagatcggcaaggccacggcaaaatacttcttctactcgaacatcatgaacttcttcaagaccgagatcaccctcgcgaacggcgagatccgcaagcgcccgctcatcgaaaccaacggcgagacgggcgagatcgtctgggataagggccgggatttcgcgacggtccgcaaggtgctctccatgccgcaagtcaatatcgtgaaaaagacggaggtccagacgggcgggttcagcaaggagtccatcctcccgaagcgcaactccgacaagctcatcgcgaggaagaaggattgggacccgaaaaaatatggcggcttcgacagcccgaccgtcgcatacagcgtcctcgtcgtggcgaaggtggagaagggcaagtcaaagaagctcaagtccgtgaaggagctgctcgggatcacgattatggagcggtcctccttcgagaagaacccgatcgacttcctagaggccaagggatataaggaggtcaagaaggacctgattattaaactgccgaagtactcgctcttcgagctggaaaacggccgcaagaggatgctcgcctccgcaggcgagttgcagaagggcaacgagctcgccctcccgagcaaatacgtcaatttcctgtacctcgctagccactatgaaaagctcaagggcagcccggaggacaacgagcagaagcagctcttcgtggagcagcacaagcattacctggacgagatcatcgagcagatcagcgagttctcgaagcgggtgatcctcgccgacgcgaacctggacaaggtgctgtcggcatataacaagcaccgcgacaaaccaatacgcgagcaggccgaaaatatcatccacctcttcaccctcaccaacctcggcgctccggcagccttcaagtacttcgacaccacgattgaccggaagcggtacacgagcacgaaggaggtgctcgatgcgacgctgatccaccagagcatcacagggctctatgaaacacgcatcgacctgagccagctgggcggagacaagagaccacgggaccgccacgatggcgagctgggaggccgcaagcgggcaaggtaggtaccgtcatgggtcgtttaagctgccgatgtgcctgcgtcgtctggtgccctctctccatatggaggttgtcaaagtatctgctgttcgtgtcatgagtcgtgtcagtgttggtttaataatggaccggttgtgttgtgtgtgcgtactacccagaactatgacaaatcatgaataagtttgatgtttgaaattaaagcctgtgctcattatgttctgtctttcagttgtctcctaatatttgcctgcaggtactggctatctaccgtttcttacttaggaggtgtttgaatgcactaaaactaatagttagtggctaaaattagttaaaacatccaaacaccatagctaatagttgaactattagctatttttggaaaattagttaatagtgaggtagttatttgttagctagctaattcaactaacaatttttagccaactaacaattagtttcagtgcattcaaacacccccttaatgttaacgtggttctatctaccgtctcctaatatatggttgattgttcggtttgttgctatgctattgggttctgattgctgctagttcttgctgaatccagaagttctcgtagtatagctcagattcatattatttatttgagtgataagtgatccaggttattactatgttagctaggttttttttacaaggataaattatctgtgatcataattcttatgaaagctttatgtttcctggaggcagtggcatgcaatgcatgacagcaacttgatcacaccagctgaggtagatacggtaacaaggttcttaaatctgttcaccaaatcattggagaacacacatacacattcttgccagtcttggttagagaaatttcatgacaaaatgccaaagctgtcttgactcttcacttttggccatgagtcgtgacttaacggcaaacgctaattagtcactaggcccaggaaacactaactaagccctagcttatcctagcgcaacctagttaggtcttccccaagtttgtacaaaaaagcaggctggatcggccagaatggccccggaccggagctttgagagtacaatgatgaacctagattaatcaatgccaaagtctgaaaaatgcaccctcagtctatgatccagaaaatcaagattgcttgaggccctgttcggttgttccggattagagccccggattaattcctagccggattacttctctaatttatatagattttgatgagctggaatgaatcctggcttattccggtacaaccgaacaggccctgaaggataccagtaatcgctgagctaaattggcatgctgtcagagtgtcagtattgcagcaaggtagtgagataaccggcatcatggtgccagtttgatggcaccattagggttagagatggtggccatgggcgcatgtcctggccaactttgtatgatatatggcagggtgaataggaaagtaaaattgtattgtaaaaagggatttcttctgtttgttagcgcatgtacaaggaatgcaagttttgagcgagggggcatcaaagatctggctgtgtttccagctgtttttgttagccccatcgaatccttgacataatgatcccgcttaaataagcaacctcgcttgtatagttccttgtgctctaacacacgatgatgataagtcgtaaaatagtggtgtccaaagaatttccaggcccagttgtaaaagctaaaatgctattcgaatttctactagcagtaagtcgtgtttagaaattatttttttatataccttttttccttctatgtacagtaggacacagtgtcagcgccgcgttgacggagaatatttgcaaaaaagtaaaagagaaagtcatagcggcgtatgtgccaaaaacttcgtcacagagagggccataagaaacatggcccacggcccaatacgaagcaccgcgacgaagcccaaacagcagtccgtaggtggagcaaagcgctgggtaatacgcaaacgttttgtcccaccttgactaatcacaagagtggagcgtaccttataaaccgagccgcaagcaccgaattgcataatgaggatcgaggatggttttagagctagaaatagcaagttaaaataaggctagtccgttatcaacttgaaaaagtggcaccgagtcggtgctttttttttgcggccgcgtctaaaaacggcccctaactaacgcttagttgcccgctagattagtcccccgttagtgcctagttagacacacgacgaactaggggctagaattcctgcaaattgggttagcaaaacaaatctagtctaggtgtgttttgcgatccgatcgatggggatttatccccgtggggaacggggatggggaagaaatgtctctcgcaagagttcgtgggaatccccgcgggaaatttttttgtcgcggggacggatacggggagccaaagggtgccatccctaacaccgacaccgggcctgacgctgtcgccgcagctgctcatcttgtggttgtgggctgtgcccggtttccctgttgcggattgcgggtggcagcctggcaggtgggtgcgacccgtttggattcccttgtctgggccccttgtgtcagtaccgtctgtactccgatgacatgcaccgtcgtccacagtcaagtccaaaatctcccctctttttttaacggaacagttcaaaacctccttgacgcacgctgtcgtgtaccagcactcggtggacaccacgtttgtaatccaggccgacacgtcggtcccacgtcgacaggccccaccgtccggtctgtagcgtgtacgtattcgggcgacggacgtgtcgtcgtcgtcttgcgagtcccattcccatcaccatctgagccacacatcctctgaacaaaagcagggaggcctccacgcacatccccctttctcccactccgtgtccgtggcacccaccccaaaccctcgcgccgcctccgagacagccgccgcaaccatggccaccgccgccgccgcgtctaccgcgctcactggcgccactaccgctgcgcccaaggcgaggcgccgggcgcacctcctggccacccgccgcgccctcgccgcgcccatcaggtgctcagcggcgtcacccgccatgccgatggctcccccggccaccccgctccggccgtggggccccaccgagccccgcaagggtgctgacatcctcgtcgagtccctcgagcgctgcggcgtccgcgacgtcttcgcctaccccggcggcgcgtcgatggagatccaccaggcactcacccgctcccccgtcatcgccaaccacctcttccgccacgagcaaggggaggcctttgccgcctccggctacgcgcgctcctcgggccgcgtcggcgtctgcatcgccacctccggccccggcgccaccaacctagtctccgcgctcgccgacgcgctgctcgattccgtcccgatggtcgccatcacgggacaggtggcgcgacgcatgattggcaccgacgccttccaggagacgcccatcgtcgaggtcacgcgctccatcaccaagcacaactacctggtcctcgacgtcgacgacatcccccgcgtcgtgcaggaggctttcttcctcgcctcctctggtcgaccagggccggtgcttgtcgacatccccaaggacatccagcagcagatggcggtgcctgtctgggacaagcccatgagtctgcctgggtacattgcgcgccttcccaagccccctgcgactgagttgcttgagcaggtgctgcgtcttgttggtgaatcgcggcgccctgttctttatgtgggcggtggctgcgcagcatctggtgaggagttgcgacgctttgtggagctgactggaatcccggtcacaactactcttatgggcctcggcaacttccccagcgacgacccactgtctctgcgcatgctaggtatgcatgggacggtgtatgcaaattatgcagtggataaggccgatctgttgcttgcacttggtgtgcggtttgatgatcgcgtgacagggaagattgaggcttttgcaagcagggctaagattgtgcacgttgatattgatccggctgagattggcaagaacaagcagccacatgtgtccatctgtgcagatgttaagcttgctttgcagggcatgaatgctcttcttgaaggaagcacatcaaagaagagctttgactttggctcatggaacgatgagttggatcagcagaagagggaattcccccttgggtataaaacatctaatgaggagatccagccacaatatgctattcaggttcttgatgagctgacgaaaggcgaggccatcatcggcacaggtgttgggcagcaccagatgtgggcggcacagtactacacttacaagcggccaaggcagtggttgtcttcagctggtcttggggctatgggatttggtttgccggctgctgctggtgcttctgtggcaaacccaggtgtcactgttgttgacatcgatggagatggtagctttctcatgaacgttcaggagctagctatgatccgaattgagaacctcccagtgaaggtctttgtgctaaacaaccagcacctggggatggtggtgcagttggaggacaggttctataaggccaacagagcgcacacatacttgggaaacccagagaatgaaagtgagatatatccagatttcgtgacgatcgccaaagggttcaacattccagccgtccgtgtgacaaagaagaacgaagtccgcgcagcgataaagaagatgctcgagactccagggccgtacctcttggatataatcgtcccacaccaggagcatgtgttgcctatgatccctagtggtggggctttcaaggatatgatcctggatggtgatggcaggactgtgtactgacttcgaataggtacccggggatcctctagtgccgtgggtcgtttaagctgccgctgtacctgtgtcgtctggtgccttctggtgtacctgggaggttgtcgtctatcaagtatctgtggttggtgtcatgagtcagtgagtcccaatactgttcgtgtcctgtgtgcattatacccaaaactgttatgggcaaatcatgaataagcttgatgttcgaacttaaaagtctctgctcaatatggtattatggttgtttttgttcgtctcctaatatttgcctgggatcaaattttattggctggtgttcatttgacctccatgttcttgctaggctccattttttactctacagccataatatgtttgattgtttggtttgttctttgttgtacacctggttctgtcgagcttagttttcgacactggcttacagcttaacatgttgctattttattgggttctgattgctattttattgggttctgattgctagtttttgctgaatccaaaaaccatgttatttatttaagcgatccaggttattattatgatggtggctaagtttttttttttccaagggtaaattttctggattctccagtgtttctgtggccgaattcaatcactagagtcgacctgcagtcacccggtccgggcctagaaggccacccggggtcggaggagactagccgttagttagtgcagaccgtctctaatcagtgactagcgacgtcccgacccacccagctttcttgtacaaagtggccgttaacggatcggccagaatggcccggaccgggttaccccggaatcggacctcgggacgtcgccaaagttagctaggtgtccttagcgtttcttaggttctaggcgttaggggtcaataggttagcctagaagtcccgcactaacagcctagcttaacagttccaagctaagccactagactagccctatccgactaacctagtctaagccgaacggggatctaatctaagctaggcacccattagactagttcactagcgcgaccgcactaaactaggctaaaggttaatagcaactagttagctaggggacgttagctgcccaagcttggttaccgcataatgaggatcgaggatgaggagcatgcacggatagatggcgtctagcatatcgataggacatgacaagtggtacgatccccgtcacatgtccatggaggcatctgatatggacacggcgtgtatctatcgcggctggaacagaaccagcgctcgcgcggcggtcggcgggagggacagaccttggctccgtgcgttcaggttgtgcttgtgccgcgcgccacgcacggtctccgccgcctgcagctgaaattttagatttacatcctatccctttattttttttatttgtcacaattcagttcaaaaatgaagaacggaggtagtgcatcctttgtgagactaatgaaaatcacatctggatcctgaaatcggcgtcgtaacctacaaggccacggactggattagatagtggtccatggtgcataatgaggatcgaggggtaccagtctaattacaaaactaattgcacaaccgctaagctgaatcgcgagatggatctattaaccttaattagtccatgatttgacaatgtggtgctacaataaccatttgctaatgatggattacttaggtttaatagattcgtctcgtgatttagcctatgggttctgctattaattttgtaattagctcatatttagttcttataattagtatccgaacatccaatgtgacatgctaaagtttaaccctggtatccaaatgaagtcttatgagagtttcatcactccggtggtatatgtacttaggctccgttttcttccaccgacttatttttagcacccgtcacattgaatgtttagatactaattagaagtattaaacgtagactatttacaaaatccattacataagacgaatctaaacggcgagacgaatctattaaacctaattagtccatgatttgacaatgtgttgctacagtaaacatttgctaatgatggattaattaggcttaatagattcgtctcgccgtttagcctccacttatgtaatgggttttctaaacaatctacgtttaatactcctaattagtatctaaatattcaatgtgacacgtgctaaaaataagtcagtggaaggaagagaacgtccccttagttttccatcttattaattgtacgatgaaactgtgcagccagatgattgacaatcgcaatacttcaactagtgggccatgcacatcagcgacgtgtaacgtcgtgagttgctgttcccgtagagaaatatcaactggtgggccacgcacatcagcgtcgtgtaacgtggacggaggagccccgtgacggcgtcgacatcgaacggccaccaaccacggaaccacccgtccccacctctcggaagctccgctccacggcgtcgacatctaacggctaccagcaggcgtacgggttggagtggactccttgcctctttgcgctggcggcttccggaaattgcgtggcggagacgaggcgggctcgtctcacacggcacggaagacgtcacgggttccttccccacctctcctcttccccaccgccataaatagccgaccccctcgcctttctccccaatctcatctcgtctcgtgttgttcggagcacaccacccgccccaaatcgttcttcccgcaagcctcggcgatccttcacccgcttcaaggtacggcgatcgtcttcctcctctagatcggcgtgatctgcaagtagttgatttggtagatggttaggatctgtgcactgaagaaatcatgttagatccgcgatgtttctgttcgtagatggctgggaggtggaatttttgtgtagatctgatatgttctcctgtttatcttgtcacgctcctgcgatttgtggggattttaggtcgttgatctgggaatcgtggggttgcttctaggctgttcgtagatgaggtcgttctcacggtttactggatcattgcctagtagatcagctcgggctttcgtctttgtatatggtgcccatacttgcatctatgatctggttccgtggtgttacctaggtttctgcgcctgattcgtccgatcgattttgttagcatgtggtaaacgtttggtcatggtctgatttagattagagtcgaataggatgatctcgatctagctcttgggattaatatgcatgtgtcaccaatctgttccgtggttaagatgatgaatctatgcttagttaatgggtgtagatatatatgctgctgttcctcaatgatgccgtagcttttacctgagcagcatggttcctcctgttacttaggtagatgcacatgcttatagatcaagatatgtactgctactgttggaattgtttagtatacctgatgatcatccatgctcttgttacttgttttggtatacttggatgatggcatgctgctgctttttgttgatttgagcccatccatatctgcatatgtcacatgattaagatgattacgctgtttctgtatgatgccatagcttttatgtgagcaacatgcatcctcctggttatatgcattaatagatggaagatatctattgctacaatttgatgattattttgtacatacgatgatcaagcatgctcttcatactttgttgatatacttggataatgaaatgctgctgcacgttcattctatagcactaatgatgtgatgaacacgcacgacctgtttgtggcatctgtttgaatgtgttgttgctgttcactagagactgttttattaacctactgctagatacttacccttctgtctgtttattcttttgcaggtcgaccgccggggatccatggttgaacaagatggattgcacgcaggttctccggccgcttgggtggagaggctattcggctatgactgggcacaacagacaatcggctgctctgatgccgccgtgttccggctgtcagcgcaggggcgcccggttctttttgtcaagaccgacctgtccggtgccctgaatgaactgcaggacgaggcagcgcggctatcgtggctggccacgacgggcgttccttgcgcagctgtgctcgacgttgtcactgaagcgggaagggactggctgctattgggcgaagtgccggggcaggatctcctgtcatctcaccttgctcctgccgagaaagtatccatcatggctgatgcaatgcggcggctgcatacgcttgatccggctacctgcccattcgaccaccaagcgaaacatcgcatcgagcgagcacgtactcggatggaagccggtcttgtcgatcaggatgatctggacgaagagcatcaggggctcgcgccagccgaactgttcgccaggctcaaggcgcgcatgcccgacggcgatgatctcgtcgtgacccatggcgatgcctgcttgccgaatatcatggtggaaaatggccgcttttctggattcatcgactgtggccggctgggtgtggcggaccgctatcaggacatagcgttggctacccgtgatattgctgaagagcttggcggcgaatgggctgaccgcttcctcgtgctttacggtatcgccgctcccgattcgcagcgcatcgccttctatcgccttcttgacgagttcttctgagcccatcggtcatggatgcttctactgtacctgggtcgtctggtctctgcctgtgtcacctttgaagtacctgtgtcgggattgtgtttggtctagaactgcagtttgtctttgatgttcttttgtctggtcttatgaactggttgtatctgtatgtttactgtaaactgttgttgcggtgcagcagtatggcatccgaatgaataaatgatgtttggacttaaatctgtactctgtttgttttcggttatgccagttctatattgcctgagatcagaatgtttagcttttgagttctgtttggcttgtggtcgactcctgtttcttacttgaggcgtaactctgttctggcaaactcaaatgtctaactgaatgttttaggacttaattgttggacagattaacgtgtttggtttgtttctagattgtgattcggaaggcttgttagttgtggaatcaaggagagcagctaggtctgtgcagaacgttattttggatttaagccttctcagattatgccattactctaaacctaatgatatcatatttcactcggggatgttggagtagtcttttctttctcctgcagacaaaatgattttgctttcgtgtgtgtacatgattttgtgcaactgttgcaacaactgaagtagacaagttttgacctcaccagaagaatgaaaaagattttggaatttgttacatcgacaaaccattgtaacttggcccatcagaatgcacagagaagcggctacaaattgacatgcgttgcaaactttgcaatagttgatgcacatgtttgccattgcctgccagtcttaggaaaagtgtgtggttcgagaaatctaagcatatgtgctctgctcacattgcgtggaacccacacagctttgtcacactcttgtccactccagaagtcattcctggcgctgtttacccctggtaaagagtaaccgaaaacttctcaaggctgtacccaaaactggaaggaaatttggaggcggccgcatgaggagcaatcattgttcaagacatgatgcaaagctagaaaactttgattgtggccgtccttgtgaagtttaggccggggggaacttcatgaaccctatcgaagcttaattagttcttttttgttgttagccatgtttgtattgtagttaaggtgaacaacatgacgccgcacccgcgatctcagggctcgtccccacacaggagggcacgtcgtcgtcttcgccgccgagcatcagagattcagagcacatacacgcacatctcaagcaaacggagtagtacgtcctactcctacgtacatacctagccgacgacctttatgtgcacaccaccactgctctgctgcccggcctctccgtcgtccgttcatcaccagcataatgaggatcgaggatgaggggcgcgccgacgtcccgaggtccgattccgggctaattaacacctagctcgccactcgactaattagggactaagcctagcgcttagccgttaaaacctagcacaccctaagcacccttagttaggttcccctcttaattaagccctagtgagcccctaagttaaggggacgctaagagccccctaacctagtattcggctagaggcgaactaggctaaacacctaagcgcacctctttaagctagatcgctagggggctaggctagagcttcgctagattagtctaagggcagcctgcagggccctcttgtcggaccagttgcccaccacgttggtgaggggcaactttattatacaaagttgatagatcctcatgtcttcctgcccttaaggccaattgttcaagattcattcaacaattgaaacatctcccatgattaaatcagtataaggttgctatggtcttgcttgacaaagtttttttttgagggaatttcaactaaatttttgagtgaaactatcaaatactgattttaaaaaatttttataaaaggaagcgcagagataaaaggccatctatgctacaaaagtacccaaaaatgtaatcctaaagtatgaattgcattttttttttgtttggacgaaaggaaaggagtattaccacaagaatgatatcatcttcatatttagatcttttttgggtaaagcttgagattctctaaatatagagaaatcagaagaaaaaaaaaccgtgttttggtggttttgatttctagcctccacaataactttgacggcgtcgacaagtctaacggacaccaagcagcgaaccaccagcgccgagccaagcgaagcagacggccgagacgttgacaccttcggcgcggcatctctcgagagttccgctccggcgctccacctccaccgctggcggtttcttattccgttccgttccgcctcctgctctgctcctctccacaccacacggcacgaaaccgttacggcaccggcagcacccagcacgggagaggggattcctttcccaccgttccttccctttccgccccgccgctataaatagccagccccatccccagcttttttccccaatctcatctcctctctcctgttgttcggagcacacgcacaatccgatcgatccccaaatccccttcgtctctcctcgcgagcctcgtggatcccagcttcaaggtacggcgatcgatcatcccccctccttctctctaccttcttttctctagactacatcggatggcgatccatggttagggcctgctagtttcccttcctgttttgtcgatggctgcgaggcacaatagatctgatggcgttatgacggctaacttgtcatgttgttgcgatttatagtccctttaggagatcagtttaatttctcggatggttcgagatcggtggtccatggttagtaccctaagatccgcgctgttagggttcgtagatggaggcgacctgttctgattgttaacttgtcagtacctgggaaatcctgggatggttctagctcgtccgcagatgagatcgatttcatgatcctctgtatcttgtttcgttgcctaggttccgtctaatctatccgtggtatgatgtagatgttttgatcgtgctaactacgtcttgtaaagttaattgtcaggtcataatttttagcatgcctttttttttgtttggttttgtctaattgggctgtcgttctagatcagagtagaagactgttccaaactacctgctggatttattgaacttggatctgtatgtgtgtcacatatcttcataaattcatgattaagatggattgaaatatcttttatctttttggtatggatagttctatatgttggtgtggctttgttagatgtatacatgcttagatacatgaagcaacgtgctgctactgtttagtaattgctgttcatttgtctaataaacagataaggatatgtatttatgttgctgttggttttgctggtactttgttggatacaaatgcttcaatacagaaaacagcatgctgctacgatttaccatttatctaatcttatcatatgtctaatctaataaacaaacatgcttttaaattatcttcatatgcttggatgatggcatacacagcggctatgtgtggttttttaaatacccagcatcatgggcatgcatgacactgctttaatatgctttttatttgcttgagactgtttcttttgtttatactgaccctttagttcggtgactcttctgcaggtcgactttaacttagcctaggatccatggcccagtccaagcacggcctgaccaaggagatgaccatgaagtaccgcatggagggctgcgtggacggccacaagttcgtgatcaccggcgagggcatcggctaccccttcaagggcaagcaggccatcaacctgtgcgtggtggagggcggccccttgcccttcgccgaggacatcttgtccgccgccttcatgtacggcaaccgcgtgttcaccgagtacccccaggacatcgtcgactacttcaagaactcctgccccgccggctacacctgggaccgctccttcctgttcgaggacggcgccgtgtgcatctgcaacgccgacatcaccgtgagcgtggaggagaactgcatgtaccacgagtccaagttctacggcgtgaacttccccgccgacggccccgtgatgaagaagatgaccgacaactgggagccctcctgcgagaagatcatccccgtgcccaagcagggcatcttgaagggcgacgtgagcatgtacctgctgctgaaggacggtggccgcttgcgctgccagttcgacaccgtgtacaaggccaagtccgtgccccgcaagatgcccgactggcacttcatccagcacaagctgacccgcgaggaccgcagcgacgccaagaaccagaagtggcacctgaccgagcacgccatcgcctccggctccgccttgccctccggactcagatctcgatagggtaccaatggccagttaacagatccagctgctgctgttctagggttcacaagtctgcctatttgtcttccccaatggagctatggttgtctggtctggtccttggtcgtgtcccgtttcattgtgtactatttacctgtaatgtgtatccttaagtctggtttgatggtgtctgaaacgttttgctgtggtagagcagcatggaagaactataatgaataagtgatccctaatcattgtgtccaaattttgcttctgctatacccttttgtgctgtttcttatgttttgcttaaaaatttgatctgacaaacaaatttgtctaaattatgctcttgttctgactgtgtactgtacacatttgtattgctaccggtttggcacatagttttctctttgattgcagatcaaacccttctgattgcagattgcttggctatggctgatgtgctcactgttcttctttagcttgtatattgctgatggtggcttggctacggctgaaaaagttgctgctgcgccgacttggcaactgttgctccagtaatgctttgtcctctcttcctagccgccgacttggcacttggcagctgttgctcctgtaatgcgttgttatctcttatctcttgagatgtactatgattttgaggctgtttgacttgtgccagattgccagtgctgatgctatattatctcaggtttttatgctagtatatgttttactgtgtgctgcctgtgtcgagttacgtaatctattgaaccgctatgcgtgttgatgccctgttgttgcttgccagattgatgcccctgttgcttgcagcttgcaagctgtagtgaaatcctaaaattcgaaaccaaatctattctgaacttttgaagatctgtgatgtccggaagaaaagattcaaacagataaacgggactctccagaatctataaaataaatgatcgacaaacgctttgctttggtaggcttcctagttagttagcggaccgaagcttcggttgtttctgtggccgaattcaatcactagagtcgacctgcatgattccgatgacttcgtaggttcctagctcaagccgctcgtgtccaagcgtcacttacgattagctaatgattacggcatctaggaccgactagctagctagctaagagctcggtaccgagctcgaattcattccgattaatcgtggcctcttgctcttcaggatgaagagctatgtttaaacgtgcaagcgctactagacaattcagtacattaaaaacgtccgcaatgtgttattaagttgtctaagcgtcaatttgtttacaccacaatatatcctgcca

SEQ ID NO: 236 - DNA, 35833 bp, Artificial Sequence
  PHP8418-0006
gtttacccgccaatatatcctgtcaaacactgcggccgcacttgaccgcggatggagccggagctgtggtgaggccatcgacgggaggtgggggagaacacagtctcagtgttctttgtgagtccgcaaggtttttagcttttctgtattaattaaggttgctgttggctgtagaatacggtcgtggaagagctgtatcggtagctactacgtaagctattatatactggaagtctggagctcgtcgatctccggtcgtcttcctccatttctcctcgtcttgctttgactgctgctaccatttgcttctgttttctgatgaagcatgccatgtcggccaccagtgtttgtgtggtttttgcagggaatggctttcaagtgctgtgattgaatggccctcgtcgtcctcggctgagctcacatggacgcgtcatgtgagtgagatatatgatcatatgatgagtggggttcgggtgagtgcgtacttgaagtaggatcccgctttcactcattcattcattggcctttaaaccgggaaattttcgcgaggagatggagggaagcaagcagggtgacgagtgcagagtgccgcgagcgctttgtcaaaaggcaccgccgtaggcaaaaaaatcaatggccctgactgactcgatggtagtactactgtagagactagagagggttgctccccatatcttcgtgtgacttttactccagcattgcatttccgtcattgagacgttaattaatagcagctttcgggacagatgactgtggccatgtttcgtcacggccgcttcgtgccagctgggggtactatagtactgtgattttgttagtaaaaactttcattaggccaccattgacgaccgggccttcgcttttgctgcgctaattaaccatttcccggcgaccgaagggaacatgaacatgccccgacacatgagggcatgaggactagtgttctccctgtcgttcgttgacttgactagtgatagtttaaacgctcttcaactggaagagcggttactaccggttcactagctagctgctaatcgagctagttaccctatgaggtgacatgaagcgctcacggttactatgacggttagcttcacgactgttggtggcagtagcgtacgacttagctatagttccggacttacctagctaataacttcgtatagcatacattatacgaagttatggttaccgagctgttaccaagcggccgcacactgatagtttaaactgaaggcgggaaacgacaatctgatcatgagcggagaattaagggagtcacgttatgacccccgccgatgacgcgggacaagccgttttacgtttggaactgacagaaccgcaacgattgaaggagccactcagccgcgggtttctggagtttaatgagctaagcacatacgtcagaaaccattattgcgcgttcaaaagtcgcctaaggtcactatcagctagcaaatatttcttgtcaaaaatgctccactgacgttccataaattcccctcggtatccaattagagtctcatattcactcccatggcggccaatgcgggcggcggtggagcgggaggaggcagcggcagcggcagcgtggctgcgccggcggtgtgccgccccagcggctcgcggtggacgccgacgccggagcagatcaggatgctgaaggagctctactacggctgcggcatccggtcgcccagctcggagcagatccagcgcatcaccgccatgctgcggcagcacggcaagatcgagggcaagaacgtcttctactggttccagaaccacaaggcccgcgagcgccagaagcgccgcctcaccagcctcgacgtcaacgtgcccgccgccggcgcggccgacgccaccaccagccaactcggcgtcctctcgctgtcgtcgccgccgccttcaggcgcggcgcctccctcgcccaccctcggcttctacgccgccggcaatggcggcggatcggctgtgctgctggacacgagttccgactggggcagcagcggcgctgctatggccaccgagacatgcttcctgcaggactacatgggcgtgacggacacgggcagctcgtcgcagtggccacgcttctcgtcgtcggacacgataatggcggcggccgcggcgcgggcggcgacgacgcgggcgcccgagacgctccctctcttcccgacctgcggcgacgacggcggcagcggtagcagcagctacttgccgttctggggtgccgcgtccacaactgccggcgccacttcttccgttgcgatccaacagcaacaccagctgcaggagcagtacagcttttacagcaacagcaacagcacccagctggccggcaccggcaaccaagacgtatcggcaacagcagcagcagccgccgccctggagctgagcctcagctcatggtgctccccttaccctgctgcagggagtatgtgagagcaacgcgagctgccactgctcttcactgatgtctctggaatggaaggaggaggaagtgagaacagatcattcgacaaagcagcattagtccgttgatcggtggaagaccactcgtcagtgttgagttgaatgtttgatcaataaaatacggcaatgctgtaagggttgttttttatgccattgataatacactgtactgttcagttgttgaactctatttcttagccatgccaagtgcttttcttattttgaataacattacagcaaaaagttgaaagacaaaaaaaaaaacccccgaacagagtgctttgggtcccaagcttctttagactgtgttcggcgttccccctaaatttctccccctatatctcactcacttgtcacatcagcgttctctttccccctatatctccacgctctacagcagttccacctatatcaaacctctataccccaccacaacaatattatatactttcatcttcaactaactcatgtaccttccaatttttttctactaataattatttacgtgcacagaaacttagcaaggagagagagagcgggaatttaaatgctcggcgttaggcttttagtccgctaggtggctagaccgaggttaggacgctagttcactaggggcctagtggtgttttaagacgtcacggtcactacgaatcgaccgaagcttgcatgggccgcatcgagcagctggcttgtggggaccagacaaaaaaggaatggtgcagaattgttaggcgcacctaccaaaagcatctttgcctttattgcaaagataaagcagattcctctagtacaagtggggaacaaaataacgtggaaaagagctgtcctgacagcccactcactaatgcgtatgacgaacgcagtgacgaccacaaaactcgagcaacgagatcatgagccaatcaaagaggagtgatgtagacctaaagcaataatggagccatgacgtaagggcttacgcccatacgaaataattaaaggctgatgtgacctgtcggtctctcagaacctttactttttatgtttggcgtgtatttttaaatttccacggcaatgacgatgtgaccgtcgacccactaaaacattgctttgtcaaaagctaaaaaagatgatgcccgacagccacttgtgtgaagcatgagaagccggtccctccactaagaaaattagtgaagcatcttccagtggtccctccactcacagctcaatcagtgagcaacaggacgaaggaaatgacgtaagccatgacgtctaatcccagggccagcttgcatgcctgcagtgcagcgtgacccggtcgtgcccctctctagagataatgagcattgcatgtctaagttataaaaaattaccacatattttttttgtcacacttgtttgaagtgcagtttatctatctttatacatatatttaaactttactctacgaataatataatctatagtactacaataatatcagtgttttagagaatcatataaatgaacagttagacatggtctaaaggacaattgagtattttgacaacaggactctacagttttatctttttagtgtgcatgtgttctcctttttttttgcaaatagcttcacctatataatacttcatccattttattagtacatccatttagggtttagggttaatggtttttatagactaatttttttagtacatctattttattctattttagcctctaaattaagaaaactaaaactctattttagtttttttatttaataatttagatataaaatagaataaaataaagtgactaaaaattaaacaaataccctttaagaaattaaaaaaactaaggaaacatttttcttgtttcgagtagataatgccagcctgttaaacgccgtcgacgagtctaacggacaccaaccagcgaaccagcagcgtcgcgtcgggccaagcgaagcagacggcacggcatctctgtcgctgcctctggacccctctcgagagttccgctccaccgttggacttgctccgctgtcggcatccagaaattgcgtggcggagcggcagacgtgagccggcacggcaggcggcctcctcctcctctcacggcaccggcagctacgggggattcctttcccaccgctccttcgctttcccttcctcgcccgccgtaataaatagacaccccctccacaccctctttccccaacctcgtgttgttcggagcgcacacacacacaaccagatctcccccaaatccacccgtcggcacctccgcttcaaggtacgccgctcgtcctcccccccccccctctctaccttctctagatcggcgttccggtccatgcatggttagggcccggtagttctacttctgttcatgtttgtgttagatccgtgtttgtgttagatccgtgctgctagcgttcgtacacggatgcgacctgtacgtcagacacgttctgattgctaacttgccagtgtttctctttggggaatcctgggatggctctagccgttccgcagacgggatcgatttcatgattttttttgtttcgttgcatagggtttggtttgcccttttcctttatttcaatatatgccgtgcacttgtttgtcgggtcatcttttcatgcttttttttgtcttggttgtgatgatgtggtctggttgggcggtcgttctagatcggagtagaattctgtttcaaactacctggtggatttattaattttggatctgtatgtgtgtgccatacatattcatagttacgaattgaagatgatggatggaaatatcgatctaggataggtatacatgttgatgcgggttttactgatgcatatacagagatgctttttgttcgcttggttgtgatgatgtggtgtggttgggcggtcgttcattcgttctagatcggagtagaatactgtttcaaactacctggtgtatttattaattttggaactgtatgtgtgtgtcatacatcttcatagttacgagtttaagatggatggaaatatcgatctaggataggtatacatgttgatgtgggttttactgatgcatatacatgatggcatatgcagcatctattcatatgctctaaccttgagtacctatctattataataaacaagtatgttttataattattttgatcttgatatacttggatgatggcatatgcagcagctatatgtggatttttttagccctgccttcatacgctatttatttgcttggtactgtttcttttgtcgatgctcaccctgttgtttggtgttacttctgcaggtcgactttaacttagcctaggatccatggccactgtgaacaactggctcgctttctccctctccccgcaggagctgccgccctcccagacgacggactccacactcatctcggccgccaccgccgaccatgtctccggcgatgtctgcttcaacatcccccaagattggagcatgaggggatcagagctttcggcgctcgtcgcggagccgaagctggaggacttcctcggcggcatctccttctccgagcagcatcacaaggccaactgcaacatgatacccagcactagcagcacagtttgctacgcgagctcaggtgctagcaccggctaccatcaccagctgtaccaccagcccaccagctcagcgctccacttcgcggactccgtaatggtggcttcctcggccggtgtccacgacggcggtgccatgctcagcgcggccgccgctaacggtgtcgctggcgctgccagtgccaacggcggcggcatcgggctgtccatgattaagaactggctgcggagccaaccggcgcccatgcagccgagggtggcggcggctgagggcgcgcaggggctctctttgtccatgaacatggcggggacgacccaaggcgctgctggcatgccacttctcgctggagagcgcgcacgggcgcccgagagtgtatcgacgtcagcacagggtggagccgtcgtcgtcacggcgccgaaggaggatagcggtggcagcggtgttgccggcgctctagtagccgtgagcacggacacgggtggcagcggcggcgcgtcggctgacaacacggcaaggaagacggtggacacgttcgggcagcgcacgtcgatttaccgtggcgtgacaaggcatagatggactgggagatatgaggcacatctttgggataacagttgcagaagggaagggcaaactcgtaagggtcgtcaagtctatttaggtggctatgataaagaggagaaagctgctagggcttatgatcttgctgctctgaagtactggggtgccacaacaacaacaaattttccagtgagtaactacgaaaaggagctcgaggacatgaagcacatgacaaggcaggagtttgtagcgtctctgagaaggaagagcagtggtttctccagaggtgcatccatttacaggggagtgactaggcatcaccaacatggaagatggcaagcacggattggacgagttgcagggaacaaggatctttacttgggcaccttcagcacccaggaggaggcagcggaggcgtacgacatcgcggcgatcaagttccgcggcctcaacgccgtcaccaacttcgacatgagccgctacgacgtgaagagcatcctggacagcagcgccctccccatcggcagcgccgccaagcgcctcaaggaggccgaggccgcagcgtccgcgcagcaccaccacgccggcgtggtgagctacgacgtcggccgcatcgcctcgcagctcggcgacggcggagccctggcggcggcgtacggcgcgcactaccacggcgccgcctggccgaccatcgcgttccagccgggcgccgccagcacaggcctgtaccacccgtacgcgcagcagccaatgcgcggcggcgggtggtgcaagcaggagcaggaccacgcggtgatcgcggccgcgcacagcctgcaggacctccaccacctgaacctgggcgcggccggcgcgcacgactttttctcggcagggcagcaggccgccgccgctgcgatgcacggcctgggtagcatcgacagtgcgtcgctcgagcacagcaccggctccaactccgtcgtctacaacggcggggtcggcgacagcaacggcgccagcgccgtcggcggcagtggcggtggctacatgatgccgatgagcgctgccggagcaaccactacatcggcaatggtgagccacgagcaggtgcatgcacgggcctacgacgaagccaagcaggctgctcagatggggtacgagagctacctggtgaacgcggagaacaatggtggcggaaggatgtctgcatgggggactgtcgtgtctgcagccgcggcggcagcagcaagcagcaacgacaacatggccgccgacgtcgggcatggcggcgcgcagctcttcagtgtctggaacgacacttaagcgtacctagtggtacctgacatcttatagtctgcaacctctcgtgtctgaattcctatctttatcaagtgttattgcttccacgactataggacagctttcgtcgaaagcttttgctcatgtgatctcgaaggattcatctagtctgatttttcgtgacttgtatcggttttattggattcatccaacatatatcaataaaaaatgagttgtgtttcctttcttcctagttcagttaaaattatttccctcctgcgcttgtgctgtaattgtctgtgtacctgttgtttgtgactgtgttagttcccttggatatgatttcgtatttgatatgtacatggagatagcttagcttcattattggagtatgaagttagtatgacatagtcactctcctggaaaattgacactgcaaaccatatttttattctgaaccacaaatcctagtcagtccgctggcatatgccgtccgtttgctgaatccagaacgtgggtttggagatgtacggctgagatgcctctatgcgaaggggatttcgtggtgaaacgagatgggagtagagcaacgcccgtggaagatgcttcaaacttccacacttttgagcaacgatcggcagtagtaaggtagacgatttcaagatcaaagcatatgaagataaacaacatcaacaacaaaatttgttggggttctatagagagaaacagagctacatacatacactgttttgtatctaccatctgagatgatgaaaagatgaaaaactaaagaatgccccggcgccaacgccaggacacgccgcgcgcgcgtcacccgagccatctcttgacccagccggcgctgtatatttacacacgttgcagcatcgatcaccacctgttcgatcgcgtcgccgtcaccggcgcgccgcgacttattgaactagtctagggcgcggctaacaacctagcttagattgccttgtctaaacccttaggctaacgcgccacccataacttcgtatagcatacattatacgaagttatgcggttcaaagccaatgactgttgttaggtccagtttctaaggacgaatcatccaatcactggttctttctgaacaaaacaaagagctatagagttacgttactgtagccgagacagagcctgcaatctggttatgccacatactaggttctttcttaaagttgactcactctatcctaagttctacttacaaggagctacaacaaattggtcataaccggagagcgttcaaggaggtaatatcccatcttactctgtagcaaggctacaaaaggagagctaaagaactaggctacaaaaagagagctaaagaactaactatctagcaagactacagagctatagtgtagagatttcataaccggtgagcgttcaaggatactttgaagagaagaggtaatatctcaactagcaagactacaaaaaaatggagatataaaactaactgtctaacaagactacagagctatagtagagatagatacgttcgacacttaagcatgagaattcgagctcggtaccctggttcacaaactcaatacaacacacagtggagtagggtattacgctccggcggcccgaaccactctaaatccttgtgtcctcgtgtgctcttccaccattaatgactgtaattgcagggacacgaagagttgtagcgcttttgccaacaagatccgctatatgctagtagagtggaacctgcacagcaacaagcatccaataatctgagaataagaattatgtgtggtgatggttctcatctctgcaactcgccattttcgcgagagaaccaaatccaagttggtgaagatcatgatttgggctcatgggctggcatagtagctattacctttgcaattgtggttcgaatctatccgatattctccttttcagggagagctaatgcttatgcttattgggtattttggtttgacactgcttcacgcccaaaaaaaggcaactatgtctgagttggatatggcccaaaaaaaggcagctatgtctgagttggatatggaagtcttctttcgtttagggtgaagtaagaccaagctcatgagcttattatcttaggtcggaacaaattagttgataggcatggcacatttatcaaattataatgattttaacagaaaagcaacacctctttttcagcagcaccagctttgcaagctgcaattgacactccaagcatagtatttgctccaaactcagcctgcatttcgcacaatatcatatctatttccatttggataaaatatattttccagaaatatgggaacagaatcaagatacagaaaaaagttgtggtagtagtggtaagtggaaacacaagtacagtgaaaagatagcattatttctgaacagtcaaattaaccgaaataagtagtatcacatactgcccctaaattgactacacccaatgtaaagaattgcttgagcatattgagccatcagttgtttgtttgtgtaacggatttgacaatgcagagttcaggagcaaaaaaccgcaaaggagagaaagagggaaaggatctcctagtatcccaccttgtggcgcgccctgtcaagtgcatgatggcctggtcgatctgcgtctgctgctgcggttccatcccaacgagtgcctccgacaccttgtcgttgatcacccgcaccgcgtaggcgacccccctggcgaggaacttccgcctctcggaggccccggccgcgtcggcggcggcgccctcgagcgcgcccacgctagccgtagatgctcggtgcacggccttgttggtgtgcaactcgacctcaacggccggtgcgctacgcccgtcaaggatctggcgcgcccgcaccctcgtgatcacggtgggcgcctcccgcctcatgtggccgacgatgaaaagcgccgggttaggggccttggcgcgcaccgccgtattcagggcctcctcgctcttgcgcgagagcaggtgcttccccaggtactcctgcactgacaaggctgccacagcggtggaatttgtcctcacgacttcgccacgtcgtcctcacctccctggcttcccacgactccgccgtatcgaggtgctcggtgggtcgtcttaatccgaagtccgaactaggaagacgagacagagaggtctgaggaatgggcctcgtttgatgttgagctgaattatttttccagcataagcccaggtcttggtccatgaacaaaattactagaaacccagcccagtactacgatctaaaagagggactgccactggatagctctctctagcattctccacgctccaatacagcggcgtcgtgtctatccgggtctatccgcgaacacgtgagaactctccagaaactgctttctcctccacttcatctctctcgctttccctctataaaaagaccccttctaggaattgagggagacagcaagcaccaagcagcgatccgaagctcaatcaattcactcaaacctcttccccaaatcttcgattagatcttcgttgacaagaagactagaaccgaacctgacatgtccaacctgctcacggttcaccagaaccttccggctcttccagtggacgcgacgtccgatgaagtcaggaagaacctcatggacatgttccgcgacaggcaagcgttcagcgagcacacctggaagatgctgctctccgtctgccgctcctgggctgcatggtgcaagctgaacaacaggaagtggttccccgctgagcccgaggacgtgagggattaccttctgtacctgcaagcgcgaggtttgtttctgcttctacctttgatatatatataataattatcattaattagtagtaatataatatttcaaatatttttttcaaaataaaagaatgtagtatatagcaattgcttttctgtagtttataagtgtgtatattttaatttataacttttctaatatatgaccaaaacatggtgatgcctaggtctggcagtgaagaccatccagcaacaccttggacaactgaacatgcttcacaggcgctccggcctcccgcgccccagcgactcgaacgccgtgagcctcgtcatgcgccgcatcaggaaggaaaacgtcgatgccggcgaaagggcaaagcaggccctcgcgttcgagaggaccgatttcgaccaggtccgcagcctgatggagaacagcgacaggtgccaggacattaggaacctggcgttcctcggaattgcatacaacacgctcctcaggatcgcggaaattgcccgcattcgcgtgaaggacattagccgcaccgacggcggcaggatgcttatccacattggcaggaccaagacgctcgtttccaccgcaggcgtcgaaaaggccctcagcctcggagtgaccaagctcgtcgaacgctggatctccgtgtccggcgtcgcggacgacccaaacaactacctcttctgccgcgtccgcaagaacggggtggctgcccctagcgccaccagccaactcagcacgagggccttggaaggtattttcgaggccacccaccgcctgatctacggcgcgaaggatgacagcggtcaacgctacctcgcatggtccgggcactccgcccgcgttggagctgctagggacatggcccgcgccggtgtttccatccccgaaatcatgcaggcgggtggatggacgaacgtgaacattgtcatgaactacattcgcaaccttgacagcgagacgggcgcaatggttcgcctcctggaagatggtgactgaggtacccaacctagacttgtccatcttctggattggccaacttaattaatgtatgaaataaaaggatgcacacatagtgacatgctaatcactataatgtgggcatcaaagttgtgtgttatgtgtaattactagttatctgaataaaagagaaagagatcatccatatttcttatcctaaatgaatgtcacgtgtctttataattctttgatgaaccagatgcatttcattaaccaaatccatatacatataaatattaatcatatataattaatatcaattgggttagcaaaacaaatctagtctaggtgtgttttgcgatccgatatcgaattggccacggtaccagctgctgctgttctagggttcacaagtctgcctatttgtcttccccaatggagctatggttgtctggtctggtccttggtcgtgtcccgtttcattgtgtactatttacctgtaatgtgtatccttaagtctggtttgatggtgtctgaaacgttttgctgtggtagagcagcatggaagaactataatgaataagtgatccctaatcattgtgtccaaattttgcttctgctatacccttttgtgctgtttcttatgttttgcttaaaaatttgatctgacaaacaaatttgtctaaattatgctcttgttctgactgtgtactgtacacatttgtattgctaccggtttggcacatagttttctctttgattgcagatcaaacccttctgattgcagattgcttggctatggctgatgtgctcactgttcttctttagcttgtatattgctgatggtggcttggctacggctgaaaaagttgctgctgcgccgacttggcaactgttgctccagtaatgctttgtcctctcttcctagccgccgacttggcacttggcagctgttgctcctgtaatgcgttgttatctcttatctcttgagatgtactatgattttgaggctgtttgacttgtgccagattgccagtgctgatgctatattatctcaggtttttatgctagtatatgttttactgtgtgctgcctgtgtcgagttacgtaatctattgaaccgctatgcgtgttgatgccctgttgttgcttgccagattgatgcccctgttgcttgcagcttgcaagctgtagtgaaatcctaaaattccaaaccaaatctattctgaacttttgaagatctgtgatgtccggaagaaaagattcaaacagataaacgggactctccagaatctataaaataaatgatcgacaaacgctttgctttggtaggcttcaagcttttaattaagtcatctagttgaaggatcgctatcaactttgtatagaaaagttgggccgaattcgagctcggtacggccagaatggcccggaccgacctgcagtgcagcgtgacccggtcgtgcccctctctagagataatgagcattgcatgtctaagttataaaaaattaccacatattttttttgtcacacttgtttgaagtgcagtttatctatctttatacatatatttaaactttactctacgaataatataatctatagtactacaataatatcagtgttttagagaatcatataaatgaacagttagacatggtctaaaggacaattgagtattttgacaacaggactctacagttttatctttttagtgtgcatgtgttctcctttttttttgcaaatagcttcacctatataatacttcatccattttattagtacatccatttagggtttagggttaatggtttttatagactaatttttttagtacatctattttattctattttagcctctaaattaagaaaactaaaactctattttagtttttttatttaataatttagatataaaatagaataaaataaagtgactaaaaattaaacaaataccctttaagaaattaaaaaaactaaggaaacatttttcttgtttcgagtagataatgccagcctgttaaacgccgtcgacgagtctaacggacaccaaccagcgaaccagcagcgtcgcgtcgggccaagcgaagcagacggcacggcatctctgtcgctgcctctggacccctctcgagagttccgctccaccgttggacttgctccgctgtcggcatccagaaattgcgtggcggagcggcagacgtgagccggcacggcaggcggcctcctcctcctctcacggcaccggcagctacgggggattcctttcccaccgctccttcgctttcccttcctcgcccgccgtaataaatagacaccccctccacaccctctttccccaacctcgtgttgttcggagcgcacacacacacaaccagatctcccccaaatccacccgtcggcacctccgcttcaaggtacgccgctcgtcctcccccccccccctctctaccttctctagatcggcgttccggtccatgcatggttagggcccggtagttctacttctgttcatgtttgtgttagatccgtgtttgtgttagatccgtgctgctagcgttcgtacacggatgcgacctgtacgtcagacacgttctgattgctaacttgccagtgtttctctttggggaatcctgggatggctctagccgttccgcagacgggatcgatttcatgattttttttgtttcgttgcatagggtttggtttgcccttttcctttatttcaatatatgccgtgcacttgtttgtcgggtcatcttttcatgcttttttttgtcttggttgtgatgatgtggtctggttgggcggtcgttctagatcggagtagaattctgtttcaaactacctggtggatttattaattttggatctgtatgtgtgtgccatacatattcatagttacgaattgaagatgatggatggaaatatcgatctaggataggtatacatgttgatgcgggttttactgatgcatatacagagatgctttttgttcgcttggttgtgatgatgtggtgtggttgggcggtcgttcattcgttctagatcggagtagaatactgtttcaaactacctggtgtatttattaattttggaactgtatgtgtgtgtcatacatcttcatagttacgagtttaagatggatggaaatatcgatctaggataggtatacatgttgatgtgggttttactgatgcatatacatgatggcatatgcagcatctattcatatgctctaaccttgagtacctatctattataataaacaagtatgttttataattattttgatcttgatatacttggatgatggcatatgcagcagctatatgtggatttttttagccctgccttcatacgctatttatttgcttggtactgtttcttttgtcgatgctcaccctgttgtttggtgttacttctgcaggtcgactctagaggatccaccggtcgccaccatggcaccgaagaagaagcgcaaggtgatggacaagaagtacagcatcggcctcgacatcggcaccaactcggtgggctgggccgtcatcacggacgaatataaggtcccgtcgaagaagttcaaggtcctcggcaatacagaccgccacagcatcaagaaaaacttgatcggcgccctcctgttcgatagcggcgagaccgcggaggcgaccaggctcaagaggaccgccaggagacggtacactaggcgcaagaacaggatctgctacctgcaggagatcttcagcaacgagatggcgaaggtggacgactccttcttccaccgcctggaggaatcattcctggtggaggaggacaagaagcatgagcggcacccaatcttcggcaacatcgtcgacgaggtaagtttctgcttctacctttgatatatatataataattatcattaattagtagtaatataatatttcaaatatttttttcaaaataaaagaatgtagtatatagcaattgcttttctgtagtttataagtgtgtatattttaatttataacttttctaatatatgaccaaaacatggtgatgtgcaggtggcctaccacgagaagtacccgacaatctaccacctccggaagaaactggtggacagcacagacaaggcggacctccggctcatctaccttgccctcgcgcatatgatcaagttccgcggccacttcctcatcgagggcgacctgaacccggacaactccgacgtggacaagctgttcatccagctcgtgcagacgtacaatcaactgttcgaggagaaccccataaacgctagcggcgtggacgccaaggccatcctctcggccaggctctcgaaatcaagaaggctggagaaccttatcgcgcagttgccaggcgaaaagaagaacggcctcttcggcaaccttattgcgctcagcctcggcctgacgccgaacttcaaatcaaacttcgacctcgcggaggacgccaagctccagctctcaaaggacacctacgacgacgacctcgacaacctcctggcccagataggagaccagtacgcggacctcttcctcgccgccaagaacctctccgacgctatcctgctcagcgacatccttcgggtcaacaccgaaattaccaaggcaccgctgtccgccagcatgattaaacgctacgacgagcaccatcaggacctcacgctgctcaaggcactcgtccgccagcagctccccgagaagtacaaggagatcttcttcgaccaatcaaaaaacggctacgcgggatatatcgacggcggtgccagccaggaagagttctacaagttcatcaaaccaatcctggagaagatggacggcaccgaggagttgctggtcaagctcaacagggaggacctcctcaggaagcagaggaccttcgacaacggctccatcccgcatcagatccacctgggcgaactgcatgccatcctgcggcgccaggaggacttctacccgttcctgaaggataaccgggagaagatcgagaagatcttgacgttccgcatcccatactacgtgggcccgctggctcgcggcaactcccggttcgcctggatgacccggaagtcggaggagaccatcacaccctggaactttgaggaggtggtcgataagggcgctagcgctcagagcttcatcgagcgcatgaccaacttcgataaaaacctgcccaatgaaaaagtcctccccaagcactcgctgctctacgagtacttcaccgtgtacaacgagctcaccaaggtcaaatacgtcaccgagggcatgcggaagccggcgttcctgagcggcgagcagaagaaggcgatagtggacctcctcttcaagaccaacaggaaggtgaccgtgaagcaattaaaagaggactacttcaagaaaatagagtgcttcgactccgtggagatctcgggcgtggaggatcggttcaacgcctcactcggcacgtatcacgacctcctcaagatcattaaagacaaggacttcctcgacaacgaggagaacgaggacatcctcgaggacatcgtcctcaccctgaccctgttcgaggaccgcgaaatgatcgaggagaggctgaagacctacgcgcacctgttcgacgacaaggtcatgaaacagctcaagaggcgccgctacactggttggggaaggctgtcccgcaagctcattaatggcatcagggacaagcagagcggcaagaccatcctggacttcctcaagtccgacgggttcgccaaccgcaacttcatgcagctcattcacgacgactcgctcacgttcaaggaagacatccagaaggcacaggtgagcgggcagggtgactccctccacgaacacatcgccaacctggccggctcgccggccattaaaaagggcatcctgcagacggtcaaggtcgtcgacgagctcgtgaaggtgatgggccggcacaagcccgaaaatatcgtcatagagatggccagggagaaccagaccacccaaaaagggcagaagaactcgcgcgagcggatgaaacggatcgaggagggcattaaagagctcgggtcccagatcctgaaggagcaccccgtggaaaatacccagctccagaatgaaaagctctacctctactacctgcagaacggccgcgacatgtacgtggaccaggagctggacattaatcggctatcggactacgacgtcgaccacatcgtgccgcagtcgttcctcaaggacgatagcatcgacaacaaggtgctcacccggtcggataaaaatcggggcaagagcgacaacgtgcccagcgaggaggtcgtgaagaagatgaaaaactactggcgccagctcctcaacgcgaaactgatcacccagcgcaagttcgacaacctgacgaaggcggaacgcggtggcttgagcgaactcgataaggcgggcttcataaaaaggcagctggtcgagacgcgccagatcacgaagcatgtcgcccagatcctggacagccgcatgaatactaagtacgatgaaaacgacaagctgatccgggaggtgaaggtgatcacgctgaagtccaagctcgtgtcggacttccgcaaggacttccagttctacaaggtccgcgagatcaacaactaccaccacgcccacgacgcctacctgaatgcggtggtcgggaccgccctgatcaagaagtacccgaagctggagtcggagttcgtgtacggcgactacaaggtctacgacgtgcgcaaaatgatcgccaagtccgagcaggagatcggcaaggccacggcaaaatacttcttctactcgaacatcatgaacttcttcaagaccgagatcaccctcgcgaacggcgagatccgcaagcgcccgctcatcgaaaccaacggcgagacgggcgagatcgtctgggataagggccgggatttcgcgacggtccgcaaggtgctctccatgccgcaagtcaatatcgtgaaaaagacggaggtccagacgggcgggttcagcaaggagtccatcctcccgaagcgcaactccgacaagctcatcgcgaggaagaaggattgggacccgaaaaaatatggcggcttcgacagcccgaccgtcgcatacagcgtcctcgtcgtggcgaaggtggagaagggcaagtcaaagaagctcaagtccgtgaaggagctgctcgggatcacgattatggagcggtcctccttcgagaagaacccgatcgacttcctagaggccaagggatataaggaggtcaagaaggacctgattattaaactgccgaagtactcgctcttcgagctggaaaacggccgcaagaggatgctcgcctccgcaggcgagttgcagaagggcaacgagctcgccctcccgagcaaatacgtcaatttcctgtacctcgctagccactatgaaaagctcaagggcagcccggaggacaacgagcagaagcagctcttcgtggagcagcacaagcattacctggacgagatcatcgagcagatcagcgagttctcgaagcgggtgatcctcgccgacgcgaacctggacaaggtgctgtcggcatataacaagcaccgcgacaaaccaatacgcgagcaggccgaaaatatcatccacctcttcaccctcaccaacctcggcgctccggcagccttcaagtacttcgacaccacgattgaccggaagcggtacacgagcacgaaggaggtgctcgatgcgacgctgatccaccagagcatcacagggctctatgaaacacgcatcgacctgagccagctgggcggagacaagagaccacgggaccgccacgatggcgagctgggaggccgcaagcgggcaaggtaggtaccgtcatgggtcgtttaagctgccgatgtgcctgcgtcgtctggtgccctctctccatatggaggttgtcaaagtatctgctgttcgtgtcatgagtcgtgtcagtgttggtttaataatggaccggttgtgttgtgtgtgcgtactacccagaactatgacaaatcatgaataagtttgatgtttgaaattaaagcctgtgctcattatgttctgtctttcagttgtctcctaatatttgcctgcaggtactggctatctaccgtttcttacttaggaggtgtttgaatgcactaaaactaatagttagtggctaaaattagttaaaacatccaaacaccatagctaatagttgaactattagctatttttggaaaattagttaatagtgaggtagttatttgttagctagctaattcaactaacaatttttagccaactaacaattagtttcagtgcattcaaacacccccttaatgttaacgtggttctatctaccgtctcctaatatatggttgattgttcggtttgttgctatgctattgggttctgattgctgctagttcttgctgaatccagaagttctcgtagtatagctcagattcatattatttatttgagtgataagtgatccaggttattactatgttagctaggttttttttacaaggataaattatctgtgatcataattcttatgaaagctttatgtttcctggaggcagtggcatgcaatgcatgacagcaacttgatcacaccagctgaggtagatacggtaacaaggttcttaaatctgttcaccaaatcattggagaacacacatacacattcttgccagtcttggttagagaaatttcatgacaaaatgccaaagctgtcttgactcttcacttttggccatgagtcgtgacttaacggcaaacgctaattagtcactaggcccaggaaacactaactaagccctagcttatcctagcgcaacctagttaggtcttccccaagtttgtacaaaaaagcaggctggatcggccagaatggccccggaccggagctttgagagtacaatgatgaacctagattaatcaatgccaaagtctgaaaaatgcaccctcagtctatgatccagaaaatcaagattgcttgaggccctgttcggttgttccggattagagccccggattaattcctagccggattacttctctaatttatatagattttgatgagctggaatgaatcctggcttattccggtacaaccgaacaggccctgaaggataccagtaatcgctgagctaaattggcatgctgtcagagtgtcagtattgcagcaaggtagtgagataaccggcatcatggtgccagtttgatggcaccattagggttagagatggtggccatgggcgcatgtcctggccaactttgtatgatatatggcagggtgaataggaaagtaaaattgtattgtaaaaagggatttcttctgtttgttagcgcatgtacaaggaatgcaagttttgagcgagggggcatcaaagatctggctgtgtttccagctgtttttgttagccccatcgaatccttgacataatgatcccgcttaaataagcaacctcgcttgtatagttccttgtgctctaacacacgatgatgataagtcgtaaaatagtggtgtccaaagaatttccaggcccagttgtaaaagctaaaatgctattcgaatttctactagcagtaagtcgtgtttagaaattatttttttatataccttttttccttctatgtacagtaggacacagtgtcagcgccgcgttgacggagaatatttgcaaaaaagtaaaagagaaagtcatagcggcgtatgtgccaaaaacttcgtcacagagagggccataagaaacatggcccacggcccaatacgaagcaccgcgacgaagcccaaacagcagtccgtaggtggagcaaagcgctgggtaatacgcaaacgttttgtcccaccttgactaatcacaagagtggagcgtaccttataaaccgagccgcaagcaccgaattgcataatgaggatcgaggatggttttagagctagaaatagcaagttaaaataaggctagtccgttatcaacttgaaaaagtggcaccgagtcggtgctttttttttgcggccgcgtctaaaaacggcccctaactaacgcttagttgcccgctagattagtcccccgttagtgcctagttagacacacgacgaactaggggctagaattcctgcaaattgggttagcaaaacaaatctagtctaggtgtgttttgcgatccgatcgatggggatttatccccgtggggaacggggatggggaagaaatgtctctcgcaagagttcgtgggaatccccgcgggaaatttttttgtcgcggggacggatacggggagccaaagggtgccatccctaacaccgacaccgggcctgacgctgtcgccgcagctgctcatcttgtggttgtgggctgtgcccggtttccctgttgcggattgcgggtggcagcctggcaggtgggtgcgacccgtttggattcccttgtctgggccccttgtgtcagtaccgtctgtactccgatgacatgcaccgtcgtccacagtcaagtccaaaatctcccctctttttttaacggaacagttcaaaacctccttgacgcacgctgtcgtgtaccagcactcggtggacaccacgtttgtaatccaggccgacacgtcggtcccacgtcgacaggccccaccgtccggtctgtagcgtgtacgtattcgggcgacggacgtgtcgtcgtcgtcttgcgagtcccattcccatcaccatctgagccacacatcctctgaacaaaagcagggaggcctccacgcacatccccctttctcccactccgtgtccgtggcacccaccccaaaccctcgcgccgcctccgagacagccgccgcaaccatggccaccgccgccgccgcgtctaccgcgctcactggcgccactaccgctgcgcccaaggcgaggcgccgggcgcacctcctggccacccgccgcgccctcgccgcgcccatcaggtgctcagcggcgtcacccgccatgccgatggctcccccggccaccccgctccggccgtggggccccaccgagccccgcaagggtgctgacatcctcgtcgagtccctcgagcgctgcggcgtccgcgacgtcttcgcctaccccggcggcgcgtcgatggagatccaccaggcactcacccgctcccccgtcatcgccaaccacctcttccgccacgagcaaggggaggcctttgccgcctccggctacgcgcgctcctcgggccgcgtcggcgtctgcatcgccacctccggccccggcgccaccaacctagtctccgcgctcgccgacgcgctgctcgattccgtcccgatggtcgccatcacgggacaggtggcgcgacgcatgattggcaccgacgccttccaggagacgcccatcgtcgaggtcacgcgctccatcaccaagcacaactacctggtcctcgacgtcgacgacatcccccgcgtcgtgcaggaggctttcttcctcgcctcctctggtcgaccagggccggtgcttgtcgacatccccaaggacatccagcagcagatggcggtgcctgtctgggacaagcccatgagtctgcctgggtacattgcgcgccttcccaagccccctgcgactgagttgcttgagcaggtgctgcgtcttgttggtgaatcgcggcgccctgttctttatgtgggcggtggctgcgcagcatctggtgaggagttgcgacgctttgtggagctgactggaatcccggtcacaactactcttatgggcctcggcaacttccccagcgacgacccactgtctctgcgcatgctaggtatgcatgggacggtgtatgcaaattatgcagtggataaggccgatctgttgcttgcacttggtgtgcggtttgatgatcgcgtgacagggaagattgaggcttttgcaagcagggctaagattgtgcacgttgatattgatccggctgagattggcaagaacaagcagccacatgtgtccatctgtgcagatgttaagcttgctttgcagggcatgaatgctcttcttgaaggaagcacatcaaagaagagctttgactttggctcatggaacgatgagttggatcagcagaagagggaattcccccttgggtataaaacatctaatgaggagatccagccacaatatgctattcaggttcttgatgagctgacgaaaggcgaggccatcatcggcacaggtgttgggcagcaccagatgtgggcggcacagtactacacttacaagcggccaaggcagtggttgtcttcagctggtcttggggctatgggatttggtttgccggctgctgctggtgcttctgtggcaaacccaggtgtcactgttgttgacatcgatggagatggtagctttctcatgaacgttcaggagctagctatgatccgaattgagaacctcccagtgaaggtctttgtgctaaacaaccagcacctggggatggtggtgcagttggaggacaggttctataaggccaacagagcgcacacatacttgggaaacccagagaatgaaagtgagatatatccagatttcgtgacgatcgccaaagggttcaacattccagccgtccgtgtgacaaagaagaacgaagtccgcgcagcgataaagaagatgctcgagactccagggccgtacctcttggatataatcgtcccacaccaggagcatgtgttgcctatgatccctagtggtggggctttcaaggatatgatcctggatggtgatggcaggactgtgtactgacttcgaataggtacccggggatcctctagtgccgtgggtcgtttaagctgccgctgtacctgtgtcgtctggtgccttctggtgtacctgggaggttgtcgtctatcaagtatctgtggttggtgtcatgagtcagtgagtcccaatactgttcgtgtcctgtgtgcattatacccaaaactgttatgggcaaatcatgaataagcttgatgttcgaacttaaaagtctctgctcaatatggtattatggttgtttttgttcgtctcctaatatttgcctgggatcaaattttattggctggtgttcatttgacctccatgttcttgctaggctccattttttactctacagccataatatgtttgattgtttggtttgttctttgttgtacacctggttctgtcgagcttagttttcgacactggcttacagcttaacatgttgctattttattgggttctgattgctattttattgggttctgattgctagtttttgctgaatccaaaaaccatgttatttatttaagcgatccaggttattattatgatggtggctaagtttttttttttccaagggtaaattttctggattctccagtgtttctgtggccgaattcaatcactagagtcgacctgcagtcacccggtccgggcctagaaggccacccggggtcggaggagactagccgttagttagtgcagaccgtctctaatcagtgactagcgacgtcccgacccacccagctttcttgtacaaagtggccgttaacggatcggccagaatggcccggaccgggttaccccggaatcggacctcgggacgtcgccaaagttagctaggtgtccttagcgtttcttaggttctaggcgttaggggtcaataggttagcctagaagtcccgcactaacagcctagcttaacagttccaagctaagccactagactagccctatccgactaacctagtctaagccgaacggggatctaatctaagctaggcacccattagactagttcactagcgcgaccgcactaaactaggctaaaggttaatagcaactagttagctaggggacgttagctgcccaagcttggttaccgcataatgaggatcgaggatgaggagcatgcacggatagatggcgtctagcatatcgataggacatgacaagtggtacgatccccgtcacatgtccatggaggcatctgatatggacacggcgtgtatctatcgcggctggaacagaaccagcgctcgcgcggcggtcggcgggagggacagaccttggctccgtgcgttcaggttgtgcttgtgccgcgcgccacgcacggtctccgccgcctgcagctgaaattttagatttacatcctatccctttattttttttatttgtcacaattcagttcaaaaatgaagaacggaggtagtgcatcctttgtgagactaatgaaaatcacatctggatcctgaaatcggcgtcgtaacctacaaggccacggactggattagatagtggtccatggtgcataatgaggatcgaggggtaccagtctaattacaaaactaattgcacaaccgctaagctgaatcgcgagatggatctattaaccttaattagtccatgatttgacaatgtggtgctacaataaccatttgctaatgatggattacttaggtttaatagattcgtctcgtgatttagcctatgggttctgctattaattttgtaattagctcatatttagttcttataattagtatccgaacatccaatgtgacatgctaaagtttaaccctggtatccaaatgaagtcttatgagagtttcatcactccggtggtatatgtacttaggctccgttttcttccaccgacttatttttagcacccgtcacattgaatgtttagatactaattagaagtattaaacgtagactatttacaaaatccattacataagacgaatctaaacggcgagacgaatctattaaacctaattagtccatgatttgacaatgtgttgctacagtaaacatttgctaatgatggattaattaggcttaatagattcgtctcgccgtttagcctccacttatgtaatgggttttctaaacaatctacgtttaatactcctaattagtatctaaatattcaatgtgacacgtgctaaaaataagtcagtggaaggaagagaacgtccccttagttttccatcttattaattgtacgatgaaactgtgcagccagatgattgacaatcgcaatacttcaactagtgggccatgcacatcagcgacgtgtaacgtcgtgagttgctgttcccgtagagaaatatcaactggtgggccacgcacatcagcgtcgtgtaacgtggacggaggagccccgtgacggcgtcgacatcgaacggccaccaaccacggaaccacccgtccccacctctcggaagctccgctccacggcgtcgacatctaacggctaccagcaggcgtacgggttggagtggactccttgcctctttgcgctggcggcttccggaaattgcgtggcggagacgaggcgggctcgtctcacacggcacggaagacgtcacgggttccttccccacctctcctcttccccaccgccataaatagccgaccccctcgcctttctccccaatctcatctcgtctcgtgttgttcggagcacaccacccgccccaaatcgttcttcccgcaagcctcggcgatccttcacccgcttcaaggtacggcgatcgtcttcctcctctagatcggcgtgatctgcaagtagttgatttggtagatggttaggatctgtgcactgaagaaatcatgttagatccgcgatgtttctgttcgtagatggctgggaggtggaatttttgtgtagatctgatatgttctcctgtttatcttgtcacgctcctgcgatttgtggggattttaggtcgttgatctgggaatcgtggggttgcttctaggctgttcgtagatgaggtcgttctcacggtttactggatcattgcctagtagatcagctcgggctttcgtctttgtatatggtgcccatacttgcatctatgatctggttccgtggtgttacctaggtttctgcgcctgattcgtccgatcgattttgttagcatgtggtaaacgtttggtcatggtctgatttagattagagtcgaataggatgatctcgatctagctcttgggattaatatgcatgtgtcaccaatctgttccgtggttaagatgatgaatctatgcttagttaatgggtgtagatatatatgctgctgttcctcaatgatgccgtagcttttacctgagcagcatggttcctcctgttacttaggtagatgcacatgcttatagatcaagatatgtactgctactgttggaattgtttagtatacctgatgatcatccatgctcttgttacttgttttggtatacttggatgatggcatgctgctgctttttgttgatttgagcccatccatatctgcatatgtcacatgattaagatgattacgctgtttctgtatgatgccatagcttttatgtgagcaacatgcatcctcctggttatatgcattaatagatggaagatatctattgctacaatttgatgattattttgtacatacgatgatcaagcatgctcttcatactttgttgatatacttggataatgaaatgctgctgcacgttcattctatagcactaatgatgtgatgaacacgcacgacctgtttgtggcatctgtttgaatgtgttgttgctgttcactagagactgttttattaacctactgctagatacttacccttctgtctgtttattcttttgcaggtcgaccgccggggatccatggttgaacaagatggattgcacgcaggttctccggccgcttgggtggagaggctattcggctatgactgggcacaacagacaatcggctgctctgatgccgccgtgttccggctgtcagcgcaggggcgcccggttctttttgtcaagaccgacctgtccggtgccctgaatgaactgcaggacgaggcagcgcggctatcgtggctggccacgacgggcgttccttgcgcagctgtgctcgacgttgtcactgaagcgggaagggactggctgctattgggcgaagtgccggggcaggatctcctgtcatctcaccttgctcctgccgagaaagtatccatcatggctgatgcaatgcggcggctgcatacgcttgatccggctacctgcccattcgaccaccaagcgaaacatcgcatcgagcgagcacgtactcggatggaagccggtcttgtcgatcaggatgatctggacgaagagcatcaggggctcgcgccagccgaactgttcgccaggctcaaggcgcgcatgcccgacggcgatgatctcgtcgtgacccatggcgatgcctgcttgccgaatatcatggtggaaaatggccgcttttctggattcatcgactgtggccggctgggtgtggcggaccgctatcaggacatagcgttggctacccgtgatattgctgaagagcttggcggcgaatgggctgaccgcttcctcgtgctttacggtatcgccgctcccgattcgcagcgcatcgccttctatcgccttcttgacgagttcttctgagcccatcggtcatggatgcttctactgtacctgggtcgtctggtctctgcctgtgtcacctttgaagtacctgtgtcgggattgtgtttggtctagaactgcagtttgtctttgatgttcttttgtctggtcttatgaactggttgtatctgtatgtttactgtaaactgttgttgcggtgcagcagtatggcatccgaatgaataaatgatgtttggacttaaatctgtactctgtttgttttcggttatgccagttctatattgcctgagatcagaatgtttagcttttgagttctgtttggcttgtggtcgactcctgtttcttacttgaggcgtaactctgttctggcaaactcaaatgtctaactgaatgttttaggacttaattgttggacagattaacgtgtttggtttgtttctagattgtgattcggaaggcttgttagttgtggaatcaaggagagcagctaggtctgtgcagaacgttattttggatttaagccttctcagattatgccattactctaaacctaatgatatcatatttcactcggggatgttggagtagtcttttctttctcctgcagacaaaatgattttgctttcgtgtgtgtacatgattttgtgcaactgttgcaacaactgaagtagacaagttttgacctcaccagaagaatgaaaaagattttggaatttgttacatcgacaaaccattgtaacttggcccatcagaatgcacagagaagcggctacaaattgacatgcgttgcaaactttgcaatagttgatgcacatgtttgccattgcctgccagtcttaggaaaagtgtgtggttcgagaaatctaagcatatgtgctctgctcacattgcgtggaacccacacagctttgtcacactcttgtccactccagaagtcattcctggcgctgtttacccctggtaaagagtaaccgaaaacttctcaaggctgtacccaaaactggaaggaaatttggaggcggccgcatgaggagcaatcattgttcaagacatgatgcaaagctagaaaactttgattgtggccgtccttgtgaagtttaggccggggggaacttcatgaaccctatcgaagcttaattagttcttttttgttgttagccatgtttgtattgtagttaaggtgaacaacatgacgccgcacccgcgatctcagggctcgtccccacacaggagggcacgtcgtcgtcttcgccgccgagcatcagagattcagagcacatacacgcacatctcaagcaaacggagtagtacgtcctactcctacgtacatacctagccgacgacctttatgtgcacaccaccactgctctgctgcccggcctctccgtcgtccgttcatcaccagcataatgaggatcgaggatgaggggcgcgccgacgtcccgaggtccgattccgggctaattaacacctagctcgccactcgactaattagggactaagcctagcgcttagccgttaaaacctagcacaccctaagcacccttagttaggttcccctcttaattaagccctagtgagcccctaagttaaggggacgctaagagccccctaacctagtattcggctagaggcgaactaggctaaacacctaagcgcacctctttaagctagatcgctagggggctaggctagagcttcgctagattagtctaagggcagcctgcagggccctcttgtcggaccagttgcccaccacgttggtgaggggcaactttattatacaaagttgatagatcctcatgtcttcctgcccttaaggccaattgttcaagattcattcaacaattgaaacatctcccatgattaaatcagtataaggttgctatggtcttgcttgacaaagtttttttttgagggaatttcaactaaatttttgagtgaaactatcaaatactgattttaaaaaatttttataaaaggaagcgcagagataaaaggccatctatgctacaaaagtacccaaaaatgtaatcctaaagtatgaattgcattttttttttgtttggacgaaaggaaaggagtattaccacaagaatgatatcatcttcatatttagatcttttttgggtaaagcttgagattctctaaatatagagaaatcagaagaaaaaaaaaccgtgttttggtggttttgatttctagcctccacaataactttgacggcgtcgacaagtctaacggacaccaagcagcgaaccaccagcgccgagccaagcgaagcagacggccgagacgttgacaccttcggcgcggcatctctcgagagttccgctccggcgctccacctccaccgctggcggtttcttattccgttccgttccgcctcctgctctgctcctctccacaccacacggcacgaaaccgttacggcaccggcagcacccagcacgggagaggggattcctttcccaccgttccttccctttccgccccgccgctataaatagccagccccatccccagcttttttccccaatctcatctcctctctcctgttgttcggagcacacgcacaatccgatcgatccccaaatccccttcgtctctcctcgcgagcctcgtggatcccagcttcaaggtacggcgatcgatcatcccccctccttctctctaccttcttttctctagactacatcggatggcgatccatggttagggcctgctagtttcccttcctgttttgtcgatggctgcgaggcacaatagatctgatggcgttatgacggctaacttgtcatgttgttgcgatttatagtccctttaggagatcagtttaatttctcggatggttcgagatcggtggtccatggttagtaccctaagatccgcgctgttagggttcgtagatggaggcgacctgttctgattgttaacttgtcagtacctgggaaatcctgggatggttctagctcgtccgcagatgagatcgatttcatgatcctctgtatcttgtttcgttgcctaggttccgtctaatctatccgtggtatgatgtagatgttttgatcgtgctaactacgtcttgtaaagttaattgtcaggtcataatttttagcatgcctttttttttgtttggttttgtctaattgggctgtcgttctagatcagagtagaagactgttccaaactacctgctggatttattgaacttggatctgtatgtgtgtcacatatcttcataaattcatgattaagatggattgaaatatcttttatctttttggtatggatagttctatatgttggtgtggctttgttagatgtatacatgcttagatacatgaagcaacgtgctgctactgtttagtaattgctgttcatttgtctaataaacagataaggatatgtatttatgttgctgttggttttgctggtactttgttggatacaaatgcttcaatacagaaaacagcatgctgctacgatttaccatttatctaatcttatcatatgtctaatctaataaacaaacatgcttttaaattatcttcatatgcttggatgatggcatacacagcggctatgtgtggttttttaaatacccagcatcatgggcatgcatgacactgctttaatatgctttttatttgcttgagactgtttcttttgtttatactgaccctttagttcggtgactcttctgcaggtcgactttaacttagcctaggatccatggcccagtccaagcacggcctgaccaaggagatgaccatgaagtaccgcatggagggctgcgtggacggccacaagttcgtgatcaccggcgagggcatcggctaccccttcaagggcaagcaggccatcaacctgtgcgtggtggagggcggccccttgcccttcgccgaggacatcttgtccgccgccttcatgtacggcaaccgcgtgttcaccgagtacccccaggacatcgtcgactacttcaagaactcctgccccgccggctacacctgggaccgctccttcctgttcgaggacggcgccgtgtgcatctgcaacgccgacatcaccgtgagcgtggaggagaactgcatgtaccacgagtccaagttctacggcgtgaacttccccgccgacggccccgtgatgaagaagatgaccgacaactgggagccctcctgcgagaagatcatccccgtgcccaagcagggcatcttgaagggcgacgtgagcatgtacctgctgctgaaggacggtggccgcttgcgctgccagttcgacaccgtgtacaaggccaagtccgtgccccgcaagatgcccgactggcacttcatccagcacaagctgacccgcgaggaccgcagcgacgccaagaaccagaagtggcacctgaccgagcacgccatcgcctccggctccgccttgccctccggactcagatctcgatagggtaccaatggccagttaacagatccagctgctgctgttctagggttcacaagtctgcctatttgtcttccccaatggagctatggttgtctggtctggtccttggtcgtgtcccgtttcattgtgtactatttacctgtaatgtgtatccttaagtctggtttgatggtgtctgaaacgttttgctgtggtagagcagcatggaagaactataatgaataagtgatccctaatcattgtgtccaaattttgcttctgctatacccttttgtgctgtttcttatgttttgcttaaaaatttgatctgacaaacaaatttgtctaaattatgctcttgttctgactgtgtactgtacacatttgtattgctaccggtttggcacatagttttctctttgattgcagatcaaacccttctgattgcagattgcttggctatggctgatgtgctcactgttcttctttagcttgtatattgctgatggtggcttggctacggctgaaaaagttgctgctgcgccgacttggcaactgttgctccagtaatgctttgtcctctcttcctagccgccgacttggcacttggcagctgttgctcctgtaatgcgttgttatctcttatctcttgagatgtactatgattttgaggctgtttgacttgtgccagattgccagtgctgatgctatattatctcaggtttttatgctagtatatgttttactgtgtgctgcctgtgtcgagttacgtaatctattgaaccgctatgcgtgttgatgccctgttgttgcttgccagattgatgcccctgttgcttgcagcttgcaagctgtagtgaaatcctaaaattcgaaaccaaatctattctgaacttttgaagatctgtgatgtccggaagaaaagattcaaacagataaacgggactctccagaatctataaaataaatgatcgacaaacgctttgctttggtaggcttcctagttagttagcggaccgaagcttcggttgtttctgtggccgaattcaatcactagagtcgacctgcatgattccgatgacttcgtaggttcctagctcaagccgctcgtgtccaagcgtcacttacgattagctaatgattacggcatctaggaccgactagctagctagctaagagctcggtaccgagctcgaattcattccgattaatcgtggcctcttgctcttcaggatgaagagctatgtttaaacgtgcaagcgctactagacaattcagtacattaaaaacgtccgcaatgtgttattaagttgtctaagcgtcaatttgtttacaccacaatatatcctgcca

SEQ ID NO: 237 - DNA, 18676 bp, Artificial Sequence
  PHP70298
atgttacgcagcagcaacgatgttacgcagcagggcagtcgccctaaaacaaagttaggtggctcaagtatgggcatcattcgcacatgtaggctcggccctgaccaagtcaaatccatgcgggctgctcttgatcttttcggtcgtgagttcggagacgtagccacctactcccaacatcagccggactccgattacctcgggaacttgctccgtagtaagacattcatcgcgcttgctgccttcgaccaagaagcggttgttggcgctctcgcggcttacgttctgcccaagtttgagcagccgcgtagtgagatctatatctatgatctcgcagtctccggcgagcaccggaggcagggcattgccaccgcgctcatcaatctcctcaagcatgaggccaacgcgcttggtgcttatgtgatctacgtgcaagcagattacggtgacgatcccgcagtggctctctatacaaagttgggcatacgggaagaagtgatgcactttgatatcgacccaagtaccgccacctaataatgtctaacaattcgttcaagccgacgccgcttcgcggcgcggcttaactcaagcgttagatgcactatacgtaccaatccaaatcggatccccctgcagggctgagataggtgcctcactgattaagcattggtaactgtcagaccaagtttactcatatatactttagattgatttaaaacttcatttttaatttaaaaggatctaggtgaagatcctttttgataatctcatgaccaaaatcccttaacgtgagttttcgttccactgagcgtcagaccccgtagaaaagatcaaaggatcttcttgagatcctttttttctgcgcgtaatctgctgcttgcaaacaaaaaaaccaccgctaccagcggtggtttgtttgccggatcaagagctaccaactctttttccgaaggtaactggcttcagcagagcgcagataccaaatactgtccttctagtgtagccgtagttaggccaccacttcaagaactctgtagcaccgcctacatacctcgctctgctaatcctgttaccagtggctgctgccagtggcgataagtcgtgtcttaccgggttggactcaagacgatagttaccggataaggcgcagcggtcgggctgaacggggggttcgtgcacacagcccagcttggagcgaacgacctacaccgaactgagatacctacagcgtgagctatgagaaagcgccacgcttcccgaagggagaaaggcggacaggtatccggtaagcggcagggtcggaacaggagagcgcacgagggagcttccagggggaaacgcctggtatctttatagtcctgtcgggtttcgccacctctgacttgagcgtcgatttttgtgatgctcgtcaggggggcggagcctatggaaaaacgccagcaacgcggcctttttacggttcctggccttttgctggccttttgctcacatgttctttcctgcgttatcccctgattctgtggataaccgtattaccgcctttgagtgagctgataccgctcgccgcagccgaacgaccgagcgcagcgagtcagtgagcgaggaagcggaagagcgcctgatgcggtattttctccttacgcatctgtgcggtatttcacaccgcatatggtgcactctcagtacaatctgctctgatgccgcatagttaagccagtatacactccgctatcgctacgtgactgggtcatggctgcgccccgacacccgccaacacccgctgacgcgccctgacgggcttgtctgctcccggcatccgcttacagacaagctgtgaccgtctccgggagctgcatgtgtcagaggttttcaccgtcatcaccgaaacgcgcgaggcagcagatctatcgatggtacctatctgcagacggaagggattcctgttaattaaaacagcttgcgtcatgcggtcgctgcgtatatgatgcgatgagtaaataaacaaatacgcaaggggaacgcatgaaggttatcgctgtacttaaccagaaaggcgggtcaggcaagacgaccatcgcaacccatctagcccgcgccctgcaactcgccggggccgatgttctgttagtcgattccgatccccagggcagtgcccgcgattgggcggccgtgcgggaagatcaaccgctaaccgttgtcggcatcgaccgcccgacgattgaccgcgacgtgaaggccatcggccggcgcgacttcgtagtgatcgacggagcgccccaggcggcggacttggctgtgtccgcgatcaaggcagccgacttcgtgctgattccggtgcagccaagcccttacgacatatgggccaccgccgacctggtggagctggttaagcagcgcattgaggtcacggatggaaggctacaagcggcctttgtcgtgtcgcgggcgatcaaaggcacgcgcatcggcggtgaggttgccgaggcgctggccgggtacgagctgcccattcttgagtcccgtatcacgcagcgcgtgagctacccaggcactgccgccgccggcacaaccgttcttgaatcagaacccgagggcgacgctgcccgcgaggtccaggcgctggccgctgaaattaaatcaaaactcatttgagttaatgaggtaaagagaaaatgagcaaaagcacaaacacgctaagtgccggccgtccgagcgcacgcagcagcaaggctgcaacgttggccagcctcgcagacacgccagccatgaagcgggtcaactttcagttgccggcggaggatcacaccaagctgaagatgtacgcggtacgccaaggcaagaccattaccgagctgctatctgaatacatcgcgcagctaccagagtaaatgagcaaatgaataaatgagtagatgaattttagcggctaaaggaggcggcatggaaaatcaagaacaaccaggcaccgacgccgtggaatgccccatgtgtggaggaacgggcggttggccaggcgtaagcggctgggttgcctgccggccctgcaatggcactggaacccccaagcccgaggaatcggcgtgagcggtcgcaaaccatccggcccggtacaaatcggcgcggcgctgggtgatgacctggtggagaagttgaaggcagcgcaggccgcccagcggcaacgcatcgaggcagaagcacgccccggtgaatcgtggcaagcagccgctgatcgaatccgcaaagaatcccggcaaccgccggcagccggtgcgccgtcgattaggaagccgcccaagggcgacgagcaaccagattttttcgttccgatgctctatgacgtgggcacccgcgatagtcgcagcatcatggacgtggccgttttccgtctgtcgaagcgtgaccgacgagctggcgaggtgatccgctacgagcttccagacgggcacgtagaggtttccgcagggccggcaggcatggccagtgtgtgggattacgacctggtactgatggcggtttcccatctaaccgaatccatgaaccgataccgggaagggaagggagacaagcccggccgcgtgttccgtccacacgttgcggacgtactcaagttctgccggcgagccgatggcggaaagcagaaagacgacctggtagaaacctgcattcggttaaacaccacgcacgttgccatgcagcgtacgaagaaggccaagaacggccgcctggtgacggtatccgagggtgaagccttgattagccgctacaagatcgtaaagagcgaaaccgggcggccggagtacatcgagatcgagctagctgattggatgtaccgcgagatcacagaaggcaagaacccggacgtgctgacggttcaccccgattactttttgatcgatcccggcatcggccgttttctctaccgcctggcacgccgcgccgcaggcaaggcagaagccagatggttgttcaagacgatctacgaacgcagtggcagcgccggagagttcaagaagttctgtttcaccgtgcgcaagctgatcgggtcaaatgacctgccggagtacgatttgaaggaggaggcggggcaggctggcccgatcctagtcatgcgctaccgcaacctgatcgagggcgaagcatccgccggttcctaatgtacggagcagatgctagggcaaattgccctagcaggggaaaaaggtcgaaaaggtctctttcctgtggatagcacgtacattgggaacccaaagccgtacattgggaaccggaacccgtacattgggaacccaaagccgtacattgggaaccggtcacacatgtaagtgactgatataaaagagaaaaaaggcgatttttccgcctaaaactctttaaaacttattaaaactcttaaaacccgcctggcctgtgcataactgtctggccagcgcacagccgaagagctgcaaaaagcgcctacccttcggtcgctgcgctccctacgccccgccgcttcgcgtcggcctatgcatataattgtggtttcaaaatcggctccgtcgatactatgttatacgccaactctgaaaacaactttgaaaaagctgttttctggtatttgacccgcgaggtttctcgcttcaattgaaatcataaagaagcaattgaaaattttcgagtaaccgaccctcccgataatcttcaacataaaacaacgcacttcttccaacgggagaggcggtgttagttgcgagctaaggagataaggtatgcttaagagatcggggtcgctttctcttgccttgatggtctccttctgttcgtcgagccttgccacgccactctcatctgctgagtttgaccatgttgctcgcaagtgtgccccatcagttgcgacatctacgcttgcggcgatagctaaggtggagagtcgctttgatcctttagcgattcatgacaacacgaccggcgaaacgcttcactggcaagatcacagccaagcaacccaagtcgtcaggcaccgtctcgatgcacggcattcgctggatgttggcctcatgcaaataaactctcgaaatttttctatgctcggtctgacacctgacggtgcgctccaggcgtgcacatcattatctgccgctgcaaacatgctgaaaagtcgttatgcaggcggcgaaacgattgacgagaagcaatttgcgcttcgtcgggcgatctccgcttacaacaccggtaatttcatcggcggttttgcaaacggctacgtgcgaaaagttgaaacagctgctcaatcgctggtgcccgcgttaatcgagcctccaaaagacgatcacgaggcgctaaaatccgaagagacgtgggatgtttgggggtcatatcagcgccgctcgcaggaggatggcgctggcggtttaatcgctccgccaccgccacaccaggacaacggcaaatccgcagacgacaatcaagtcttattcgacttatactaaggaggtgcgcattgatgcgatgctttgagagataccgtttacatctaaatcgcctctcgctctcgaatgcgatgatgcgcgtgatatcgagctgcgccccaagcttgtgcggtgcaattgcatggagcatttcctcatccggacccgccgcagcgcaatctgcgggtggcggcactgaccccgccacaatggttaacaatatatgcacgtttatccttggtccgttcggccagtcactcgctgttctcggcattgtcgctatcgggatctcctggatgttcgggcgggcttcgcttgggctggttgccggcgtcgtcggcggcattgttatcatgtttggggcgagcttcctcggccaaacgctcactggcggtagttgatggctgatcgtttggaagaatcgaccctttacctcgcagccacacggcccgcattgtttcttggggtgccactgacattggcagggttattcatgatgttcgccggctttgtcatcgttatcgttcagaacccgctctacgaagtcgttctcgtgccgttatggtttgcagcccggctcatcgtggagcgagactacaatgcggcgagcgtcgtcctgctatttttgcggaccgcgggaagaagcattgatagtgcagtttgggggggcgctactgttagcccaaatccaattagggttcccccacgagggagaggaatggtgtgatgctcggcgcgagtggaacgaccgaaagatccggtgagatctatctcccttatattggccacctcagcgaccatatcgtccttcttgaagacggatcgatcatgaccattgcgagaattgatggcgttgcattcgagcttgaggaaactgaaatgcgcaatgcgcgttgtcgtgcgttcaacacgctgttgcgcaatatcgctgatgatcatgtgtcaatatatgctcacctcgtacgtcatgccgacgtgccatcatcggcgccgcgacacttccgtagtgttttcgccgctagcctgaacgaagcttttgaacagcgcgtgctctccggccaactcctccgcaatgaacacttccttacgttgattgtctacccacaggcggctttagggaaggtaaagaggaggttcaccaagctaagcggaaaaagggaaaacgatctcacgggccagatcaggaacatggaagatctttggcatgttgtcgctggctctcttaaagcgtatggcctgcatcgtcttggcatccgcgagaagcagggtgtgctcttcaccgaaattggcgaagcgctacggttgatcatgactggtcggttcacaccggttccggtcgtcagcggctcactcggcgcttcgatttataccgacagagtcatttgcggcaagcgaggactcgagatcagaacgccaaaagacagttacgttggatccatctattcgtttcgcgaataccctgcaaaaacacggccgggcatgctcaacgcgctgctatccctcgattttccacttgttctcacgcagagtttttcgttcctgactcgcccgcaagcgcacgcgaaacttagcctcaaatcgagccagatgctgagttccggcgataaagccgtgactcaaatcggcaaattatccgaggctgaggacgcacttgcgagcaacgaattcgttatgggctcacatcatttgagcctttgcgtctatgcagacgatctcaatagtcttggggacaggggcgcgcgggctcggacacgaatggcggatgcaggtgccgtggttgtccaagaaggtattggtatggaagcggcctattggtcccaattgccggggaattttaagtggcgcacacgccctggcgcaatcacttcacgcaatttcgcagggtttgtctctttcgaaaactttccagagggcgccagctcaggccactggggcaacgcgattgcccgatttcgtaccaatggcggaacgcctttcgactatatcccgcatgagcacgatgttggcatgacggcaatattcgggcctatcgggaggggtaagacgacgctcatgatgtttgttctagccatgctcgaacagagcatggtcgaccgtgcaggtacggtcgtgttctttgacaaggaccggggtggcgaattgctggttcgcgccacaggaggaacatatttggcacttcacagaggcacacccagcgggttggcgccgttgcgtggcctagaaaacacagcagcctcacacgattttctgcgcgaatggatcgtggctctcatcgagagtgatggtcggggtgggatttctccggaagagaaccgccgtctggtccgtggtatccatcgtcagctctcgtttgatccacaaatgcgttcaatcgcggggttacgtgaatttttgttgcatgggcccgccgaaggcgcaggagcgcggctccaacgctggtgccggggccatgcgcttggctgggcatttgacggcgaagttgacgaagtaaagttagatccgtcgattaccggcttcgacatgacgcatcttctcgaatacgaggaagtatgcgctcccgctgcagcatatctcctgcatcggattggagccatgatcgacggccgccgttttgtgatgagctgcgatgagtttcgcgcctatttgttaaaccctaaattttcgactgtcgtcgacaaattcctcctgaccgttcgaaaaaacaacgggatgctaatactggcaacgcagcaaccagagcatgttctggaatcgccgctaggagccagcttggttgcgcaatgtatgacgaagattttctatccatcaccaaccgcagatcgatcggcttatgtcgatggactgaaatgtaccgaaaaggaatttcaggcgatccgtgaagacatgacggtcggcagccgtaagtttcttcttaaacgagaaagtggaagcgtcatctgcgaatttgatctgcgggatatgcgtgaatatgtcgccgtgctttcggggcgtgccaacacggtgcgctttgcaactcgactacgcgaggcacaagaaggcaactcatctggctggctcagcgaattcatggcccgtcaccacgaggcagaagattgataaggtaggaaacgatgaagacgacgcaacttattgcaacagttttgacctgcagctttctatatattcagcccgcgcgggcgcagtttgttgttagcgacccggcaacggaggctgagacgctcgcgactgcgctcgcgactgcggagaatctcactcagactatagcgatggttacgatgttgacgtcggcctacggcgttactggactactgacttcgctcaaccagaaaaatcagtatccttcgacgaaggacctagacaatgaaatgttttcgccgcgaatgccaatgtcgaccacggcacgtgcgatcaccagcgatacagatcgtgcagtcgtgggtagtgatgctgaagcggacctgttgcgatcgcagatcaccggttccgcaaacagcgctggcattgcggctgacaatctggaaacgatggacaaacgcttgacggcgaatgctgatacgtctgctcagctttcccgatctcgcaatatcatgcaggcaaccgtgaccaatggtttgcttctcaagcagatccatgacgcaatgattcaaaatgtacaggcgacaagcctattaacgatgactaccgcgcaggccggccttcacgaggcggaagaggcggccgctcaacgcaaggagcatcaaaagaccgctgtcatctttggtgccctcccctaaggctgggcgatttgttcatccgcccgcatcctcgccgaatgcgagctcattttatccaacattatgcgacaaaccagtcaagttcaggtccaatcgatgaatttcacgattccggcgccgtttacggccattcatacgatcttcgatgtagccttcacgacaggcttggactcgatgcttgagactatccaggaggcggtgagtgcgccattgatcgcctgtgtcactctttggattattgttcagggtattttagtcatacgcggcgaagtcgatacccgtagcggtatcactcgggtgatcacggtcaccatcgttgttgctctaattgttgggcaggctaactaccaagactatgtggtttccatcttcgaaaagacggtcccaaactttgttcagcagtttagtgtaaccggcttgcctctgcagactgttccggcacagttggatacaatgttcgccgtgacccaggccgtttttcagaaaatcgcatccgaaatcggtccgatgaacgaccaggacatccttgctttccaaggggcacagtgggtcctttacggcacgctctggtctgccttcggagtttacgacgccgttggaattctcacgaaagtgcttctcgcgatcgggcctctgatcctcgtcggatatatttttgatcgcacgcgggacatcgcagctaagtggatcgggcaacttatcacctacggtctcttgcttctcctcttaaacctcgtggcaacgatcgtcatcctaaccgaagcgactgcgctcacccttatgcttggtgtaatcaccttcgccggtacgaccgcggccaagatcattggtctttacgaactcgatatgttttttctgacaggggatgcgctcattgtcgctttgccggcgatcgccggcaacattggaggcagttactggagcggcgcaacccaatctgccagcagcttgtaccgtcgcttcgctcaggttgagcgaggctaggtcgcgcaaaaattcgcctcaatggagaattctatgaagtattgcctgctgtgcctagttgtcgctttgagcggctgccagacaaacgacacattagcgagctgcaaaggcccgatcttcccgctgaatgtggggcgatggcagcctactccgtcagatcttcagctcggcaattcgggtggacgctatgacggggcctgaatatgccatgctagtggcgcgcgaaagccttgccgagcactataaggaagtagaagcctttcaaaccgcgcgagcgaaatcggcgcgacgtctctccaaactcattgcagctgtcgcagctatcgcgattttgggaaatgttgctcaagcgttcgctatagccacaatggtgccgttgagcaggcttgtgcccgtatatctatggatacggccggacggcaccgttgacagcgaggtgtctgtctcgcgattgcctgcaactcaagaggaggccgtcgttaacgcctcattgtgggagtacgttcgcctgcgcgagagttatgatgccgacaccgctcagtacgcctacgacctggtatcgaacttcagtgccccaacagtgcgccaggattaccagcaattcttcaactatcccaatcccagttcgcctcaagtcattcttggcaaacgcggcagggtggaggtcgagcacatcgcttcaaatgatgtaactccaagcacgcagcaaattcgctataaaaggaccctcgtcgttgacggcaaaatgcctgtggtgagtacgtggaccgcgacagttcgctacgaaaaggtgaccagcttgcccggcagattgagactaaccaacccggcaggtctggttgtcacctcctatcagacatcggaagataccgtttcaaacgtaggccacagcgaaccatgatcagaaaagcacttttcattttagcatgtttatttgccgctgcgactggtgcggaggctgaagacactccaatggcgggcaagctagatccgcgcatgcgttatttggcttacaatcccgatcaagtggtgcgcctctcgacggcggttggagctactttggtcgtaacattcgccacgaacgaaacggtgacagcggttgccgtttcaaatagcaaagatctagcagccctaccgcggggaaattatctatttttcaaggcaagccaggtcctcacgcctcagccagtaatcgtgctaaccgcaagcgactccgggatgcgccgttatgttttcagtataagttccaagactctgtcccacctcgataaagagcagcccgatctctattacagcgtccaattcgcctaccccgccgacgatgcggcggctcggcgaagggaggcacaacagaaggctgttgtggacagactacacgcggaagcacaatatcaacggaaagctgagaatttattggatcagcctgtcacagcccttggtgcggcggacagtaattggcactacgtcgcccaaggcgatcgttcgctgttgccactcgaagtcttcgacaatggatttacgacggtattccactttccgggcaatgtacgcataccctccatctacaccatcaatcctgatggcaaggaagctgttgccaactattcagttaaagggagcgatgtcgagatttcttcggtttcccgaggttggcgtctgagggatggccacacagtactatgtatctggaacaccgcttacgatcccgttggccaaaggccgcaaacgggcacggtgaggcccgatgtgaaacgcgtcctgaagggggcgaagggatgaataacgatagtcagcaagcggcacatgaggttgatgcatctggatccctggtctccgacaaacatcgccggcgtctttcggggtctcagaaattgatcgtcggaggtgtcgttctcgcgttatcattaagcctcatttggctaggtgggcgccaaaagaaggtgaatgagaacgcatcgccgtcaactttgatcgcaacaaacaccaagccatttcatccagctccgattgaggtgccgccggatcctccagcggttcaagaggctgttcagcctgctgctcctctaccgccgaggggcgaaccggagcggcatgagccacggccggaagaaacaccgatttttgcatatagcagcggcgatcaaggggtcagcaaacgcgccattcagggcgacacgggccgaagacaagaaggcaagcgtgacgacaactccttgccgaatggcgaagtgtccggcgagaacgatttgtcgatacgtatgaaacccaccgagctgcagcccagcagcgccacgctcttgccgcaccccgattttatggtaacgcaagggacaataattccgtgcatcttgcaaaccgcaatcgacacaaatttggcaggctatgtaaagtgtgtcttgcctcaggatattcgtggaacaacgaacaatatcgtgcttcttgatcgtggcaccaccgttgttggcgaaatacagcgtggcttgcaacagggagatgggcgcgtttttgtgttgtgggatcgcgccgagacacctgaccatgcgatgatctcgttaacatcgccaagcgcggacgaactcggtcgctcaggattgccgggctcggtcgacagccacttctggcagcgttttagcggagctatgctcttgagtgttgttcaaggcgccttccaggcagctagcacctacgccggcagctcgggtggcgggatgagcttcaacagctttcaaaataacggtgagcagacaactgagacagcccttaaggcaaccatcaacataccgccaaccctgaagaagaatcagggtgacaccgtttccattttcgtagcacgggacctcgatttctttggtgtttaccagctccgcctgactggcggcgccacgcgggggaggaaccgccgctcttaatgaattcaaatttccgcttagagataggatacattgtaaatggaagtggatccgcaactacgctttcttctgaagccgattttggaatggctcgatgacccgaagactgaagaaattgcgatcaatcgacctggagaggcatttgtgcgccaagccggcatttttaccaagatgcctttgcccgtctcttatgatgatcttgaagatatcgctattttagcgggcgcgctgagaaagcaggatgtcggaccacgtaaccccctctgcgccactgaacttcctggtggtgaacgactacaaatctgtctgccgccgaccgttccctcgggcaccgtcagcttgaccattcgacggccaagctcgcgtgtttctggtcttaaagaagtctcctcccgttatgatgcttcgaggtggaaccagtggcagacacgaaggaaacgccaaaatcaggatgatgaagctatccttcagcattttgacaacggggatttggaagcgtttctgcacgcatgcgtcgtcagccgactgacgatgttgctatgtggccctaccggaagcggcaagacaacaatgagcaagaccttgatcagcgccatccccccccaggaaaggctaatcaccatagaagatacgctcgaactcgtcattccacacgataatcatgttagactactctactccaagaacggtgctgggctgggtgctgtgagcgccgagcacttgctccaagcaagtctgcgtatgcggccggaccggatattgcttggcgagatgcgcgacgatgcagcatgggcttatctgagtgaagtcgtctcgggacatccgggatcgatttcaacaatacacggcgcgaatccaatccaaggattcaagaaactgttttcccttgtcaaaagtagcgcccaaggtgctagcttggaagatcgcacactgattgacatgctctctacggcgatcgatgtcatcattccattccgtgcctatgaggacgtttatgaagtaggcgagatctggctcgcggcggacgcacgacgccggggcgagaccataggcgatctccttaatcaatagtagctgtaacctcgaagcgtttcacttgtaacaacgattgagaacttttgtcataaaattgaaatacttggttcgcattttcgtcatccgcggtcagccgcaattctgacgaactgcccatttagctggagatgattgtacatccttcacgtgaaaatttctcaagcgctgtgaacaagggttcagattttagattgagaggtgagccgttgaaacacgttcttcttatcgatgacgatgtcgctatgcggcatcttattatcgaataccttacgatccacgccttcaaagtgaccgcggtagccgacagcacccagttcactagagtactctcttccgcgacggtcgatgtcgtggttgttgatctaaatttaggtcgtgaagatgggcttgagatcgttcgaaatctggcggcaaagtctgatattccaatcataattatcagtggcgaccgccttgaggagacggataaagttgttgcactcgagctaggagcaagtgattttatcgctaagccgtttagtacgagagagtttcttgcacgcattcgggttgccttgcgcgtgcgccccaacgttgtccgctccaaagaccgacggtctttttgttttactgactggacacttaatctcaggcaacgtcgcttgatgtccgaagctggcggtgaggtgaaacttacggcaggtgagttcaatcttctcctcgcgtttttagagaaaccccgcgacgttctatcgcgcgagcaacttctcattgccagtcgagtacgcgacgaggaggtttacgacaggagtatagatgttctcattttgcggctgcgccgcaaacttgaggcggatccgtcaagccctcaactgataaaaacagcaagaggtgccggttatttctttgacgcggacgtgcaggtttcgcacggggggacgatggcagcctgagccaattgcatttgattaatttaggtgactgaggacgcggccagcggcctcaaacctacactcaatatttggtgaggggttccgataggtccctcttcaccaattgctcgatggcttctctccagcaaagaatgacgcgagcgcggcggtagccagcttgtggccgaaagctcgagcggtctccaaccccaacggatcaaaatgacttcgagcgacctcgagcaacgcaaccgggaacatgcgtgaggtctgaacgagaacggatttttctgtagttgaagggatcggataacttttcggggccacgcgaaatgatccatctgccagcatgctttcgaaatcgtccaacgcgcgccttaaaatcatttgtagcgacttcgagggactgtattgccgaacgaggttgtcatatgttttcgacacttgaggcgcgggcggtcgcgctgaaagaaaaacctggagctttttcggggacggaggtggactaagggcatccacagttagcttaagttgtcgatcgggactgtaaatgtgatcggcgacgagaggctcacgttgctggtctttctcgtcggctttttcaggcaagtgctggaggtccagcttctggggaacaagtgtcgggttgggatggtggatctcgggtcgagcaccagcaagccgccgtgcttcgccgaccgacaatgcgggcttgcgaattgccatcttcaagcctccaagattttgctgatcagtttcgaaatgaccacgacttcctccatcgcaatccgaagattcctctctatgaggcgcatcgtcggatcagttcccgtgtttagtaatgtaagatgcaacatgccgcgttctttcatcgcggcaaatgcatctctttcatgcatgggagacggtacaactggaaggctctctagcgtctctgacatcctgcgttgcgatgttgtcaatcggccgaccgggacgcgttggcgcaaaacagctgtaggaattgccaaattttcactcaacagcagctcgatgacgtagcggtaggtagatagtgcctcatcgatgtcgagcggcgttagcatggtggggatcagaagcaggtttgagctagcgatgattgtgttgttgagctcgctcgagccgccacgcgtatcggccaacgcataatcaaatccttcgagctcggcattttcataggctgcttcaagaaggggcatttcgtcggcggaatagacttcacagcgaggatcccaggtactgctttgtaaggcgttttctctccatcgcgtcagaggccggttttcgtcggcatcaaagagggccactcgtttaccgtcatttgccaaagcagcgcaaaggcccatgagtgcggtggttttgccagcaccccctttgaaagaacaaaacgtcaaaagttgcatattctgatcccgcctatcctgtgaaaccggagtgcatttgtatttttgttcgtataaatgtttttgtgattatcgatgagtaaaagcgttgttacactatttttatttcacattcgttataagacaattgcaaatgtagcaagtatattcagtattgactgtaaatgtactgttgatttcatattgagcagggctagacttccatccgtctacccgggcacatttcgtgctggagtatccagaccttccgctttctttggaggaagctatgtcaaaacacaccagagccacgtcgagtgagactaccatcaaccagcatcgatccctgaaagttgaagggttcaaggtcgtgagtgcccgtctgcgatcggccgagtatgaaaccttttcctatcaagcgcgcctgctgggactttcggatagtatggcaattcgcgttgcggtgcgccgcatcgggggctttctcgaaatagatgcagacacacgagaaaagatggaagccatacttcagtccatcggaatactctcaagcaatgtatccatgcttctatctgcctacgccgaagaccctcgatcggatctggaggctgtgcgagatgaacgtattgcttttggcgaggctttcgccgccctcgatggactactgcgctccattttgtccgtatcccggcgacggatcgacggtcgctcgttactgaaaggtgccttgtagcacttgaccacgcacctgacgggagaaaattggatgcccgatcgcgctcaagtaatcattcgcattgtgccaggaggtggaaccaagacccttcagcagataatcaatcagctggagtacctgtcccgaaagggaaagctggaactgcagcgttcagcccggcatctcgatattcccgttccgccggatcaaatccgtgagcttgcccaaagctgggttacggaggccgggatttatgacgaaagtcagtcagacgatgacaggcaacaagacttaacaacacacattattgtaagcttccccgcaggtaccgaccaaaccgcagcttatgaagcaagccgggaatgggcagccgagatgtttgggtcaggatacgggggtggccgctataactatctgacagcctaccacgtcgaccgcgatcatccacatttacatgtcgtggtcaatcgtcgggaacttctggggcaggggtggctgaaaatatccaggcgccatccccagctgaattatgacggcttacggaaaaagatggcagagatttcacttcgtcacggcatagtcctggatgcgacttcgcgagcagaaaggggaatagcagagcgaccaatcacatatgctgaatatcgacgccttgagcggatgcaggctcaaaagattcaattcgaagatacagattttgatgagacctcgcctgaggaagatcgtcgggacctcagtcaatcgttcgatccatttcgatcggacgcatctgccggcgaaccggaccgtgcaacccgacatgacaaacaaccgcttgaaccgcacgcccgtttccaggagcccgccggctccagcatcaaagccgacgcacggatccgcgtaccattggagagcgagcggggtgcccaaccatccgcgtccaaaatccctgtaactgggcatttcgggattgagacttcgtatgtcgctgaagccagcgtgcccaaacaaagcggcaattccgatacttctcgcccggtgactgacgttgccatgcacacagtcgagcgccagcagcgatcaaaacgacgtcatgacgaggaggcaggtccgagcggagcaaaccgtaaaagattgaaggccgcgcaagttgattccgaggcaaatgtcggtgagcccgacggtcgcgatgacagcaacaaggcggctgatccggtgtctgcttccatccgtaccgagcaaccggaagcttctccaacgtgtccgcgtgaccgtcacgatggagaattgggagaacgcaaacgtgcaagaggtaatcgtcgcgacgatgggcgcggggggacctagactagtgtacctcgcgaatgcatctagatccaatccaatatgcatggcatgccgaatccatgtgggagtttattcttgacacagatatttatgatataataactgagtaagcttaacataaggaggaaaaacat

SEQ ID NO: 238 - DNA, 45770 bp, Artificial Sequence
  RV005393
atggatggtactttggagatatgagcacttgccagacttcccggtcggagacttaaaaattccgataagaggttacggacgacggaccttataagtggatcgtctagtggtggcgccgatcaaaacagttccgcccccggctttgctcaaagtagcaaagcagctttatctcgggttgcggaggattttctagaaaaccgcaattttgcaggagagaacatatggccatcatcaagccgcatgtgaacaaaaataggacaacctcgccgatagagagaccggagtctctcatagaggaaatgagcggcagtcatccgccgagtggttttaccaacctggatctcgctatgatcgagctggaggactttgtccatcggtgcccgctcccagaagacaatcttgctggtcagaaggagtgagacgatggatccgtctagcaatgagaatgtctatgtgggtcgcggtcacaacatcgaaaatgatgatgacactgaccccaggcgttggaagaaggcgaatatcagttccaacaccatctccgatattcagatgacgaatggcgaagacgtacaatcagggagccctacccgaacggaagttgtaagcccacgtctggattatggatcggtcgactcctcctccagcctttattctggcagcgagcacggaaatcaagctgagattcaaaaagagctgtccgtcttgttctcgaacatgtctttgccaggcaacgatcggcgcccggacgaatacattctcgtgcatcaaacgggacaagatgcttttactggtattgccaaaggcaacctcgaccaaatgcccaccaaggcggaatttaacgcgtgctgccgtctctacagggacggagccggtaattactacccgccacctctcgcattcgacaagattagcgttccagagcaactggaggaaaaatgggggatgatggaggcgaaggaacgtaacaaactgcggtttcagtacaagttggacgtatggaatcatgcgcacgctgatatggggatcacgggcacagagatcttttatcaaacagataagaacataaagctcgaccggaattataaactaagacctgaagaccgatacgtacaaacagaaaaatacgggcgccgggaaattcaaaagcgatatcaacacgaactccaggctggttcgctgctgcccgatattatgatcaaaactccccaaaatgacatccacttcgtgtacaggtttgccggcgacaattacgccaacaaacagttcagcgagtttgaacacaccgtcaagcgcaggtatggcgacgagactgagatcaaattgaagtcaaagtcaggcattatgcatgactcgaaatatctggaatcctgggaacggggcagtgcggatattcgcttcgcggaattcgttggggaaaatagagctcacaatcggcagtttccaactgcgacagtaaatatgggacagcagccagacgggcagggcggtttgacccgcgaccgtcatgtgagcgttgacttcctaatgcaaagcgcacccaattcgccttgggcgcaagctttgaaaaagggagaactgtgggatcgcgttcagttgcttgctcgcgacggcaaccgctatctgtcgccgcccagattggaatattctgaccctgcacatttcaccgagttgatgaaccgggttggtttacccgcatcgatgggtcggcaaagccatgcggctagtatcaaattcgaaaagtttgacgcgcaggcagcggttattgtcttaaatggcccagagttacgtgacattcatgacttgtctcctgaaaaactgcaaaatttgtccaccaaagatgtcatcgtcgccgatcgcaatgagaatggtcagagaactggcacgtacaccagcgtcgcggaatatgagcgcttgcagttaaggctgccacccgatgcagcgggggtgcttggtgaagcaactgacaaatattcacgtgatttcgttcggccagagccggcgtcgcgtccaatcagtgacagccgcaggatatacgaaagtcgaccgcgtagccaaagcgtcaacagcttttgacgttcctgctgccgcgtcaacgaggaagctcgtttgacccgggtttgccaatgaaagggctcaatcatggtgaacactacaaagaaaagttttgcgaagtcgcttacggcagatatgcgccgttctgctcagcgcgttgtcgagcaaatgcgaaaagcattgattaccgaagaagaggcgctcaagcggcaagccagactggagagtcccgataggaagcgaaagtatgctgctgatatggcgatagtcgacaaactcgacgtagggtttcgaggcgaaataggctataaaattcttggaaataaccggcttcgagtagacaaccataaagaattaacgcgtgagcacggtagacttcgcaaaaccaaaacggttctgaagcgtaacccggtgacgcaggaagtctatttgggtttatatgaaaggaagtcctggttaagtgtcagcagccatttgtatgctgcggacggcacactccgcatgaagcacgtgaaatacaaagacggacgttttgaggaaaaatgggagcgcgacgaaaatggcgacctgatccgcacaaggtacgccaaccgtggcaggctctttcaacctgtatccgagaaaatgggcgcgccgtatcggagcggccctgacgaccggctctatcgcgatctaacccgtcgaaacggtttcagacgggagacattcgaacgggacgatcacggaaacctcgagcgtatcggcagcaaccatgtcggcttttccaagatttcagtgaaggcacccaatcgtcaaacctcccagacgaagattcaaaaacttggtggcgctttcaacaaatcttttaggtcccttctggacaaggagggcaatgaaatgggccgcgatattttgagccatcgacggctctataacaagcggtctgctgtctacgatgaagctaccggacaattgaagagtgccaagcataccttcggcaagatctacaggagcgaaaccgaatatctcagcgcgggcctcaagaaggtttcaaaaaagatactcggggtgacggtctaccggaaatttgcggcgctcagcgagcgagaatccgaggctgagagactgcgtagttttgaatccggtgcgcatcgccagatctggcaggagcgggcagcgattcccggttcgcccctcccggagactgatgacattcatttcgcacagcagtcgcacctagccaaagccaaccctgatcacgtcgaagctgacgtcacgcgtgtgacagatcaacatgttgatgttgctggacaaacatcatcgtctccccaacggaacttggaaggatggttagattctcaatcacgatacaagccagcaaacatgctgttgtcaaatccagaccttcaagcgaacggacctcgcccatacgaagggttagctcatctcaccctccggcgcgataatgaatctgacgggcacaaggagaatgatcagcggctgcgacatttctcccagccagagccgttggtgttaccgcatcccgggtcgccggaaataactaaggtgtttggctcgcggggagagccggcacacccgagtggaaatctgcacacggcggttggagaaacggcttgcgaaggaccggtgatgtcttcatcctcggacaatcatcagccagctccaggacagcaagaacttttaagtttccttcataatgcgccagccccagtttctgtggcaatacatgatgatcaagagcgacttgcgggggaggcgcccggcggctctttcagaggtagctcagggcgaacgagttcaatgtcggagagtatcttcgacgaagatgtacaagggcatttggtacgggattattcgatcaatactactaacgggtttattgacccgcaatcgttgttcggtgaaccggacttatcgagaggtccaaaatcggggccagaaattccatcggaagattaccatttgtcagcttcggaacaggaaaatttgctgaatcaattgcttagtgtgccactgccggttccttcaccgaagcccgaatgcgcgaggtctatgattttcgaaggttcacgttcaagagagcgttccacctccagagggttctaaggtggaacgcgtctaggcttgcctatcatcaccacctcatgatggtcgcggagaccttcgaagagatatccgacatcattggagaagctgggccggaaactagtgtacctcgcgaatgcatctagatccaatccaatatgcatggcatgccgaatccatgtgggagtttattcttgacacagatatttatgatataataactgagtaagcttaacataaggaggaaaaacatatgttacgcagcagcaacgatgttacgcagcagggcagtcgccctaaaacaaagttaggtggctcaagtatgggcatcattcgcacatgtaggctcggccctgaccaagtcaaatccatgcgggctgctcttgatcttttcggtcgtgagttcggagacgtagccacctactcccaacatcagccggactccgattacctcgggaacttgctccgtagtaagacattcatcgcgcttgctgccttcgaccaagaagcggttgttggcgctctcgcggcttacgttctgcccaagtttgagcagccgcgtagtgagatctatatctatgatctcgcagtctccggcgagcaccggaggcagggcattgccaccgcgctcatcaatctcctcaagcatgaggccaacgcgcttggtgcttatgtgatctacgtgcaagcagattacggtgacgatcccgcagtggctctctatacaaagttgggcatacgggaagaagtgatgcactttgatatcgacccaagtaccgccacctaataatgtctaacaattcgttcaagccgacgccgcttcgcggcgcggcttaactcaagcgttagatgcactatacgtaccaatccaaatcggatccccctgcatattttcctcctcgagttggatgaactcgccgagttcatcgtcaactgaaacagacacggccggattctgtgagacaggttgaaccgcagctctcttccattgataataggtctgaacggaaatacccacgatcttaacggcgtccttcaaggttgcgccgccagcgacctgagcttcgatttgaccgatcttctccagtttttctcggttgctgaggccgcgggttttcggcttcacggatttgaacgatcccgtgcgggctgtttcggctggtgctttctttgctcttctacctctaggagcagccggctcaacttcggcagcagcagtaccgtccggcggattctggatctcttcgtcagccattaatcgtcctctgtgtgggttattgctttgtctgccagctcgatccaagagtcaacgtttgtgcctagagtcgagcaagacgtttcccgttgaatatggctcataacaccccttgtattactgtttatgtaagcagacagttttattgttcatgatgatatatttttatcttgtgcaatgtaacatcagagattttgagacacaacgtggctttgttgaataaatcgaacttttgctgagttgaaggatcagatcacgcatcttcccgacaacgcagaccgttccgtggcaaagcaaaagttcaaaatcaccaactggtccacctacaacaaagctctcatctagcgtggactcaaggctctcgcgaatggctcgcgttggaaactttcattgacacttgaggggcaccgcagggaaattctcgtccttgcgagaaccggctatgtcgtgctgcgcatcgagcctgcgcccttggcttgtctcgcccctctccgcgtcgctacggggcttccagcgcctttccgacgctcaccgggctggttgccctcgccgctgggctggcggccgtctatggccctgcaaacgcgccagaaacgccgtcgaagccgtgtgcgagacaccgcggccgccggcgttgtggatacctcgcggaaaacttggccctcactgacagatgaggggcggacgttgacacttgaggggccgactcacccggcgcggcgttgacagatgaggggcaggctcgatttcggccggcgacgtggagctggccagcctcgcaaatcggcgaaaacgcctgattttacgcgagtttcccacagatgatgtggacaagcctggggataagtgccctgcggtattgacacttgaggggcgcgactactgacagatgaggggcgcgatccttgacacttgaggggcagagtgctgacagatgaggggcgcacctattgacatttgaggggctgtccacaggcagaaaatccagcatttgcaagggtttccgcccgtttttcggccaccgctaacctgtcttttaacctgcttttaaaccaatatttataaaccttgtttttaaccagggctgcgccctgtgcgcgtgaccgcgcacgccgaaggggggtgcccccccttctcgaaccctcccggcccgctaacgcgggcctcccatccccccaggggctgcgcccctcggccgcgaacggcctcaccccaaaaatggcagcgctggcagtccttgccattgccgggatcggggcagtaacgggatgggcgatcagcccgagcgcgacgcccggaagcattgacgtgccgcaggtgctggcatcgacattcagcgaccaggtgccgggcagtgagggcggcggcctgggtggcggcctgcccttcacttcggccgtcggggcattcacggacttcatggcggggccggcaatttttaccttgggcattcttggcatagtggtcgcgggtgccgtgctcgtgttcaattcagcgggttcgtgcgatccgtctgcatgatggtgatagccgtcagcatgattttcgtgtcgtcgaacttggtgaagggcattctcggcggcgatcacgacgccggccctgcggagccttcgccgcgtgcgcgattcatggcggccgtggaggccaaggatttcgcgcgagtgcaagagctgatcgaggcgcgtggagccaagtcggcggctgattatgtccttgcgcagctcgccgtggccgaaggtctggaccgcaagcctggtgcgcgcgtcgtggtcgggaaagcggcgggcagcatggcaatgccgcctgcggcgctgggttttacgccaaggggagaagcggcatacgccatcgagcggtcagcctatggtgagccgaggtccagcattgcgaagcagtaccagcaggaatggaaccggaaggcggcgacctggtgggcgatggccggtgtggccggcatcatcggcgcgatcctggcggcggcggcaaccggctttgttgggctggcagtgtcgatccgcaaccgagtgaagcgcgtgcgcgacctgttggtgatggagccgggtgcagagccataagcggcaagagacgaaagcccggtttccgggcttttgttttgttacgccaaggacgagttttagcggctaaaggtgttgacgtgcgagaaatgtttagctaaacttctctcatgtgctggcggctgtcaccgctatgttcaaccaaggcgcggagcaaattatgggtgttatccatgaagaaacggcttaccgaaagccagttccaggaggcgatccaggggctggaagtggggcagcagaccatcgagatagcgcggggcgtcttagtcgatgggaagccacaggcgacgttcgcaacgtcgctgggactgaccaggggcgcagtgtcgcaagcggtgcatcgcgtgtgggccgcgttcgaggacaagaacttgcccgaggggtacgcgcgggtaacggcggttctgccggaacatcaggcgtacatcgtccggaagtgggaagcggacgccaagaaaaaacaggaaaccaaacgatgaaaactttggtcacggccaaccagaaaggcggcgtcggcaagacttcgacccttgtgcatcttgccttcgactttttcgagcgcggcttgcgggttgccgtgatcgacctggacccccagggcaatgcgtcctacacgctcaaggactttgctaccggcctgcatgcaagcaagctgttcggcgctgtccctgccggcggctggaccgaaaccgcacccgcagccggcgacggccaggccgcgcgcctcgccctcatcgagtccaacccggtactggcgaacgccgaacggctgtcgctggacgacgcccgcgagctgttcggggcgaacatcaaggccctggcgaaccaaggcttcgacgtgtgcctgatcgacacggccccgacccttggcgtcggcctggcggccgccctcttcgcggccgactatgtgctgtcccccatcgagcttgaggcgtacagcatccagggcatcaagaagatggtcacgaccattgcgaacgtgcgccagaagaacgccaagctgcaattccttggcatggtgcccagcaaggtcgatgcgcggaatccgcgccacgcgcgccaccaagccgagctgctggccgcgtaccccaagatgatgattccggccaccgttggcctgcgcagcagcatcgccgatgccctcgcatccggtgtgccggtctggaagatcaagaaaacggccgcgcgcaaggcatcgaaagaggttcgcgccctggctgattacgtgttcacgaagatggagatttcccaatgactgcggctcaagccaagaccaccaagaaaaacaccgctgcggccgctcaggaagccgcaggcgcggcgcagccgtccggcctggggttggatagcatcggcgacctgtcgagcctcctggacgctcctgcggcgtctcagggcggttccggccctatcgagctggacctggacctgatcgacgaagatccgcatcagccgcggacggccgacaaccccggcttttccccggagagcatcgcggaaatcggtgccacgatcaaagagcgcggggtgaagtcacccatttcggtgcgcgagaaccaggagcagccgggccgctatatcatcaatcacggcgcccgccgctaccgtggctcgaagtgggccggcaagaagtccatcccggcgttcatcgacaacgactacaacgaagccgaccaggttatcgagaacctgcaacgcaacgagctgaccccgcgcgaaattgccgacttcattggccgcgagctggcgaagggcaagaagaaaggcgatatcgccaaggaaatcggcaagtcgccggcgttcatcacccagcacgtcacgctgctggacctgccggagaagatcgccgatgcgttcaacaccggccgcgtgcgcgacgtgaccgtggtgaacgagctggtgacggccttcaagaagcgcccggaggaagtcgaggcgtggcttgacgacgacacccaggaaatcacgcgcggcacggtcaagctgctgcgcgagttcctggacgagaagggccgcgatcccaacaccgtcgatgccttcaacggccagactgatgccgagcgtgacgcggaggccggcgacggccaggacggcgaggacggcgaccaggacggtaaggacgccaaggaaaagggcgcgaaggagccggacccggacaagctgaaaaaggccatcgtccaggtcgagcacgacgagcgccctgcccgccttatcctcaaccgtcggccgccggcggaaggctatgcctggttgaagtacgaggacgacggccaggagttcgaggcgaaccttgccgacgtgaaactggtcgcgctcatcgagggctgatccccaaagacagcggcgcgggccacccgcgccgcacagacaacggttccgctacaaggaggaccgaagaatgaatccgatgctgttctacatcgcgggaggcgtaggcgcggcgttgctgctggtttccgcgatcatgctgttcaagctgcgcgagccgaagaaggaacaccgaccgcagcgcaaggcggcggccccgacgccgcagccggtcgataacgagctgctgcgcacctttcgccggccgtcgcaggccagccaacccgagccatccacgacgccgccggcgcggcgcactgccccgccgagcagcgaacaatccagagggaatgacggcgatttcgtcacgtcggccctggtggccggggcgaccaacagcaccatgctgggctacctggccggcggctcgctgaccggggccatgctgggcgatgcgctgcggccggatacgccgtctgcggcgttcgcggacccctcgccgtgcttcggcagcagcgacacggacagcggctggaccgataccggcagctcttgcgatttcagttcgtccgacaccgatacgaacaactggtgagggcggaccatgactgacgaacaaaagaaacggctcctgatgttgcaagctatccggcgcagcatccaggcaatgcgcaggggtgtttcggggccggatagtttcaagggctggttgaccggcatcggcatcatcgcggcggggttcctggttggcgagctgctgccatcccctgcccccggcgtcggcctggttgtgccaggggcctgcattgccggcttcgtcgtcggctgctggctcaacaggaaaggccgctcatggccgacagccatttacgaccaattggcccgttaccagccgctcaacgagcgggcgtaccgcgacctgcaagagacggtgaaggaacgcggcctcgactgcgatgcggtcatggagtggacctacatcgagcaggccgagttcatgcccctggtgcccaccagggaggacctagcgcgcgacaagttcctgaccgcgacgcgggccgatagggccgaggacgatgcgcgtgcgcgcttcgtcgtgctccatcccaagaagcgcggccccgacgcatgaagaagcccgacgcccgctaatccccttcccgctgaccctttgcccccgccgaccgtgcggggctttttttgcctgcccttcagccgctaaaaaacctgccgttaagtcgagaactgttcagctaaactcttgcgctgataaggtaggtaagagtattattattcttaccaattaccggagccaacatggaactgaacaaagagacgcgcgaccgcatttttgcggctgcggacgagctgttcgagcaaggcgaccgggagaacttcccgaccgtggatgcagtgcgtaaggccgcccgcgtcaacatgaacgacgccagcgccggcatgcgcgaatggcgacgccagcgcacggcgcaggccgccccgctggcagtccaggtgccggacgcggtgcagcaggccggcaaccaggccgtggccgccctctggcaagccgcccaggcccttgccaatgaatcgttgcaggcagcgcaagccggctgggatcgtgagcgcaacgagttggaagccgtgcgcggggagctggccgacgccttcgaggcgcaggcccgcgagctggaagaagcccaggcgcgcgttacattgctagagcagcaggccgccgaggcggccgagctggccgcacgccagcggcaagccctggccgaagcacgcaccgccctggcaggagccgagcagcgggccgcgctggcgacgcagcgggccgacgaggtggagcgtcgagcgcaggagctgcgcgccgagctggactacgctcaccaggacgcccgcgcattcaaagaagagagccgcaagaccctggacgcggccaaccaggaaatgcaggcgcttcgcggcgagcgcgacgccaccaggcgcgaagcggagagtttgcgcacggagttggcagcggtgaaagcgaaggcgcaggccgacgccgaggcccaccaggagcaaaggaagttggcggcgcaagaggcggccaggcaggccgagcgctttacgacggtgcaagccgagcgtgacgaagcgcggcaagaggcaaaggcagcccaagaagaggccgctatgttgaggggtcggctagacgcggaaacgagtgggaggaaacacaaagcgggaggaaagtaactgataaatcgaacgcagttcactaaaatagatggaacaaccttgacgcgcccggctctagggaaagccggcctcgaactgccgaggtcggcttttttttagccggcaagcgaccaggacacgtttaacaccagaggcaaccgtcaggagtcacccaatgaaacaccgcctcctggtcatgaatgggcaaagaattgtccagaccgagaaccaaggcgcatggacgaaccagaaggtagataaagccggggccctgaaacctggcatttacaacatctatatggcccaaaaggccgataagtcgcagcgccacgacggcagcatcgtccacgcagatagcggcagcatttaccaacaggtggggaagaactttgtaatgcacgcccggtcagatttcgataaagtacctgaaatcgggagtgcgaaaagcatcacctatgacgcaagtggcaaggcacaggtaagtgccgaaagcgtcaagttgagtcgcgggcgcactcgttagagttttagcggctaaaaagggaggcgtcttgagcagctacagcagagccgagcgcgcaccgtggggagacttcccgaaggtggttcgcaacggcgaccttggttctttgaccaacgagcctgaataccaggctgcgaagcagggcgacgcggaagcggcgcttaatttggtcgagcgcctgatttcggacgacactgttgcccagctcaagacgctgatcggcgacgacaagccccgcatcgttccagtcctcgccgtcgaggcggcggggaacaacaagattccggccatgatggcggtcgttctggccgaccgccttggccttgaggtcgaaacggacattgtgcagcgggagaaggtcgcccgaaccggagccggttcagatcatcgcctggcgttcaacccgactttcgagggggaggtgatccccggccagaagtacatcgttgtcgatgacacgctgacgatgggcggcaccattgcctcattacgcggctacatcgagaacaacggcggcaaggtcatggcggcgtccgtcatgaccgcccatgaaggcgcgcttgacctggcggtcaagccgaagatgcttgcgggcatcaatgagaaacacggtccagcaatggacgcattttggaaggaaacctttggctatggcatcgaccgactcacccaaggagaagccggacacctccgcgctgccccgtccgttgacgcaatccgagatcgcatcgctgcggctcgaaatgaagcagtcaatcgagtgggggcaagccgaactgcgacgacggcgcgagcagggcaacagcagtccccggcagtaaagcagtccagcggcaacagcggcgaggatttgctacaggcggcccaggaggccgagacggaacagcaggccctcttagaatccgcgcccatcgagcagacctaccagcagacccttgcgctctacgtgcaggcaaagcatgaccaggtggagcgcatcgaggaccgcctagaacagctcgtagaccgtcagcaggcgcgtttgcagcagctacagtccaatgcccccggcttgctgtccctgccgcgtacaaaggccgcctggcagcagcagcaggcccaacagcaagcccgcttgcagaccctgcacacgcggctggacatggtgcgcgaaatcaaggaaggcatgggcattcacgcgcccaagatcgaggaactggcgacgcgcaagatgcgcgcggagcatcccgagctggccggcgactgggattcgatgcgtgaagcagcccgacggcaccaggccctgatgcgcaagcaggagcaggagaagaaacaggcccaggagcgcgagcgcgggcgcagtcagagcttgggcctgtcaaacaagcccagctaacgcaaaaacaaagcccggcaacgccgggctttttcatctgcgcctctgcgattcataacgaggcccacaccaccagggcggccgcgaacaacaccatgccgccggcgatcatgttcatcatcgccacgcgccgcgcgtccgcgaccttggccgcgagctggcggccaaggccgtcgtcgatttccctgcggatcgcttcggccgcctgcgcggcgctgtccttcattaccttcgccattgcgtccttgctggccgccagggccgcgttcagcatccgctccgctttggccttggcgtcctcgccccaacgatgggcgatcccttccagctcttccttgaacgcggcaaggatttcctcttgcttggccgcactgtcggccatgagccgggcgttgatggtatgcaggatcagcaccgggtcgtcgcggccgacggcgatgccgtgcttggccgcaatctcccggatcagctcttcaatctggtcgctcatagcacggccgccgcgtcgagctgttcaaacaggccgcgccgcacgatcttgaggcgttgccgcgtcatgatcgtgagcgattcatcggccagcgcctggtcgaacgtcagccgctcttgcagcatgtcgctgaaatcgcggccgtaggtttcttccttgagggccggaatctggatgatggacgacacgcgggccttgttggccgtgtacgccttcatctgctcaaagctcttgccctcatgctcgataggcccccaatacgggttcagccagaccacgaaaagcgcttcggccgggaactggctggcgagctgggcgaagccgctcaccgtgtccaggagagcctggccgccggtgacgacggtatggatgaccagctcatgccccatttcttgcagcagagccggcacctggttgctgatgaggtaatgcgacagaggcacgaacgagctggcaccgttgtcgatcaccacgtcatccttggtcggcgcaatcagctcgaccagggtgtcgaagttgcgcgagttaatttcgtcgccggccatgatgttcagccggcggacgttcagggccttgtagccctcgaacgtcgcgttcaccgggtcggtgtcgatgcacaagggtgtctgccccttgtccatcttgtactgcgcaatgatcgcggcgatggccgacttgccgaccccgcccttgccctgcaaaaccatgtgaattttcgccattacagtagatcctttttgtccggtgttgggttgaaggtgaagccggtcggggccgcagcgggggccggcttttcagccttgcccccctgcttcggccgccgtggctccggcgtcttgggtgccggcgcgggttccgcagccttggcctgcggtgcgggcacatcggcgggcttggccttgatgtgccgcctggcgtgcgagcggaacgtctcgtaggagaacttgaccttccccgtttcccgcatgtgctcccaaatggtgacgagcgcatagccggacgctaacgccgcctcgacatccgccctcaccgccaggaacgcaaccgcagcctcatcacgccggcgcttcttggccgcgcgggattcaacccactcggccagctcgtcggtgtagctctttggcatcgtctctcgcctgtcccctcagttcagtaatttcctgcatttgcctgtttccagtcggtagatattccacaaaacagcagggaagcagcgcttttccgctgcataaccctgcttcggggtcattatagcgattttttcggtatatccatcctttttcgcacgatatacaggattttgccaaagggttcgtgtagactttccttggtgtatccaacggcgtcagccgggcaggataggtgaagtaggcccacccgcgagcgggtgttccttcttcactgtcccttattcgcacctggcggtgctcaacgggaatcctgctctgcgaggctggccggctaccgccggcgtaacagatgagggcaagcggatggctgatgaaaccaagccaaccaggaagggcagcccacctatcaaggtgtactgccttccagacgaacgaagagcgattgaggaaaaggcggcggcggccggcatgagcctgtcggcctacctgctggccgtcggccagggctacaaaatcacgggcgtcgtggactatgagcacgtccgcgagctggcccgcatcaatggcgacctgggccgcctgggcggcctgctgaaactctggctcaccgacgacccgcgcacggcgcggttcggtgatgccacgatcctcgccctgctggcgaagatcgaagagaagcaggacgagcttggcaaggtcatgatgggcgtggtccgcccgagggcagagccatgacttttttagccgctaaaacggccggggggtgcgcgtgattgccaagcacgtccccatgcgctccatcaagaagagcgacttcgcggagctggtgaagtacatcaccgacgagcaaggcaagaccgagcgctcttcttcaatcgctgccgtcagacggtcagggaacgccgacaggccccgctccgcgtagttcggagcaggacgccgcacggcgtccacatggatcatccacccacttcccaggcccgcgagggcctggttgatgcgggcggacactacttcgcgctgctggtcggtgctgcttgcgttgtcatcgcccttgtacagccaggcagccataaagctgccgttcttgcccacgattacgccgtcatcgacgacagcggcgtagttgagcagatcggccaggccggcgtccttggaacgatgctttttcagtttcagttcggcatcgaccgcgcggatgcgggcaaagaggatgaacaacagaagcgcgccgaggcccgcgattgcaatcgcaattgcttggatcatcggtattgcttcccttggctattggtgttctcgcggaacggggtcgagcgggccgggtaatacggcttgtaccggcggtgacgcaggtacacgaaccgcatcttcggatcggccttcgccatgattcggaacgcatagagcgccccgaaccacaggatcagaccgaccacggtggcccgcagctcttgggcgctgaaaatcagcgcaaacgccatcaggcccgagaacatcaccagttcacgatcaccacccatgaacaggttttctcggttgcctgcgcgacggatggggatcgtgcgcagagccatgattaggcgagccgtccagccgctaccgcacgcacggcatccgccgccgcgacttgcacctggtgcagcgccccgttgccgagggccgcgatttcggcaccacgaccgaagaaggtgctcatcacgttctgcgcgccgaccagcagcgccatcaccagaaccaggaagatcagggttcggaagaaggcgttgagttcgccgccgaagatcagcacgccgccggcgacgacgatgccgatgatggacagcgcgaaggccaccgggccggttacggagttgcgcaggttcgtcagccagctctcatatggcaagctgccgccggtgccttccgaggccatcgccggatgcgcggataacgcgagagcgagaacgaagaacacggcaaggtagaacaaaatgccgcgattcatggtcagacggaacggaacagccgttgtcattggaaatactccttacagggttttggtgatgtactggccgttctcgtaaccaagaacttcgagaatttcttgcactcgacggccgctaggggtcctggcgatatggacgaccacatgaaccgcctcgccaatcagcggctcaatgggtttcggtgaatccgggtgcatgctgataagcatggcgagccggctcaggcccgctttggggttgtttgcgtgcagggtggcggcacctccttcatgcccggtgttccaggccatcaacagatcaagggcttcggggccacgtacctcaccgaccaggatgcggtcggggcgcatacgcagcgttgtcttgagcagcagcgtcatcgagacgtcgatgctggtgtggtattggacggcgttctctgcggcgcactggatttcgccggtgtcctcgatgatgacgacgcgctcagacgggttgaaggcgaccatttcattgatgatcgcgttgacgagcgtggtcttgcccgagccagtaccgccaatgacgaggatgtttcgatgcgccgcgacggcgcttttaatgacctcgtattgctcgcgggtcatgatgcccgcctcgacgtactgttccagcgtgaagatggcgaccgcgcgcttgcggatcgcaaaggttggcgcggccacgaccggcggcaattggccggcaaagcggctgccatccaaggggaactcgccttccaggatgggcgaatgccgcgtgacctctttgccgtggaatccggccaccgtttctataatcgcctgcgactggctgggccgcatgtcgcagatgtaccgcatcggctcgccaaggcgttcgtgccacaccttgccgtccgcgttgagcatgacttcaacggttttcgggtcgttgagcgcggccaacaggtccgcacccatgtcgcgttccagcttgcgcttggcccgctccttgatggtctgaaactcttctttcccgctcacttttcagtaacccctacgcaacaaatcattagcaacattatcgcacaggcaaacgatataccgaaagtgtttagcctgcaagacaaacagctaatcgaaccgcacgacgtaggggttctgatagaaaacaactgtcaaagcgcacccgcccgatgccattcgcggcacggcttccgttgaggatgtcgatatgatgcgcgagccgacggcccgcagagaaggggccgttttagcggctaaagaaggaagtgcaagccctaacccttggcgtcagagccttccacgcagcttttttcgggtgtcgtcgccccatttctttacgataaacgccttatgtgacggcaaaaccacactgatgcgttcgtatccgggcggcacgctgctcttgaaaggatgacccgcaatctccgcgagtgcctcgcggtcaaggtcggtggactccaggagaagaggtaggggagtttccagggcgtcggcaatggcctccatcaccttcaacgaggggttggccttaccgttggttaagtctgataaaaacgaaattgaaacccctgccctctccgacagctcatgtttcgtcatgccccgctcatcgagcagacgaaggatgttggtgaaaaatatctggttgtacacagcggaagccgcccctcgcacctttggtcgcggcccgcaaaattttagccgctaaagttcttgacagcggaaccaatgtttagctaaactagagtctcctttctcaaggagactttcgatatgagccataatcagttccagtttatcggtaatcttacccgtgacaccgaggtacgtcatggcaattctaacaagccgcaagcaattttcgatatagcggttaatgaagagtggcgcaacgatgccggcgacaagcaggagcgcaccgacttcttccgcatcaagtgttttggctctcaggccgaggcccacggcaagtatttgggcaaggggtcgctggtattcgtgcagggcaagattcggaataccaagtacgagaaggacggccagacggtctacgggaccgacttcattgccgataaggtggattatctggacaccaaggcaccaggcgggtcaaatcaggaataagggcacattgccccggcgtgagtcggggcaatcccgcaaggagggtgaatgaatcggacgtttgaccggaaggcatacaggcaagaactgatcgacgcggggttttccgccgaggatgccgaaaccatcgcaagccgcaccgtcatgcgtgcgccccgcgaaaccttccagtccgtcggctcgatggtccagcaagctacggccaagatcgagcgcgacagcgtgcaactggctccccctgccctgcccgcgccatcggccgccgtggagcgttcgcgtcgtctcgaacaggaggcggcaggtttggcgaagtcgatgaccatcgacacgcgaggaactatgacgaccaagaagcgaaaaaccgccggcgaggacctggcaaaacaggtcagcgaggccaagcaggccgcgttgctgaaacacacgaagcagcagatcaaggaaatgcagctttccttgttcgatattgcgccgtggccggacacgatgcgagcgatgccaaacgacacggcccgctctgccctgttcaccacgcgcaacaagaaaatcccgcgcgaggcgctgcaaaacaaggtcattttccacgtcaacaaggacgtgaagatcacctacaccggcgtcgagctgcgggccgacgatgacgaactggtgtggcagcaggtgttggagtacgcgaagcgcacccctatcggcgagccgatcaccttcacgttctacgagctttgccaggacctgggctggtcgatcaatggccggtattacacgaaggccgaggaatgcctgtcgcgcctacaggcgacggcgatgggcttcacgtccgaccgcgttgggcacctggaatcggtgtcgctgctgcaccgcttccgcgtcctggaccgtggcaagaaaacgtcccgttgccaggtcctgatcgacgaggaaatcgtcgtgctgtttgctggcgaccactacacgaaattcatatgggagaagtaccgcaagctgtcgccgacggcccgacggatgttcgactatttcagctcgcaccgggagccgtacccgctcaagctggaaaccttccgcctcatgtgcggatcggattccacccgcgtgaagaagtggcgcgagcaggtcggcgaagcctgcgaagagttgcgaggcagcggcctggtggaacacgcctgggtcaatgatgacctggtgcattgcaaacgctagggccttgtggggtcagttccggctgggggttcagcagccagcgctttactggcatttcaggaacaagcgggcactgctcgacgcacttgcttcgctcagtatcgctcgggacgcacggcgcgctctacgaactgccgataaacagaggattaaaattgacaattgtgattaaggctcagattcgacggcttggagcggccgacgtgcaggatttccgcgagatccgattgtcggccctgaagaaagctccagagatgttcgggtccgtttacgagcacgaggagaaaaagcccatggaggcgttcgctgaacggttgcgagatgccgtggcattcggcgcctacatcgacggcgagatcattgggctgtcggtcttcaaacaggaggacggccccaaggacgctcacaaggcgcatctgtccggcgttttcgtggagcccgaacagcgaggccgaggggtcgccggtatgctgctgcgggcgttgccggcgggtttattgctcgtgatgatcgtccgacagattccaacgggaatctggtggatgcgcatcttcatcctcggcgcacttaatatttcgctattctggagcttgttgtttatttcggtctaccgcctgccgggcggggtcgcggcgacggtaggcgctgtgcagccgctgatggtcgtgttcatctctgccgctctgctaggtagcccgatacgattgatggcggtcctgggggctatttgcggaactgcgggcgtggcgctgttggtgttgacaccaaacgcagcgctagatcctgtcggcgtcgcagcgggcctggcgggggcggtttccatggcgttcggaaccgtgctgacccgcaagtggcaacctcccgtgcctctgctcacctttaccgcctggcaactggcggccggaggacttctgctcgttccagtagctttagtgtttgatccgccaatcccgatgcctacaggaaccaatgttctcggcctggcgtggctcggcctgatcggagcgggtttaacctacttcctttggttccgggggatctcgcgactcgaacctacagttgtttccttactgggctttctcagcccggggaccgccgtgttgctaggatggttgttcttggatcagacgctgagtgcgcttcaaatcatcggcgtcctgctcgtgatcgggagtatctggctgggccaacgttccaaccgcactcctagattgcgcgtcccccttggtcaaattgggtatacccatttgggcctagtctagccggcatggcgcattacagcaatacgcaatttaaatgcgcctagcgcattttcccgaccttaatgcgcctcgcgctgtagcctcacgcccacatatgtgctaatgtggttacgtgtattttatggaggttatccaatgagccgcctgacaatcgacatgacggaccagcagcaccagagcctgaaagccctggccgccttgcagggcaagaccattaagcaatacgccctcgaacgtctgttccccggtgacgctgatgccgatcaggcatggcaggaactgaaaaccatgctggggaaccgcatcaacgatgggcttgccggcaaggtgtccaccaagagcgtcggcgaaattcttgatgaagaactcagcggggatcgcgcttgacggcctacatcctcacggctgaggccgaagccgatctacgcggcatcatccgctacacgcgccgggagtggggcgcggcgcaggtgcgccgctatatcgctaagctggaacagggcatagccaggcttgccgccggcgaaggcccgtttaaggacatgagcgaactctttcccgcgctgcggatggcccgctgcgaacaccactacgttttttgcctgccgcgtgcgggcgaacccgcgttggtcgtggcgatcctgcatgagcgcatggacctcatgacgcgacttgccgacaggctcaagggctgatttcagccgctaaaaatcgcgccactcacaacgtcctgatggcgtactaagctgggcctaggaaatatcagccgcttgtgtgttcaattcttctctgtttcacttgaaacaaattgaatagatattcccgctttcaaagccatttacaaatcctctcgtgcagcctaacgccattggcgtggaacaagcgttggcacgaggaagtaagtgcgatgaacggaaggtattcaccgacgcggcaggattttaagacaggcgcgaagccttggtctatattagcccttatcgttgccgcaatgattttcgcgttcatggcggttgcgtcctggcaggacaatgggactacccaggcaatccttagccaaatacgatcgattaacgctgacagcgcctcactgcagcgcgatgtactccgcgctcacacgggcaccgtggcgaactaccgccccattatctccaggctgggagctctgcggaagaatctggaagatttgaagcaattatttaggcaatctcatattgtaagtgagagcaatgctgctcaactgctacgccggctagaagtgtctctaaattcggctgacgcggcggtcgccgcctttggtgcgcaaaatgtccgcctgcaagattcgctggccagtttcactcgtgctttaagcaatcttccaggaaaggcctcaggcgatcagactttagaaaaaccaacagaattggctagcatgatgctccaatttcttcggcaaccaagcccggctatttcattcgagatcagccttgaactagagaggctccaaaaacaacgcggtcttgatgaagctcccgtgcgcatactttcgcgtgaaggtcccattatcttatcgcttttgccacaggtgaacgatctggtgaacatgattcagacgtctgacaccgcagaaattgcggaaatgttgcagcgtgagtgtttggaggtctatagcttgaaaaatgtggaggagcggagcgcacgtatctttcttgggtccgcttcagtgggtctttgcctgtacatcatcaccttagtctataggctacgcaaaaaaaccgattggttagcgcggcgtttagattacgaagagctaatcaaagagatcggagtatgttttgaaggtgaggcggccactacgtcgtccgcgcaagctgcacttggtattattcagcgcttctttgatgccgatacgtgcgcgttagctctagtggaccatgaccgtaggtgggctgtcgaaacattcggtgcgaagcacccaaaacccgtgtgggacgacagggtgctacgcgaaatagtctctcgtaccaaagcgaacgaacgggcgacggtattccgcatcgtatcgacgcaaaaaatcgtacatttgcctcccgaaattccaggtctttcgatactactggctcacaaatccacagataaactaattgcggtttgttcactgggttaccaaagctatcgccctcgaccttgccaaggcgaaattcagcttcttgaactcgccaccgcctgcctctgtcactatatcgatgttcggcgtaagcagaccgaatgcgacgttttggccagacgattggagcatgcgcaacgccttgaggcagttggtacacttgccggcggaatagcacatgaatttaataacattttggggtcaatcctcgggcacgcagaattggcccaaaactcggtgtctcgaacatctgtcacccgaagatacattgactatatcatttcgtcaggcgacagagccatgctcattatcgatcagatcttgacgctgagccgaaaacaagagcgcgtgatcaagccatttagtgtctcagagcttgtgaccgaaatcgctcccttgctacgtatggctcttcccccaaccatcgagcttagtttcagatttgatcaaatgcagagcgtgatcgaaggaagcccgcttgaacttcaacaggtactaattaacctctgcaagaatgcttcccaagccatgactgcaaatggtcaaatcgacatcttcgtcggccaagcttatttaccagctaagaaaattctggcgcatggtgttatgccacctggcgactatgttctactatctgtcagcgacaatggtggaggcatttcagaggctgtgctaccctacatttttgaacccttctttacgacacgtgctcgcaacggtggaacgggtctcggcctcgcttctgtgcatggtcatatcagcgcgtttgcaggttacatcgacgttagttcaactgttgggcatgggacgcgctttgacatttatctccctccgtcttctaaggagcccgtcaatcccgacagctttttcggccgcaataaggcaccgcgtggaaacggggagattgtggcacttgttgagcccgatgacctcctgcgggaggcgtatgaagacaagatcgccgctctgggatatgagccggtcggttttcgtacctttagtgaaattcgcgattggatttcaaaaggcaatgaagccgatctggtcatggtcgaccaagcgtctcttcctgaagatcaaagtcctaattccgtggatttagtgctcaagaccgcctccatcatcattggcggaaatgatctcaaaatgcccctttcaagggagaatgcgaccagggacctttatctgccgaagccgatatcgtccagaactatggcgcatgcaatcctaaccaaaatcaagacgtagagttgcgacgtatcaggactgggcaatcgcggccgccgggcttacgtgtcttttgtaacaaattgcgacgcagttgatatccacttgaaacattagtccgaaattatcgagatctccgctgataaggtatcgaaatggcgataaaattggtattgatactcgtattcacactctttcccgcggcagacgctgcatatgcgaatgaccgcgccaacggtttcatgtggtcaaacgggggcgaaactggagtgaggcttcctcttcgggtgttcaatgccaagccagccaagaacacggtggcgatcatttattccggagacgctggatggcaaaatatcgatgaggcgattggtacctatctgcagacggaagggattcctgtcattggcgtcagttcacttcggtatttctggtcggagcggtccccaagcgaaactgctaaggatcttggtcacataatcgatgtctacaccaagcatttcggtgtgcagaatgttttacttgtaggatattctttcggcgcggacgtcatgccggcaagcttcaataggcttacgcttgagcaaaaaaatcgggttaagcaaatctctctcttggcattgtcacatcaagtcgactatgtcgtctcatttaggggctggctccaactcgaaacggaaggtaagggcggcaatcctctggatgatctcagatccattgaccctgcaatcgtccaatgcatgtacgggcgcgaagaccgtaataatgcttgcccatctctccgacagaccggcgcagaggtgataggcttcagcggaggccatcactttgataatgatttcaaaaaactgtctacgcgcgtcgtctcaggcctcgtggcacgcctaagtcatcagtaatctttagttcctgcaccgcgggacccgcgaggtttctcgcttcaattgaaatcataaagaagcaattgaaaattttcgagtaaccgaccctcccgataatcttcaacataaaacaacgcacttcttccaacgggagaggcggtgttagttgcgagctaaggagataaggtatgcttaagagatcggggtcgctttctcttgccttgatggtctccttctgttcgtcgagccttgccacgccactctcatctgctgagtttgaccatgttgctcgcaagtgtgccccatcagttgcgacatctacgcttgcggcgatagctaaggtggagagtcgctttgatcctttagcgattcatgacaacacgaccggcgaaacgcttcactggcaagatcacagccaagcaacccaagtcgtcaggcaccgtctcgatgcacggcattcgctggatgttggcctcatgcaaataaactctcgaaatttttctatgctcggtctgacacctgacggtgcgctccaggcgtgcacatcattatctgccgctgcaaacatgctgaaaagtcgttatgcaggcggcgaaacgattgacgagaagcaatttgcgcttcgtcgggcgatctccgcttacaacaccggtaatttcatcggcggttttgcaaacggctacgtgcgaaaagttgaaacagctgctcaatcgctggtgcccgcgttaatcgagcctccaaaagacgatcacgaggcgctaaaatccgaagagacgtgggatgtttgggggtcatatcagcgccgctcgcaggaggatggcgctggcggtttaatcgctccgccaccgccacaccaggacaacggcaaatccgcagacgacaatcaagtcttattcgacttatactaaggaggtgcgcattgatgcgatgctttgagagataccgtttacatctaaatcgcctctcgctctcgaatgcgatgatgcgcgtgatatcgagctgcgccccaagcttgtgcggtgcaattgcatggagcatttcctcatccggacccgccgcagcgcaatctgcgggtggcggcactgaccccgccacaatggttaacaatatatgcacgtttatccttggtccgttcggccagtcactcgctgttctcggcattgtcgctatcgggatctcctggatgttcgggcgggcttcgcttgggctggttgccggcgtcgtcggcggcattgttatcatgtttggggcgagcttcctcggccaaacgctcactggcggtagttgatggctgatcgtttggaagaatcgaccctttacctcgcagccacacggcccgcattgtttcttggggtgccactgacattggcagggttattcatgatgttcgccggctttgtcatcgttatcgttcagaacccgctctacgaagtcgttctcgtgccgttatggtttgcagcccggctcatcgtggagcgagactacaatgcggcgagcgtcgtcctgctatttttgcggaccgcgggaagaagcattgatagtgcagtttgggggggcgctactgttagcccaaatccaattagggttcccccacgagggagaggaatggtgtgatgctcggcgcgagtggaacgaccgaaagatccggtgagatctatctcccttatattggccacctcagcgaccatatcgtccttcttgaagacggatcgatcatgaccattgcgagaattgatggcgttgcattcgagcttgaggaaactgaaatgcgcaatgcgcgttgtcgtgcgttcaacacgctgttgcgcaatatcgctgatgatcatgtgtcaatatatgctcacctcgtacgtcatgccgacgtgccatcatcggcgccgcgacacttccgtagtgttttcgccgctagcctgaacgaagcttttgaacagcgcgtgctctccggccaactcctccgcaatgaacacttccttacgttgattgtctacccacaggcggctttagggaaggtaaagaggaggttcaccaagctaagcggaaaaagggaaaacgatctcacgggccagatcaggaacatggaagatctttggcatgttgtcgctggctctcttaaagcgtatggcctgcatcgtcttggcatccgcgagaagcagggtgtgctcttcaccgaaattggcgaagcgctacggttgatcatgactggtcggttcacaccggttccggtcgtcagcggctcactcggcgcttcgatttataccgacagagtcatttgcggcaagcgaggactcgagatcagaacgccaaaagacagttacgttggatccatctattcgtttcgcgaataccctgcaaaaacacggccgggcatgctcaacgcgctgctatccctcgattttccacttgttctcacgcagagtttttcgttcctgactcgcccgcaagcgcacgcgaaacttagcctcaaatcgagccagatgctgagttccggcgataaagccgtgactcaaatcggcaaattatccgaggctgaggacgcacttgcgagcaacgaattcgttatgggctcacatcatttgagcctttgcgtctatgcagacgatctcaatagtcttggggacaggggcgcgcgggctcggacacgaatggcggatgcaggtgccgtggttgtccaagaaggtattggtatggaagcggcctattggtcccaattgccggggaattttaagtggcgcacacgccctggcgcaatcacttcacgcaatttcgcagggtttgtctctttcgaaaactttccagagggcgccagctcaggccactggggcaacgcgattgcccgatttcgtaccaatggcggaacgcctttcgactatatcccgcatgagcacgatgttggcatgacggcaatattcgggcctatcgggaggggtaagacgacgctcatgatgtttgttctagccatgctcgaacagagcatggtcgaccgtgcaggtacggtcgtgttctttgacaaggaccggggtggcgaattgctggttcgcgccacaggaggaacatatttggcacttcacagaggcacacccagcgggttggcgccgttgcgtggcctagaaaacacagcagcctcacacgattttctgcgcgaatggatcgtggctctcatcgagagtgatggtcggggtgggatttctccggaagagaaccgccgtctggtccgtggtatccatcgtcagctctcgtttgatccacaaatgcgttcaatcgcggggttacgtgaatttttgttgcatgggcccgccgaaggcgcaggagcgcggctccaacgctggtgccggggccatgcgcttggctgggcatttgacggcgaagttgacgaagtaaagttagatccgtcgattaccggcttcgacatgacgcatcttctcgaatacgaggaagtatgcgctcccgctgcagcatatctcctgcatcggattggagccatgatcgacggccgccgttttgtgatgagctgcgatgagtttcgcgcctatttgttaaaccctaaattttcgactgtcgtcgacaaattcctcctgaccgttcgaaaaaacaacgggatgctaatactggcaacgcagcaaccagagcatgttctggaatcgccgctaggagccagcttggttgcgcaatgtatgacgaagattttctatccatcaccaaccgcagatcgatcggcttatgtcgatggactgaaatgtaccgaaaaggaatttcaggcgatccgtgaagacatgacggtcggcagccgtaagtttcttcttaaacgagaaagtggaagcgtcatctgcgaatttgatctgcgggatatgcgtgaatatgtcgccgtgctttcggggcgtgccaacacggtgcgctttgcaactcgactacgcgaggcacaagaaggcaactcatctggctggctcagcgaattcatggcccgtcaccacgaggcagaagattgataaggtaggaaacgatgaagacgacgcaacttattgcaacagttttgacctgcagctttctatatattcagcccgcgcgggcgcagtttgttgttagcgacccggcaacggaggctgagacgctcgcgactgcgctcgcgactgcggagaatctcactcagactatagcgatggttacgatgttgacgtcggcctacggcgttactggactactgacttcgctcaaccagaaaaatcagtatccttcgacgaaggacctagacaatgaaatgttttcgccgcgaatgccaatgtcgaccacggcacgtgcgatcaccagcgatacagatcgtgcagtcgtgggtagtgatgctgaagcggacctgttgcgatcgcagatcaccggttccgcaaacagcgctggcattgcggctgacaatctggaaacgatggacaaacgcttgacggcgaatgctgatacgtctgctcagctttcccgatctcgcaatatcatgcaggcaaccgtgaccaatggtttgcttctcaagcagatccatgacgcaatgattcaaaatgtacaggcgacaagcctattaacgatgactaccgcgcaggccggccttcacgaggcggaagaggcggccgctcaacgcaaggagcatcaaaagaccgctgtcatctttggtgccctcccctaaggctgggcgatttgttcatccgcccgcatcctcgccgaatgcgagctcattttatccaacattatgcgacaaaccagtcaagttcaggtccaatcgatgaatttcacgattccggcgccgtttacggccattcatacgatcttcgatgtagccttcacgacaggcttggactcgatgcttgagactatccaggaggcggtgagtgcgccattgatcgcctgtgtcactctttggattattgttcagggtattttagtcatacgcggcgaagtcgatacccgtagcggtatcactcgggtgatcacggtcaccatcgttgttgctctaattgttgggcaggctaactaccaagactatgtggtttccatcttcgaaaagacggtcccaaactttgttcagcagtttagtgtaaccggcttgcctctgcagactgttccggcacagttggatacaatgttcgccgtgacccaggccgtttttcagaaaatcgcatccgaaatcggtccgatgaacgaccaggacatccttgctttccaaggggcacagtgggtcctttacggcacgctctggtctgccttcggagtttacgacgccgttggaattctcacgaaagtgcttctcgcgatcgggcctctgatcctcgtcggatatatttttgatcgcacgcgggacatcgcagctaagtggatcgggcaacttatcacctacggtctcttgcttctcctcttaaacctcgtggcaacgatcgtcatcctaaccgaagcgactgcgctcacccttatgcttggtgtaatcaccttcgccggtacgaccgcggccaagatcattggtctttacgaactcgatatgttttttctgacaggggatgcgctcattgtcgctttgccggcgatcgccggcaacattggaggcagttactggagcggcgcaacccaatctgccagcagcttgtaccgtcgcttcgctcaggttgagcgaggctaggtcgcgcaaaaattcgcctcaatggagaattctatgaagtattgcctgctgtgcctagttgtcgctttgagcggctgccagacaaacgacacattagcgagctgcaaaggcccgatcttcccgctgaatgtggggcgatggcagcctactccgtcagatcttcagctcggcaattcgggtggacgctatgacggggcctgaatatgccatgctagtggcgcgcgaaagccttgccgagcactataaggaagtagaagcctttcaaaccgcgcgagcgaaatcggcgcgacgtctctccaaactcattgcagctgtcgcagctatcgcgattttgggaaatgttgctcaagcgttcgctatagccacaatggtgccgttgagcaggcttgtgcccgtatatctatggatacggccggacggcaccgttgacagcgaggtgtctgtctcgcgattgcctgcaactcaagaggaggccgtcgttaacgcctcattgtgggagtacgttcgcctgcgcgagagttatgatgccgacaccgctcagtacgcctacgacctggtatcgaacttcagtgccccaacagtgcgccaggattaccagcaattcttcaactatcccaatcccagttcgcctcaagtcattcttggcaaacgcggcagggtggaggtcgagcacatcgcttcaaatgatgtaactccaagcacgcagcaaattcgctataaaaggaccctcgtcgttgacggcaaaatgcctgtggtgagtacgtggaccgcgacagttcgctacgaaaaggtgaccagcttgcccggcagattgagactaaccaacccggcaggtctggttgtcacctcctatcagacatcggaagataccgtttcaaacgtaggccacagcgaaccatgatcagaaaagcacttttcattttagcatgtttatttgccgctgcgactggtgcggaggctgaagacactccaatggcgggcaagctagatccgcgcatgcgttatttggcttacaatcccgatcaagtggtgcgcctctcgacggcggttggagctactttggtcgtaacattcgccacgaacgaaacggtgacagcggttgccgtttcaaatagcaaagatctagcagccctaccgcggggaaattatctatttttcaaggcaagccaggtcctcacgcctcagccagtaatcgtgctaaccgcaagcgactccgggatgcgccgttatgttttcagtataagttccaagactctgtcccacctcgataaagagcagcccgatctctattacagcgtccaattcgcctaccccgccgacgatgcggcggctcggcgaagggaggcacaacagaaggctgttgtggacagactacacgcggaagcacaatatcaacggaaagctgagaatttattggatcagcctgtcacagcccttggtgcggcggacagtaattggcactacgtcgcccaaggcgatcgttcgctgttgccactcgaagtcttcgacaatggatttacgacggtattccactttccgggcaatgtacgcataccctccatctacaccatcaatcctgatggcaaggaagctgttgccaactattcagttaaagggagcgatgtcgagatttcttcggtttcccgaggttggcgtctgagggatggccacacagtactatgtatctggaacaccgcttacgatcccgttggccaaaggccgcaaacgggcacggtgaggcccgatgtgaaacgcgtcctgaagggggcgaagggatgaataacgatagtcagcaagcggcacatgaggttgatgcatctggatccctggtctccgacaaacatcgccggcgtctttcggggtctcagaaattgatcgtcggaggtgtcgttctcgcgttatcattaagcctcatttggctaggtgggcgccaaaagaaggtgaatgagaacgcatcgccgtcaactttgatcgcaacaaacaccaagccatttcatccagctccgattgaggtgccgccggatcctccagcggttcaagaggctgttcagcctgctgctcctctaccgccgaggggcgaaccggagcggcatgagccacggccggaagaaacaccgatttttgcatatagcagcggcgatcaaggggtcagcaaacgcgccattcagggcgacacgggccgaagacaagaaggcaagcgtgacgacaactccttgccgaatggcgaagtgtccggcgagaacgatttgtcgatacgtatgaaacccaccgagctgcagcccagcagcgccacgctcttgccgcaccccgattttatggtaacgcaagggacaataattccgtgcatcttgcaaaccgcaatcgacacaaatttggcaggctatgtaaagtgtgtcttgcctcaggatattcgtggaacaacgaacaatatcgtgcttcttgatcgtggcaccaccgttgttggcgaaatacagcgtggcttgcaacagggagatgggcgcgtttttgtgttgtgggatcgcgccgagacacctgaccatgcgatgatctcgttaacatcgccaagcgcggacgaactcggtcgctcaggattgccgggctcggtcgacagccacttctggcagcgttttagcggagctatgctcttgagtgttgttcaaggcgccttccaggcagctagcacctacgccggcagctcgggtggcgggatgagcttcaacagctttcaaaataacggtgagcagacaactgagacagcccttaaggcaaccatcaacataccgccaaccctgaagaagaatcagggtgacaccgtttccattttcgtagcacgggacctcgatttctttggtgtttaccagctccgcctgactggcggcgccacgcgggggaggaaccgccgctcttaatgaattcaaatttccgcttagagataggatacattgtaaatggaagtggatccgcaactacgctttcttctgaagccgattttggaatggctcgatgacccgaagactgaagaaattgcgatcaatcgacctggagaggcatttgtgcgccaagccggcatttttaccaagatgcctttgcccgtctcttatgatgatcttgaagatatcgctattttagcgggcgcgctgagaaagcaggatgtcggaccacgtaaccccctctgcgccactgaacttcctggtggtgaacgactacaaatctgtctgccgccgaccgttccctcgggcaccgtcagcttgaccattcgacggccaagctcgcgtgtttctggtcttaaagaagtctcctcccgttatgatgcttcgaggtggaaccagtggcagacacgaaggaaacgccaaaatcaggatgatgaagctatccttcagcattttgacaacggggatttggaagcgtttctgcacgcatgcgtcgtcagccgactgacgatgttgctatgtggccctaccggaagcggcaagacaacaatgagcaagaccttgatcagcgccatccccccccaggaaaggctaatcaccatagaagatacgctcgaactcgtcattccacacgataatcatgttagactactctactccaagaacggtgctgggctgggtgctgtgagcgccgagcacttgctccaagcaagtctgcgtatgcggccggaccggatattgcttggcgagatgcgcgacgatgcagcatgggcttatctgagtgaagtcgtctcgggacatccgggatcgatttcaacaatacacggcgcgaatccaatccaaggattcaagaaactgttttcccttgtcaaaagtagcgcccaaggtgctagcttggaagatcgcacactgattgacatgctctctacggcgatcgatgtcatcattccattccgtgcctatgaggacgtttatgaagtaggcgagatctggctcgcggcggacgcacgacgccggggcgagaccataggcgatctccttaatcaatagtagctgtaacctcgaagcgtttcacttgtaacaacgattgagaacttttgtcataaaattgaaatacttggttcgcattttcgtcatccgcggtcagccgcaattctgacgaactgcccatttagctggagatgattgtacatccttcacgtgaaaatttctcaagcgctgtgaacaagggttcagattttagattgagaggtgagccgttgaaacacgttcttcttatcgatgacgatgtcgctatgcggcatcttattatcgaataccttacgatccacgccttcaaagtgaccgcggtagccgacagcacccagttcactagagtactctcttccgcgacggtcgatgtcgtggttgttgatctaaatttaggtcgtgaagatgggcttgagatcgttcgaaatctggcggcaaagtctgatattccaatcataattatcagtggcgaccgccttgaggagacggataaagttgttgcactcgagctaggagcaagtgattttatcgctaagccgtttagtacgagagagtttcttgcacgcattcgggttgccttgcgcgtgcgccccaacgttgtccgctccaaagaccgacggtctttttgttttactgactggacacttaatctcaggcaacgtcgcttgatgtccgaagctggcggtgaggtgaaacttacggcaggtgagttcaatcttctcctcgcgtttttagagaaaccccgcgacgttctatcgcgcgagcaacttctcattgccagtcgagtacgcgacgaggaggtttacgacaggagtatagatgttctcattttgcggctgcgccgcaaacttgaggcggatccgtcaagccctcaactgataaaaacagcaagaggtgccggttatttctttgacgcggacgtgcaggtttcgcacggggggacgatggcagcctgagccaattgcatttgattaatttaggtgactgaggacgcggccagcggcctcaaacctacactcaatatttggtgaggggttccgataggtccctcttcaccaattgctcgatggcttctctccagcaaagaatgacgcgagcgcggcggtagccagcttgtggccgaaagctcgagcggtctccaaccccaacggatcaaaatgacttcgagcgacctcgagcaacgcaaccgggaacatgcgtgaggtctgaacgagaacggatttttctgtagttgaagggatcggataacttttcggggccacgcgaaatgatccatctgccagcatgctttcgaaatcgtccaacgcgcgccttaaaatcatttgtagcgacttcgagggactgtattgccgaacgaggttgtcatatgttttcgacacttgaggcgcgggcggtcgcgctgaaagaaaaacctggagctttttcggggacggaggtggactaagggcatccacagttagcttaagttgtcgatcgggactgtaaatgtgatcggcgacgagaggctcacgttgctggtctttctcgtcggctttttcaggcaagtgctggaggtccagcttctggggaacaagtgtcgggttgggatggtggatctcgggtcgagcaccagcaagccgccgtgcttcgccgaccgacaatgcgggcttgcgaattgccatcttcaagcctccaagattttgctgatcagtttcgaaatgaccacgacttcctccatcgcaatccgaagattcctctctatgaggcgcatcgtcggatcagttcccgtgtttagtaatgtaagatgcaacatgccgcgttctttcatcgcggcaaatgcatctctttcatgcatgggagacggtacaactggaaggctctctagcgtctctgacatcctgcgttgcgatgttgtcaatcggccgaccgggacgcgttggcgcaaaacagctgtaggaattgccaaattttcactcaacagcagctcgatgacgtagcggtaggtagatagtgcctcatcgatgtcgagcggcgttagcatggtggggatcagaagcaggtttgagctagcgatgattgtgttgttgagctcgctcgagccgccacgcgtatcggccaacgcataatcaaatccttcgagctcggcattttcataggctgcttcaagaaggggcatttcgtcggcggaatagacttcacagcgaggatcccaggtactgctttgtaaggcgttttctctccatcgcgtcagaggccggttttcgtcggcatcaaagagggccactcgtttaccgtcatttgccaaagcagcgcaaaggcccatgagtgcggtggttttgccagcaccccctttgaaagaacaaaacgtcaaaagttgcatattctgatcccgcctatcctgtgaaaccggagtgcatttgtatttttgttcgtataaatgtttttgtgattatcgatgagtaaaagcgttgttacactatttttatttcacattcgttataagacaattgcaaatgtagcaagtatattcagtattgactgtaaatgtactgttgatttcatattgagcagggctagacttccatccgtctacccgggcacatttcgtgctggagtatccagaccttccgctttctttggaggaagctatgtcaaaacacaccagagccacgtcgagtgagactaccatcaaccagcatcgatccctgaaagttgaagggttcaaggtcgtgagtgcccgtctgcgatcggccgagtatgaaaccttttcctatcaagcgcgcctgctgggactttcggatagtatggcaattcgcgttgcggtgcgccgcatcgggggctttctcgaaatagatgcagacacacgagaaaagatggaagccatacttcagtccatcggaatactctcaagcaatgtatccatgcttctatctgcctacgccgaagaccctcgatcggatctggaggctgtgcgagatgaacgtattgcttttggcgaggctttcgccgccctcgatggactactgcgctccattttgtccgtatcccggcgacggatcgacggtcgctcgttactgaaaggtgccttgtagcacttgaccacgcacctgacgggagaaaattggatgcccgatcgcgctcaagtaatcattcgcattgtgccaggaggtggaaccaagacccttcagcagataatcaatcagctggagtacctgtcccgaaagggaaagctggaactgcagcgttcagcccggcatctcgatattcccgttccgccggatcaaatccgtgagcttgcccaaagctgggttacggaggccgggatttatgacgaaagtcagtcagacgatgacaggcaacaagacttaacaacacacattattgtaagcttccccgcaggtaccgaccaaaccgcagcttatgaagcaagccgggaatgggcagccgagatgtttgggtcaggatacgggggtggccgctataactatctgacagcctaccacgtcgaccgcgatcatccacatttacatgtcgtggtcaatcgtcgggaacttctggggcaggggtggctgaaaatatccaggcgccatccccagctgaattatgacggcttacggaaaaagatggcagagatttcacttcgtcacggcatagtcctggatgcgacttcgcgagcagaaaggggaatagcagagcgaccaatcacatatgctgaatatcgacgccttgagcggatgcaggctcaaaagattcaattcgaagatacagattttgatgagacctcgcctgaggaagatcgtcgggacctcagtcaatcgttcgatccatttcgatcggacgcatctgccggcgaaccggaccgtgcaacccgacatgacaaacaaccgcttgaaccgcacgcccgtttccaggagcccgccggctccagcatcaaagccgacgcacggatccgcgtaccattggagagcgagcggggtgcccaaccatccgcgtccaaaatccctgtaactgggcatttcgggattgagacttcgtatgtcgctgaagccagcgtgcccaaacaaagcggcaattccgatacttctcgcccggtgactgacgttgccatgcacacagtcgagcgccagcagcgatcaaaacgacgtcatgacgaggaggcaggtccgagcggagcaaaccgtaaaagattgaaggccgcgcaagttgattccgaggcaaatgtcggtgagcccgacggtcgcgatgacagcaacaaggcggctgatccggtgtctgcttccatccgtaccgagcaaccggaagcttctccaacgtgtccgcgtgaccgtcacgatggagaattgggagaacgcaaacgtgcaagaggtaatcgtcgcgacgatgggcgcggggggacctagactagtagacaggaaggaccgaataatggcaaatggtcagttcacgatacgctctgctcgcccggcctccgtcggactgacaggcgaacggcgtggagccgcatccgcctctagctctgcactgtccaatgttcaaagagatgttagggataggctgattccaactagctcaccaagattaccaaatgcagccatattgcgtgattcctcgggaagagcgtcgactggtctgcggtacatggcggctactcttcattggtctgcgatcgcgccattatcgctaataaacagcaacgacctggctccggccgcttatgactttgagacgcgaaataacgcaagaaatgtgactgccaaagtcggcagggcagtccctgttcccaagcaaggcgggctcggcaaaacgctcgcacccgtaccccttagtacacgtatatcaagggtcaattccgaccgaagactgcccgctgacgcagaagaccgccctgaaacgcgcgacccccagaaaggacgtggcagtcatggtgcgacgccaaccttacatgaaaagattggaaccgcgtttgctcgaagattgcgaaagcatacgtactatattgtttgcagttgctgccagacccggagcgcgttgacgatgggtgcaaagatttcggtgaagtcatgaactccagcaagacttcgccccagcgtatgaccctgagcatcgtatgttcgctggcagccggtttttgtgcggccagctgctatgtaacgttccgccggggcttcaacggcgaagcgatgatgacgttcgacgttttcgctttttggtatgagaccccgctttacttgggttatgccagcaccgtcttctggcgtggtttatctgttgtcatctttacctcgctgatcgttctttcaagtcagctcatcatatcgctgcgcaatcagaagcatcatgggacagctcgttgggcagaaattggcgaaatgcggcatgctggttatctgcagcgttacagtcgcatcaaggggccgatctttggaaagacatgtggtcccctttggttcggcagttatttgaccaatggcgaacagccacacagtcttgtcgtcgcgccaacgcgtgctggcaaaggcgtcggcatcgtcattccaacgctgttgaccttcaagggctcggtaatcgcccttgacgtcaagggagaattgtttgaactgacgtccagagcacgcaaagcgagcggcgacgcagttttcaagttctcccccctagatcctgagcggaagactcattgttacaatccggtcctggatattgccgcacttccgcccgaacgccagttcactgaaacacgccgtctagctgcgaaccttattacggctaagggaaagggagcagaaggctttattgacggcgcacgtgacctgttcgtcgcgggaatccttacctgcattgagcgtggcacaccaacgattggcgcggtatatgacctatttgcgcagcctggcgaaaagtataagctttttgcgcaactcgcggaggaaagcctaaacaaagaggctcagcgtatcttcgataatatggcgggcaacgacacgaaaattctgacatcgtacacctctgtgctgggcgacggtggactgaacctgtgggctgatccgcttatcaaagcagcgacaagccggtcagacttttccgtttacgatctccggaggaagaagacctgcatttatctttgtgtcagtcccaacgatctggaggtcttggcaccacttatgcgcctgatgtttcagcagctcgtgtcaatcttgcagagatcgctgccaggtgaagacgagtgccatgaagttttatttctcctcgacgaattcaaacacctgggcaagcttgaggccatagagaccgcgatcacaaccatcgccggttacagaggccgctttatgtttattattcaaagtctttcggccttgtcgggcacatacgatgacgcaggaaaacaaaactttctgagcaatactggcgtacaagtatttatggccacggctgatgacgaaactccaacctacatctcaaaagctatcggcgaatatacgtttaaagcgcgttcgacctcttacagtcaagccagaatgttcgaccacaacatccagatttctgatcaaggtgcagcccttttgcgccccgaacaagtgcgcctgctagacgatcagagtgaaatcgttctcatcaaagggcgacctccactcaaattacgaaaggtgcagtattattccgatcgtacgctgaaaggccttttcgaacgccagatgggctctctgcctgagcccgcacccttgatgctttccgactatagcaacgatcaagttcaataccacttggctccgatagcaaattttaatgaggatgctgcaccgcaaaacagaactgtggccgaggaccatggaagtgttaaagtcggtgctgatatccctgaacgcgtgatgggaataaatggtgacgaggaacaagccgatgcgggcgagataccgccggaatcggttgtgcctccagaattgacgctcgctctgaccgctcaacagcaattgttggaccagattattgcacttcagcaaagatcgaggtccgcaccggcatagcctgcgaaatgatcttaatggtgcaattcgtttcaggcggcatgttgcggttcaacaaagtgtacgccagatcccaattggccctttacgaggtgtcggtatgacaggaaagtcgaaagttcacataagaggttcggctgacgcgcttcctgacgttcctggcggaagtactaccgccccttttttaaccgaaccttctcgggatcaggttgatgcctcgtttgaggtccaaaccgactacagccagtctacttccgtgtcgtttacctatgatggtgttggacttggtcctgccgagcgtgcggcttacgagaactggtgcgaaccgggccggcccacttggaaagatcttataatcaaggcacgtgtcgatccgattgacgatgtgacctggctccgagatttagaagaggacaccccctcaaccttcagatacgaagggatgcctctgggcatcggggaacgacaggcctacgaaaattggcaagaggacgctcagccgacatgggaagaccttgttgtcagcgcacgcttgacggaacttggccgtccacacgggattaccggcgagtatacatccctcgcaggatcgaagaatacaagttcaatttcattgaagcgaaagcggagcaacttaattgatgatgagaattcatccggatcgttttcatatgacgggatgaagctcggggaagccgagcgttctgcatatggtgactgggccgaggcggagccacccacgtggaaagatttggtattgagggcacgcgtttcctcgatcaatgactctgcttggctttttgattcacaaacatcttcatcatcatttgaatacaacggtgttcccttgggcgagccggaacggcaggctctcagacaatggcaaggagacgctcagcctacctgggaagatctcgttgttaacgcgcgtatggcagaactttgccatgctggttggattgaaggtcaaaaaggttgctttgaagagcgcggggaggctctgcccgcgtcggaacgcggttcgcaacgccccattggtcaacggacagattcctccgattcttttgtgtatgatggcacaaggctcggagcacctgagcgaactgcttatgaacgctggagtaagagggaacgcccgacttgggaagatctcatcttagatgcacaccaggccaggactgaaagtgacgctgttacgacccaagcgattggtcagtcgtcctcaccggttttcttatatgaaggaaagtcgctcggagacagggaacgaaaggcttacgaaaaatggcggcagccagcccaaccgcgatggcaaaatcttgtagtgaacgctcgtctggcagaaatcgatccctcagcctggattgccgatgagcgcgatccgcttgatgatagcgacgcgcttggtcgcccgtcgtacacaagcttgacggatagatcagacgtccctttagacgatcaatcaatctatcgtcgttccgacctagtaagggagcaggtgccagaatcgtctcaaaggcaattcgcagcatgttcagaatctgaaacgaggcctgtgcaatggtttactgcttctgggtcagatgcaaacaatacggaaaatatcaccgccagcgatcccgtcgatcgcacgggtggagttaagcggctaggctccaaaagcgacagaaccgttacagcttctatccatgacgtgaattccagcacaaggcgactgttgcttaacgaatttggatcggaggctccgcgcccttcgccagaaaagactgttcgcttaagaagcgacaatattggcacctatgggagccggaaaaatgaacgagcgcggctcgcgaccgaaaccggtgcgtatgagtcggagcatattttcgggttcaaggctgtccacgatactgcgagagcgacgaaagagggccggcgtctcgaaaggcccatgcccgcctaccttgaggataaggggcttcatcgccaacatattggcaccgggagaggacggaccaaacttgtcgggcgcggatggccggatgacacaagctatcgctcggatcaaagggcaactctgtcggaccccgttgcgcgctcggaaggcgcgacggcctcaaatgggtatcaattgaaccaattgggttacgcgcaccaactcgctagcgatggcctgcaaagtgaatcgcccgatggtgttgccttgccaattcaagtggcaacaacgagctacaactatacagtgagccgcgatcctgtccttgttccgccggataaaaacgaagcccctcaattgctgcatcttggtccccgtggtcaaaccgaagctgttcttgcccgcgaaacagcattgactggaaaatggccgactctcgagcgtgagcagcaagtgtatcgcgagtttttggccttatatgacgtaaaaaaagatcttgaggccaaatcagtcggcgtaagacggaaaaaaaaagaagttatttctgcgttagaccgaactgcgcgcttgataagcacgtcgccttcgaaagctcgatccaaagcagagactgaaaaagccattgatgagctcgatgatcgacgagtttatgatccgcgtgatcgagctcaagacaaagcgtttaaacgctgataagtcgccaatatagtgatcatttgcagtattcgcatcgatcgctggttgatattctgccgctggtcgaccggctgctcgtcgccaaaaatgctcacagggatacgatggcctcggtcaggccgcgtgcgtcctgtctttccagttcctccctttcagctcgattgtggcatcatttattgcctgctcattgcagttgaaacgcgatatccgtttcaagacccgggt

SEQ ID NO: 239 - DNA, 38871 bp, Artificial Sequence
  RV007497
cgcgccagcgagttgctttctctcgttggctgatgggaagaaagcgcataggagtcgccgccaaattcttgtcggaccagcttggtttgttcggtcggtgtttttcaccgtggatgcggagtaatgagaaactgggtcagaccactgggctccgttgattccgcgaaatctgcttagttggattggctgtcagaaggagaggtgaccgcatgatttgggatcatttatcaccttcccgaagggttctgcttgatatcaaatcgtggtctgtattggtactggtaattgcctcgatatcttttgcggttctggccataggatcttggcaagacaacgaaagcaacgaagcgatcctgacagagctgcaatcgatcgacgtggattgcgcgatgctgcagcggaatgtgttgcgtgctcacgccggccttcttcggaattaccatcctcttatcgtccctctggggcgactgcgcacgagcgtcgcagatttacagcagctttttaggcgggcgggcctcgacggggccggtgaattttctgaattgctggcgcgggtgaagagctcagtagatgcgaccgacgcagccgttgcagcgttcggtacgcaaaatgtaatgttccaggattcgttggcgacctttaaccagtcgatagcttcgcttccgaggtctttggatacgagggatttgaactcgctagaagtcgctgagttgggctatctgatgctccagttttcgtctcagccaaatttcgagtttgcacgggaaatcaaccaacgtctcgaccggcttcaggtttcggcgaacggggataaggcaggcgtcaaggagatcgttcgcagtgggaggattatcctgactctactgccgcgattgaaagacaccgttggagtgatccaaacttctgaaaccatcgacaacacgaagaagttgcagcgagcataccttgaagcttatagcttggccagcgcgggtgaacagcgggtacgggtcttcctcggcgcagtttcggttttcttttgcttttgcataatttccctagtccataggttacatctgcgaaccaaggtgttgacgagacgactggacttcgaagaagtgatcaaaaagattgggctttgcttcgaagatgcttcagaagcaaaaccgtcgttggaatcctcaacgaatgccgcgttgggaattatccaattattctttgaagctcatcaatgcgcgctgggactggtcaacatcaatgagaatgacgttggcgtcaccttttttggaagcactcctgcgccagagtggaacgaacaacgggtgcgcgaaattgtttccacggtaggggccgaggacggcgggcggattttccgagcctatcctcaacgaaaagcgagctgcttcggtgaggactctccatttctgtgggtgctgcttgcgttcaaggtatccgatcgaatagtcgctgtctttggcctgggatttgatcgagagcatctacagacgccgaccgcacgtgaaatgcagctgatggaactagcggctgcatgtgttagccactatgcggtcattcggcgcaagcagtcccagcgagatattctggaacgtcgtttgaaacatgcggaacggcttgaagcagttggtacgcttgccggcggcattgcgcatgaatttaacaacattttgggtgcagttctgggttacgcggaaatggcacacaacgttctgcgccgtcgtactcatgctcgagactacatcgatcacatcatttctgaaggcaatcgagcgcggttgattgtcaaccagatccttgcccttagtcgaaagcgggatcgaacaacaaaaccattcgatctttcggagttagtgaccgtgatcgcgccgtcgttacgtgttgcgttgcctccgggcgtcgagctcgatttcaaatatcagagcgctccaatggttatcgaaggaaactcacttgaggtcgagcaaatactgatgaatttgtgcaaaaactctgctgaagcatgccgagagttagggcgtgtggaggtcagcgttaggaggtctgtcgtacggaaacacaaggttcttacaaacggtactattcccaccggcgagtatatccttctttcagttgaggataacggcgcaggcataacagaggcggtattatcgcacattttcgagcctttttttactacccgcgcccgcagcggtggcacgggcctgggattatccacggttcacggtcacgttagcgcgatggctggttacatcgacgtggtatcaactgtcggcagaggtacgcgcttcgacgtctacttgccaccttcgtcgaagcagccggtaaattcagagagtttttttgaccctggaagaatcccgcttgggaacggcgagattgtcgcggtggtcgaacccgacttagccacgctggaaatgtacgaggaaaagatcgcggcgctgggctatgagccagtcggctttaacacgttggatggtttaatcgactgggtgttggaaggaaaagaacctgatcttgttctaattgatcaaccgtctttgctggatggagacggtgcagggtccttaatctcaaagctggcaaaagcgcccatcatcattattggcgaaaaccagaaaaatgttcccctttctgcggatcgcgagggatctgcccgttttttggaaaagccgatttcagcaaagactctcgcctatgtcgttcgtgcgaatatcagaactgaacgaatggtcggctcgaatagcagcggaatcgtgattgcgtcataaaccgatacgccctctgaacagaagccggccgcacaacgcgattgcttattaatttaatccccagtcgcggaatcagccggtcagtcccgacatccgcaacaacgcaactccggttgcggctgcaatcaccgccagtgatatacaggcaaaaaaccggtaaacctgctcttttgatgttaagaggagatggatcgaagcgatcatcagaaggaaaatcgtcgcaagtgcgccatacgcccaatactcgttcgaataaagccatgttcccaaagccaacagaccgcaaacaaaaaaaacgagttcgagcttttgcaagacaacacctcaaaaagatctcgttgtgatcctaggacatcggtctcgcaggtcaatactgcgatcgcgtttcatgcaacggacttgatgtatctgccgcgcggcactaggagacgtgaggaacggccccctgtctagggtgcagtcggtgccgatctccgcttcgggggcgctttgcgaaatctcctgcggctgcaccatcctccgcgccagcctgcgaaaattttcgaaaaccgccgctatggtgaattcgctctcatggcctagggatcaccgcttgggccgccgattccctcgattcaagaaatcaaacggcttcgcttcgatgcttcaaatgaaaccgagaggtaagataataaaatcagaaagtaacagacacctcccatagtcgcgactgttagcgatcgagtcatttcatgctgaccaagatcattgcgatacagtggggaataaacaatgcggaagacggcaggatctttcgggatcatttttctgatggtccagccaagcaaagctgcgccgctctcgttcgctgaatttaaccaactcgctcgcgaatgcgcaccttcagtcgctccatcgacgcttggagcgattgcgaaggttgaaagtcagtttgatccgctcgtgctgcatgacaataccaccggcgaaactttacatggcaagaatccggcggatgctacgcaaagcgtaaacaatcgcgtcgcagcagggcattcagtcgatgtaggcctaatgcaagtgaactcgaaaaatttcgcgaacttgggcttgactgccggcaatgcaatcaacccttgcgtgtccctgtcggcggcggcggacctgctcgtacggcattatagtggcggcgacacggtagagtcagaacaacttgccatccggcgagcaatttcggcttacaataccggcaacccgacacgcggcttcgcgaacggctatgtgcggagggtcgaagtggcggctcagctactcgtccccccgctggctcagtcggggaaaaaaggcgaccgtgatgagcggagtccagaagaaccctggaacgtctggggttcatacgaccgctcccactcagcagtcggttcgtccgcgccgccagaggcgcagcagccgaatgagcgcaaatcccccgaacaagatcaagttttcgaaccgaatgatggagatgcaccataatggcatggcttgaaggataccgcgcaccgtcgaaattccgtggcctctggcacagagctgtgcgcctgctggctccgcacgtgccgagcgtcaccggcgcgatcggctggagcttgtttttctgcgagccagctgccgcgcaggccgctgggggcactgaccccgccaccatggtcaacaatatctgcacgtttattctcggtccgtttggtcaatcgctcgccgttcttggtatcgtagccatcggggtatcgtggatgttcggccgagcttcccttggtctggtagcaggtgttgttggcgggatcgttatcatgtttggagccagctttctcggccaaacactgacagggggcgggggatgaatgccgatcttgaagaagccacactctacttggcggcaacgagacctgcattgttctttggggtaccgctgacgcttgctggagttttcatgatgttggcggggtttctcatcgttgttgtgcagaaccccctctatgaaattgttctcttgccgctgtggcttggagcgcggctcatcgtagagcgggactataacgcggcaagcgtggtcttgctgtttctccagacggcagggagaagcgttgacggccatgcgtggggcggcgcgagcgtcagtcccaaccccatcagagtggcgtcgcgaggaagaggaatgacgtaatgttcggagcaagcggacggaccgagagatctggggaaatctacctgccttacgtagggcacctcagcgaccatgtcgttcttctagaggacggttccatcttgaccatggcgcatatcagtggccttcccttcgaactggaggaagtagaggtccgaaatgcgcgctgccgtgcctttaacacgctctttcgcaatattgccgatgataacgtctcagtatatgcccatctcgtccgtcacaacgatgtgccagtaccgccggtacgccattttcgcagcaccttcgcgtcaagcctaagcgaaacgttcgagcggcgtgttctgtctggtaaactgtttcgaaacgaccacttcctcacgctcattgtctctcctcgcaccgctctcggtaaagtgggaagcagattcaccaggcgctatgggaagaacccaggcgatcttgcgcatcagatccgacatctggaggatctttggaacgttgtcgctggcgcgcttgatgggtatggacttcgtcgacttggcatccgagaaaaaaatcaggtgcttttcacggaaattggtgaagcccttcgcctgataatgacttgtcgttttttaccggtgccggtcgttagcggatccctcggcgcctcagtttataccgaccgggtcatctgcggcaagcgtgccctcgagattagagcgccgaaagatcgttacgttggatctatcttttcattccgcgagtacccggcaaagacgcggcccggaatgcttaacacactcctgtcatcaagttttccgctcgttttgagccagagtttctctttcctcacacgtgcacaggctcacgccaagctcagcctcaaatcgaaccagatgactagctccggtgacaaggcggtcacccagatcggtgaactcgcccaagcagaagattcattggccagtagcgaattcgtcatgggttcgcatcatctcagcctttgtgtctatggcgatgatctcgatacccttgccgactatggtgcgcgagcccgcacgagcttgtcggacgcgggcgcggttatcgtgcaggaaagcattggaatggaggctgcatactggtctcagcttccaggaaaccacagatggcgtacccgtcccggagcgatcacttcacgcaactttgccggcttggtttcattcgagaacttccctatcggaaggaagtcgggccattggggaggtgcggttgctcgtttccgtacaaacggcgggacgcccttcgattatattccgcacgaaaacgacgtgggcatgaccgcgatcttcgggccgattggcaggggaaaaacgacacttatgaccttcatcctggcgatgcttgagcagagcgtggttgaccgcagcgggacgatcgtttttttcgataaggatcgtggcggtgaactgcttgtgcgcgccaccgggggcacgtacctcacgttacgacgaggtgtcccaagcggccttgcacctttgcgcggcctagaggatacggcagcggcgcgggactttctccgcgagtggatcgtggcgctgattgaaagcgacggcagggggggaatttcgccggaggaaaatcgccgcttagagcgcggtatccaacggcaactttcgtttgagcctaacatgagatcccttgcgggcttaagggagttcttattgcacgggccctccgaaggtgcgggagctagattgcagcggtggtgccgaggcaacgctcttggctgggcgtttgacggcgaatcggacgaagtgaagttagatccttcgattacgggcttcgatatgacccatctcctcgaatatgaggaggtatgcgcgccggccgcagcataccttttgcatcgaataggagcgatggtagatggccgacgcttcgtcatgagctgcgatgagtttcgttcctacctgcttaatcagaaattcgcagcagtcgtcgacaagttcctgctgaccgtccggaagaacaacggaatgttagttcttgcgacgcagcaacccgagcacgtacttgattcaccattgggcgcaagcctcgtagcacaatgtatgaccaaaatcttctacccatcacccactgcagaccgctctgcttacatagacgggttgaagtgcaccgagcgagaatttcaggctattcgcgaggagatggcgattggcagccgcaaatttctgctgaagcgcgagagcggaagtgttgtgtgcgaattcgatctgcgcgacatgccggaatacgtcgccgtactatccgggcgtgccaatacggtgcgttttgcccagcagttgcgcgagacgcatggagaggaaccctctgcctggctggaaaaattcatgacgcgctaccatgaggcacaggattgatctggagttcgaagtcatgaatattacgaagctcgtaataaacgcacttttcatatgccttgttctgtcggggactgccaaggcgcagtttgttgtcagcgaccctgcaacggaggccgaaacgctgacgacagcgatcaatactgcggcgaacctcgagcaattgatcacgatggtgacaatgttgacctcgccctttggcgtcaccggcatgttatcagcgatcgaccagaaaaaccaatatccctctgccggccaactcgacaaggaaatgttttcgccgcagatgcctgcttcgacaactgcgcgtgcaattaccttagatgccgatcgcgcagtcgtgggcgacgacgctgaaggaaatcttttgcgacagcagattgcaggcgccgcaaatgctgccggtgtcgcggctgacaatctggatgcaatggacaagcgccttgcggcaaattctgagacatcgggccagctctcccgctcacgcaatatcatgcaggccaccgtcaccaacggtttgcttctcaaacagatccatgacgcaattattcaaaacattcaggcgaccagcctgttgacgatgaccaccgcacaggcggggctgcacgaggcggaggaggcggcgacccaacgaaaggaacatcaggcaactgcgcttatatttggcgccgctcaactacactgatccgctactgttcattcagggccctctttctccgtagaaaatcgaagctaaatccaggtaagggcaatgaattttagcattcctgcgccttttacggcgatacatacgatattcgacctcgccttcaccgtcgggctggacacgttgcttggggacattcaacgggcagtcagcgctcctctcgtggcctgcgtgacgctatggatcattgtccagggcatcctcgtaatgcgtggggaaatggacgcacggggcggaatcacccgggtaatcatggtatcggtagttgttgctcttatcgttgagcaggcggaatatcatgattacgttgtctcggttttcgaggatacgattccgaatttcattcaacagttcggtatcagtgggcttcctttgcagacgattcctgctcagctcgacacgatgttttcactcacgcaagtagcctttcagaagattgcttctgaaattgggccgatgaacgatcaagacatcctcgcctttcaaggcgcacaatggattttctatggaacgctttggactgcgtttggaatctacgatgccgtcggaatcctcaccaaggtgctattggcgatcggtccattgatgctcgttggctatctcttcgatcgcactagagacatggccgcgaaatggatcggccagctcgtcacttatggcatacttctgcttcttctaaacatagtggcaactatcgtggttctgacggaagcgacggcactcgtgctaatgctcggggttatcacttctgctggcacaacggcggccaagataataggcctctatgaactcgacatgttctttctgaccggcgacgccttgatcgtcgctcttccggcaatcgccgggaatattggagggagctattggagcggtgcgacgcaaacggccggtagcttaaatcgccatttcgcccggacaatccgccgttagtcccagcttcacaaatggaggatttccttgaagtactttctattgtttttgatcatcggcttggcgtcttgtcagacaagcgatcagttggcgacttgtaaggggcctatttttccgctgaacgtcgggcgatggcagcctgctcagtcggaccttcagcctaccaacgcaggagaggctaatgaacggctctgaatacgcgctgttagtagagcgggaagcattggcggaccactataaggaagtagaagcatttcagtctgcacgtgctagatcagctcggcgaatctctagagccttggctgctttggctgtcattgcagtcgcaggaaacgtggcgcaggccttcgctatcgccgtcatgcttccgctgaacaaacttgttccagtatatctgtgggtgcgcccagacggtacagttgacagtgaggtatctatttcgcggttgccggcgacgcaggagcaagcggtcgtgaatgcgtctctatgggagtatgttcgtctgcgggagagctactcggcggatacagcccaatacgcctatgatctggtctcgagcttcagtgccccaacggtgcgtcaagattatcagcagttcttcaattaccccagtcctagctccccccaaaccatcattggtaagcgcggaaagctggaagccgagcacatcggctcaaacgaacttatgactggcgtccagcagatccgctacaaacgcactctcatcatggaagggcaagctccaatagtaaccacctggaccgcaacggtacattatgaaacggtaactaacttgcccggccgattgaggctgacaaatccaggcggcttaatcgttacctcctatcaaacttcggaagataccgtttcgaacacgacgcggagccagcaatgatcaagaatttgtttctgggcctggtttgtatcctctttgtaaccagcggcgcgaacgcggaagacacgccagcggcaggcaaactggatccacgtatgcgctatctcgcctacaatcccgatgaggttgtgcacctttcaaccgctgttggagccacattggtcgtaacatttgggtccaatgaagcggtgacagccgtcgccgtttccaacagcaaagatctcgctgcgctcccacgcggcaattatctgtttttcaaggccagcaaagtgctgcagccgcagcctgtgatcgtccttaccgcaagcgacgcaggaatgcggcgctatgttttcagcctcgcgaccagaacgatgtctcggctcgataaagagcagcctgacctctactacagcgtacagttcacttatcctgccgacgttgccgctgctcgccgaaaagaagcggagcagagagatcttgcggatcggatgcgggcgcaagcacaatatcagcgtcgagccgaggacttgctcgagcgtccgccagcaggtggcagcacagatgcgaaaaattggagctatgtcgcgcaaggagaccgctcgctattaccgctcgaggttttcgacaacgggtattccacgacatttcgctttcccggaaacgtgcgtgtaccttcaatctacgtgattaacccagatggcaaggaagccacggccaactattcagttaagggagattacgttgaagtagcatcagtttccagggaatggcgtctgcgggacggccatacagtactttgcatctggaataaggcatatgacgccgtcggacggaagccgggcactggcacagtcagacccgatgtagtgcgcgtgctgaaggagacgaggtgatggaggacgtgaatgcccaatccagagaaggtatcgacgcgcccggatccctcgtcaccgatcctcatggccggcgcctctcggggtcgcaaaagctccttgttgcgggtttagtcctggtactgtcgttgagcctcatttggctcggggcgcgttcaaagaaaaggaccgagccgtctccaccaaacacaatgatcgatgccaacacgaagccctttcggccggccccgattgatattcccgccaaaccggcaatgacaccgccagctgcggaagcaacggttttgccgtcggatcaacatcagcgagaacacaacgaactgaggcccgaagaaacaccgatctttgcctacagcggaggtgatcagaatggtgtcaaatccgccccacacgctgatattcagaacggtggccaagacaatagaaacgccaactccctagccgcgtcggaggattctgctgagaacgatctctctgtgcgcttgaaaccgacagtgttgcagcctagcctcgctatacttttgccgcacccagatttcactgttacgcaaggaacgatcattccctgcatactgcaaaccgccattgatacaaatctggcagggtatgtgaaatgtgtacttcctcaagacatacgcggagcaaccggaaatgttgtgcttctggatcgcggaacgacagttgtcggcgaaatccagcgtggactgcagcagggagacgcccgcgttttcgttctctggaatcgcgcggagacgccctcacacgccgtcgtctctctttcctccccgggggccgacgaactcggccgttccggactgccgggtacggtcgacaatcatttctggaaacgctttagcggggccatgctcctgagtgtcgtccagggcgcagtccaggcggcaagtagctacgcagggaattcgaccggcgggaccagcttcaatagtttccaaaacaatggcgaacaagcggccgatacggccctaagggcggccataaacattcccccaaccttgaaaaaaaatcagggtgacacggtctcgatcttcgtcgcgcgggatttggatttctcaggaatctaccagcttcatatgactggtggatcggtgaaacgtcggcatctgcgctaatgcacagatagccaaagctgcgagatgcatccaatggaagtaaatccgcaattgcgcgcccttcttaacccagtcttgcaatggctcgatgacccgaggactgaagaagttgccataaacggaccgggagaagcctttgtacgccaaagtggcgtcttcacgaggttcgccgcaccgttctcttatgatgatctcgaagacatcgccattctagcaggggcattgcgaaaacaagatgtcggcccccgcaaccctctttgcgctaccgagctcccaggtggcgagcggatgcaaatctgcttgccgccaacggtaccctctggcaccgtgagcttgacaattcgacgaccgagcaatcgtgtctctgaattgggggaagtctcggctcgctacgatgttcgtcgatggaatcagtggcaaatccggacgcagcgacgagatcaactagacgaagcgattctgcgcgactacgacaatggcgatctggaatcatttttacgtgcatgtgttatcggtaagcggacgatgttgctttgtgggccgaccggaagcggcaagaccacgatgagcaagaccttgatcagtgctattccgcgggaagaaaggctgataaccattgaagatacgctcgaactcgtcattccacatgagaaccacgtcagactgctctactccaagagtggggcagggctaggtgcagtgactgcggaacagctgctccaggcaagccttcggatgcggcctgaccgaatattgctcggtgagatgcgcgacgacgcggcgtgggcgtacctgagtgaggtggtctcaggccaccccggatcgatttcaaccatacatggggcgaatcccgtccaaggcttcaaaaagctgttctcacttgtgaagagcagtgtgcagggggcatgcttggaagatcgcacactgattgacatgttggcaacggcaatcgatgtcattgttcccttccgtgcttacggcgatgtttacgaagtgggcgaagtatggctcgccgccgatgcccgccgacgcggtgagacgataggggatcttctaaaccagcaatagagccgcacggaggtctgctcgcgcagattttaaagcgttacaagtgtagcgcgctgcagcaactcctgtcatcaatctgaaaccttccgttagcatttttgtcatgcacggcttggccgaaattttgccgaactaccctcatagtgagagaaaatgatcaggttgaggctgagacgtacatcctctgcttgcacgaatctatcgattctgcagaatcccatacggaggcgaactggtgaaacatgttcttgtcatcgatgacgatgccgcgatgcgccatcttattaccgagtatttaacgattcatgccttaagggtcaccgcggtatcagatagccagcaattcaaccgggtacttgcatcagagacggtcgatgtcgtcgtcgtggatctcaatttagggcgtgaagacggacttgagatcgttcgcagtctcgccacaaaatccgatgttccaattataatcatcagcggtgatcgccttgaggaggcggataaagtggtggcgctcgagctgggagcaacggattttatcgcgaaacctttcggaacgcgcgagttcctagcacgcatccgtgtcgcattacgcgtgcgaccgaatgtcatgcgaaccaaagaccggcgttcattttgtttcgccggctggacacttagtctcagacagcggcgattggtatccgcacaaaatggcgaggtgaagcttacggcaggggaattcaatctgctcgtcgctttcctggaaaagccacgcgacgtgctttcccgagaacagctcctcatcgcgagccgagtgcgtgaggaggaagtatatgacagaagcattgatgttctcattttgaggctccgccgaaagcttgagcaggatgcagcgagcccaaacttgatcaaaactgccaggggtgccggctatttcttcgacgctgatgtggatgtttcctatggaggtctgatggcggcctgaagcagcgacgcatatgcctttttcgatctgatcctaggacgcggactcgttaattgaagcgatccagattctcgtcgcggcaagtttgagcccggcaaggtagttgaacaatctcctttccaggaaattgaatcacacaacgtcatcaacatgaaccccgttatggggacacagcctagagtgagctggctgtgttgtagctgggtaggggctgcctcattgcctgctgtcgaatacaataccgccgtcaagtgaccggcctcatcatattagcgttcttttcttatcttctcttcggcaaagaaagatgcaagtgcggccgtagccagtttgtggccaaaagccctggcggtctccaatctcaatggatcaaagtgattgcgtgcgacttctaacagcgataccgggaacatgcgagaagtcaggacaacgataggtttttcgactacttttgagatcgggtagctttgaggccccgtgctaaatgatccgtccgccaacatgttctcaaaatcggcgagcgcacggcgcaagatcatctgcagcgccttggtagcgctgtactgcagaatcaagttgtcatatatcttcgatacctcaggagcgggggggcgtgccgaaagaaagacctggactttttccggcggcgcagtcgaactcaaggcgtccgccgttagcattgattgccgatcgaagttgtcacgacgtttggcggcgataggaggcgctggtcgtttttcctttccggctctttcaggtaattgcgaaggcgccaagttttgcgaggaaagagctgggattgggtgaacgatcggtcgcgcggcagcaagccgtcttgcttcaccgacagacaaagcaggtttgcggatccccatcttcaattccccaaggtatcgccaatcaattctgaaattgttacgagttcctccatcgcaattctgaggttccgctcaaggaggcgcatcgtcggatcatttgtcgtgttcagcaatgtgagatgcaacatgccacgctctttcattgcagcgaacgcgtctcgttcatgcattggagattgtacgacaggcagattcaccagcatgtctgacatcgcgcgttgtgacgtggttaatcggccaaccgggactcgctggcgtaacacggcggtcggaatcactaagttctcgctcagcagcagctcgacaacataacgatatgtcgaaagtgcctcatcgatatccagcggcgttaacattgtcgggatcagaagcaggtttgagctagcgatgattgtgttattgagctcgctcgaaccaccatgcgtatcggccagcgcataatcaaattcctgaagctcggcgtcctcataagccgcttcaagaagcgacatttcttctgcagcgtacacctcgcaggatgtatcccaggtgttgctacgcatcgcgttttctttccatcgcgttaacggccggttctcgtccgcatcgaagagagccactcttttgccgtctcttgcaaacgcagcgcaaaggcccatgagcgccgtggttttgccggcgcctcctttaaatgagcaaaatgtcagaagtttcataagtttatcctggcgacgttgtgaacgaaagtgcgtctgtatcattgtttgtatgtgtgactgtctgtatagcgaaattatcaggagtatatttcaattgcattgaaggatagttgcaaatgtaactatatagatccgaatatgaacagtatattcttgaatttattctgttggcggctaggctccctcagtctcaactggagaatttcactccggaacaaatccagatcattccgttttctatggagcaagccatgtcgcaaagcgaaaaatccacttcaagtgacattgtcgaccggcgtgaaggcccgaagattgaaggtttcaaggtcgttagcactcgtttgcgatcgtcggaatatgagagcttctctcgccaagcccgtctgctggggctctccgacagcatggccataagagttgcggttcgccgcattgccggctttctcgaaatcgatgcagagactcgtcagatgatggaagccattcttcattcaataggagcactctcaaacaacattgccgcgctgctgtgtgcctatgctgaaaatccgacaacggatttgggcgctctgcaagctgaacgaaacgctttcggtaaatcgttcgctgatctcgacggtttgctccgttccattttgtccgtatcacggcgacggatcgacggttgctccatgctggcggacgccttgcagcattaacgtagcacttgggggaatctgttggatgcccgatcggtctcaagtcatcatccgcattgtgccgggaggtgggacgaagaccctccaacagattatcaaccagttggagtatctatctcggaagggcaagttggagctgcagcgttcggcccgacatctcgatactttcgtaccaccggatgaaatccgcgaactcgccctaagctgggttcaagaaaccgggacttatcacgaaagtcggccagacgaggaaaggcaacaggagttgacgacccacattattgtaagcttccctgccggtacaagtcaggtagcagcttatgcagcgagccgggagtgggcagccgagatgtttgggtcaggcgcagggggaggccgatacaactatcttacagcctttcacatcgatcgcgatcacccacatctgcatgtggtcgttaatcgtcgcgaacttttggggcacggctggctgaaaatatcccggcgccacccccaactgaattatgacgccttgcgcattacaatggccgagatttcacttcgtcatggcgtcgtcctcgaggcgacgagccgagctgagcgcggcatctcggagcggccgatgacttttgcccagtatcgacgcctggagcggcagcaggccaatcaaattcgtttcgaggatattgatttcgaagaattctcgcctgggggaaacgacggagaaccggatcaatcttttaattcttcgtacggttcgctgcctcaaaacgtgtcagaaaacttgcgacgaaacggcggtctgcaatcggtgtctgaagtacgttcccgggcactgatcggatcgaacggcaacggtgtcacgcccgatcgtgtatcatctggaaacgattcccgttctcaatccggcagcgataaagcctttgtggacgatggcaacttgaggaacggccctctcaccatcgccggagacggccaggatcttgaaggccgttctggcatgcatcgtttggcaaccgaacccgtcacgcacacaacaagcgaagatgatgttcggcaacggcctcatcgaaaacggcctcgcggtgatgaggaagagcagagcggcgcaaaactgaccagggtagacggaattcggacgggagtgacaatcagcgccgtaccggttgcccaggacgatccgattacatcgccgatccagccccctggatcaaatccgttggatgacccggggcagaccaacatcgctacggacgcattgcctccgacagccgatcgccggcagcagggagagccaaattctaagcgtcctcgtgatgatgacgccgagccgagcattcgtaagcggtcaagggacgggcgcagccaaggggatgagggaaacagaaggtagaaaaggatcgatcatggcagatgaagaatttcgtcgagacttcagccgctccgctacgttgaactcgaataacgaaggcgctacaggcgcaccaatcccggatacatcggtgtcgactgccttccgacaaaaccgcagagaacacttaacgaccagttccttacggccattaattactggtggggccggcgaccttccaggcacttcccccgaaaatcaacggccgacaacccatgccccgaatacagcagaaatactcccggtgagatcagccgaagctccggctggccaatcagcggtctttccgaggagcaaggggtattttcgtacggccatgcaatacctgcgggagattgaaatgcagtccactgccagggcggaccacgaggcgacgtcgtcgtcacgttttggcaagggggaaagaaagcagctgcgcgaacacgagcaaaccggtgatcaaagtgaatcaatggcgaagcggagtaccagctcgggaatgcaggtgggaactattgccgcgtctttggctatgaaagatagctcgaccgcgacgccggcttcgcaagggccgcaccggtctgggatggagctggataatatcgaagggactggagagagccgtacgcaatctcagcacgaaattgcgacacaacctattgccacaagcgcttttggttcaggtcatgatgtgatcattcctggagagggccagcctgaagaaacattcgacggcgcaccatattggatggtagaaagcggggatagcgagaccaatagccttccgtcgatccaacaaggcttatcttggccagggttagatgaccttgatttgctcgccgacagcagttcaccgctcagtactcaggttgttcctcctgacgtagccgctacgaatttaagcactgaggcagggtccgccagcgtcgaaagcacccaaatcctcgccgacagtgcctattccgacgacgcgaccgaaaccggtggccaaacagcttcaggatcgatccatgaaggttcagttcgttcgcttggctcaccggaggaacgcttcgacgcctttcccgagttgaccgacgaggacttggcgcagattgacgcattctcgcgagcccgctctccttcgaggcgagatgctgcgcacgctattcatgcggtcagcttggatgatgccttctcacgcaaggatcttgccgcgggccacgacggccggcttacgaatcctgcgttccgtcaggaggcttctctgcaggaatcgagcccatcagaaacgaagtccgacgacttcccggaattaaccgacgaggacctggcacggatcgacgcactctccgaagcccgctcaacttcgaggctggatgttgcacgcactattcatgcggtcaggttggaggcctctcggcaggacccgagcccatcagaaatgaagtccgacgacttccccgaattgaccaaagaggacttagcccggatcgacgcactctctggaccccgcccgactacggggcgggaaggtgcgaacactattcagccagtcaggttggacgatgctttctcagccgaagattataccgtgggccgcggcggccggcatacgaatcctgcgttccatgaggaagcttctcggcaggacccgagcccatcagagatgaagttcgatggcttgccggagttgaccgacgaggatctggtaaggattgacgcaatctctgaaccgcgctcgaagagatctcgctccgagcaggttgtcgggggaaaatctcataggctcaaactgaacgaggctatcgaggaggcgggctcgcccactaccgtttcgggaacaagcgccgccagggcggcacctatcacgctcgaaagcggagtacctaggttgccgcaggctacccatacggaacttcctggctcggacgttgcgggtccactgcggatcgggaaggcgtcgtgtgccgatatacggcgagatgtttcggataaagggaaacgaaaagtctcgtcagattatcagattcagcaaggtcctggcgcgtcctatgcttaccagccgcgacgcatgccgacggaagcgattttcgatgctgaacggcttggtgacgaagtgctcatcgggaatgagccagttccgcggtggccttacccctgggagcacgttgttcgttttgaaacaggcaagcagctcttcgaaagattgcagaagtggccgactgcggaggagttggaaaacagtgtgatcctcgtcaaagcggatagcgcgcaacgatcctatatgccccgaaatcagctgctcttgcatctcggatccgaaaagtattacgaacgaatgaaagcgctcggtctatccgataataccttcagcggattgaagtccgatagcaaatatttttatgatacacctgctggaccacgggtaagtgaacatgattatgagttcccgcggcaggcaggcgtgcataatccagaggtgatggttcagcatcatagcggaaccttcttcgcgttttggccaaaacttctcaggctggaaaagcttgcgacagtaacgaatacgtatggcgcggaaaatgtttggctcaaatcgccagccaatgcttacatgacgccggaaacctataattccaaggttgcgaacggcgccgaaaaccttttcatcgagttcctacgtcccgctcctgtccacgaccacctgcgggaacctggaacttcaaacgcaaaaactgttgacggacgaaacgaagatcgcgcgcaacaggccgaccggttagcagatcagtcgatgggccggaacggggacggccgtgacgcgcagggtggtaagagaaccttggaaccgcgcgtgcgcgaaaggtatgggctgtagatccagctgcccgtaaagcaaacagccgtccaataggataaacggagcgtggtcacgtgatgaattcaggcaagtacacgccaataggcctggctgcgagcatagcatgttcattggccgtggggttttgtgcggccagtctctatgtcacatttcgccatggctttacgggcgaaacgatgatgactttcaacgtttttgcgttcctgtacgagacaccgccttatttgggatacgcaagtcctacgttctatcgcggactagccatcatcgttgcgacgtcaacgctcgtgttgctatgccaactactgttatcgatgcgcgagcgcgaacatcacggcactgctcgctgggccggctccggcgagatgcggcacgccaggtacctccggcgctacagtcacgtcacgggtcccatcttcggcaagacatgtggaccacgttggtttggcagctacctaagtaacggagaacaacctcacagccttgttgtcgcgccaactcgcgctggtaagggtgtcggcgtcgttatcccgacgttgctaaccttcaagggctcagtaattgccttggatgtgaaaggcgagctatttgaactcacatcgagggcgcgtaaatcaagtggcgacgcggttttcaagttctcgcccttagatccagagcggcgaacgcattgttacaatcccgtgctggatattgccgcgttgccgcccgaacggcgctttacagaaacgcgccgcctcgctgcgaatctcatcacagccaaaggcaagggagccgaaggtttcatcgacggggcacgggatcttttcgtagcaggcatattgagttgcattgagcgcggcacaccaacgatcggtgccgtttacgatctgtttgctcagccgggtgaaaagtacaaactatttgcgcaactcgcggaggaaacacaaaacaaagaggctcagcgtatcttcgacaatatggcggggaatgacaccaaaatcctgacatcctacacatcggtgctcggcgacggcggactcaatctttgggccgatccactcgttaaagcggctacaagcacctcggatttttccgtctacgatctgcggcggaagaggacttgtatttatctttgtgtcagcccgaacgatctcgaagtcatagcgcccttgatgcgtcttctcttccagcaggttgtatcaatcctgcagcgatcgctgccacttggagatgaacggcacgaagttctgtttctcctcgatgagttcaagcacttgggcaagctggaagctgtggagacggcaattacgacgatcgccggctacaagggccgcttcatgtttattattcagagtctttcggctttgacaggaacttatgatgaagctggtaagcaaaattttctcagcaatacgggtgtgcaggtattcatggcgactgctgatgacgagacgcccaactacatttccaaagctatcggcgactacacattccaggctcgctcaacgtcgtacagccaagcgcgcatgtttgatcataacatccaaatctccgaccaaggagcaccgcttttgcgcgccgaacaagtccgcctactcgacgacgattatgaaatagtccttatcaaaggccaacctcccctcaaactgagaaaagtgcgatattattcggatttcatattgaagcgaattttcgaaagccaacacggttcccttcccgagcccgcatctttgatgttgccgggagacacaaacctcgttgaaggcaagctcgaccagggaacagccgatacaacttcgcaaaaaccggtgcagattgaagagaacgaccatggggaagtcgtttccccccaaaacagaactgtggctgatggagtaatgccaatagaagttcgcccccgttcaaacgaagttgatgacgagcgggaataccaaggcgcggacgccgcaacctctgagaagcttccggaaattgctccggctcttttggcgcagcgcgaactcctcgaccagatcatttcgctccagctacgaggtagaacagcctccggcacttgaagctcgatgtgataccgcttcggatcgagtcttgttagcgccgtcagatgtcccgtttcgggaatgcattaccaacgttgaaggttgccaattgatgagacatcgccatgaaaccgtcgggaagctcaaaaactggatacgccgggtcggctagatcctcgccccaggttcgcgcaggggttacgcctgtccttcatcccaaagagccttggaaccgttttgcttgctccccatctgacggccaaatggatcaccgggaaaatttatctgcgcaattcgcttacgatggaatgagactgggcgcagccgagcggtccgcgtacgagacatgggatagagcggaccggccgagttggaaagacctgatactgagcgctcgcctgaacgcgattgacagtttcgcttggaatgtcgatgtcggagaaagtacctcttcaacttttgtttatgatggtgttcctctggcggaaggggaacggcatgcctacgaggaatgggtggagccgggacagcccagttggcaacaactcgttgtgaacgcgcgtattgaagagctaaacacctctgctgcaattccgaatgagtgtagtccccttcaagaggaattccgatcggaggcgcctaagcgtaagcggacaagctccattggtcaaaagaacggtttccctgaaccattcgaatttgatgggatgagactcggctcgcctgagcgcgaagcatatgagaattggagtaaaccgcaaccgccatcctggaaagacctgatagttgacgcccgtcttgacgcaatcgacacctccacctggctcaacgaatcaaatgacacctcggtcttcgagtacgaaggcgtcccgcttggggagggggaacgcctagcatatgaaaaatggctcgagcccgcgcaaccaggatgggaagacctggttgtggacgcacgcgttgcggaattgcaccagtctgctccgacgtggtgcgaacaccaaccaggcaacgacgtttcttccaacgagtccgggcgcatctcgggcgtcccaattaacgccgagcaggtgtcgcgtgcgttcttcgtgtacgatggagtggcgctcggagcagccgagcgcgctgcgcatgatcgttggagcaggccggaccggcccacctgggaagatcttatcatagtcgcgcgccaagctgctatcgaaggcggtgccgtttcgaatgggatgatcgggaagacatcttcctcagtctttttatacgagggaatgttgcttggggatgcggagcgtcaggcgtacggacggtggaggcagctagcccagccgcggtggcaaaatctggtggtgaacgcgcgcctggcagagctcgacccggcggcctggattcccgatgaacatgatccgtctgaggatggcggggcgactggtcttctgtcgcaagcaagcacgaccaataagtcccgcctcagtttaggtgatcaaccggaagcgcgctcgcctagtctcgcacgtgagccagcacaacagccgactcacgtgcaaaacctgacgtgcgcacaattggaagcaagacgtgctctatatttcgggccctctgggagggatgcagaccaaaccgccagcatcgccgacagtaatcgcctcgacgaggtaagcaaagttaaacggctgggtgccaagagccgtcgaggcgctaaagcaacggcctatgacgtaatttcaagtgcggaaagactgtcgtctcacgagggttgtttgacggttcagtccactcagccagaaaaagccgcttgctcgagaagcgacaatatcggcacttatggaagtcgaaaaaacgaacgagctcggcttgcgaccgagaccgggaaatacgagtcggagcatattttcgggttcaaggttgtccacgataccctgcgctcgaccaaagagggccggcggctggaaaggcctatgcccgcctatctcgaatgcaaggaacttcatcgacaacatgttggtacgggaagggggcggacccgactggtggggcgcggctggccagatgacgcaagttaccgctcggatcaaagggcaactctatcggaccctgttgcgtccacggaaggtgcaacggcgtcaaacgggtatcaattaaaccagctaggctacgcacaccagctcgctaacgacgggctgcagagcgaaacgccagatggggttatcatgccgcttcaggtcgcgactactagctacaactatacggtaagccgcgatccggtactttctccgcccagtaaagagcaagctccggaattgttgcaccttgggccacgtggccagacagaagctgtactcgctcgcgaaacagcattgacaggaagatggccaacacgcgagcgtgagcagcaagtctatcgagagtttttagccctttatgacgtcaagaaggacctggaggccaagacacttgggttgcggaagaaaaaagctgcgcttgtttccgcgttgaaccggactgccgcctcaataggcacttcacccttgaaagcccaatcgtcgagcgcagaagttgaaaaagcaactcacgagtttgatgaacgacgggtttatgatccgcgcgatcgcggtcgggacaaagcattacaacggtgacaaagctggagatgaccatcgttagcggactttgtatcgatgcttaaaaatgatggttcagcatttgaaccgcaggctgtactgctactctttgaaatcccccgcaaaaaacgcgccgtagtgcaatcgatcgccagggcctgaatttcagttgaaacacgatgtccattcaacgccttaagcgcaggtgttagacttcgcatatccttgatccgcgttggagtgtgagttatgctcgaagacggccagaaaatgcaggaacgcgagctttcggtcctcggtggtgataagaccgaaagtgcagccaccttaccgaatgacattttggtggaagttgccaaacatctgccgaccgacgatccagtcgaaacggcagccaacctcacaagctttaaacttgcgagcccgtcggttcgggcatcggtcgatcagagcgatgtcggaacgttccaccgaagcgtaaatcgactgggtgcctcaagcaaggcattgtatgacctggctgtaccccggaacggctttgccgagtatccgaactatccggaaccggaccctgctggcgagtttgcgctggcgagccagcgcatcaggacaattggtccaactttgaagttccaatcgcccgccaggaaaacagcgatcgtcaatcacattctcaatatgtcggaaggcggtgagcaggcggaggcgattatgtcgatgacgtcccatttgagtgacctcgagagggccgacaagagacgccttatcgacagagcaattgaatacttcaaggtagacgggcctatcaactacgacagtcgccattatgcagcctacgcgattgcagcggcgcacaaccagttggaactcgaacacaagtcacaaatcttcgatgcaatggcgaagagaccccagcttgcgagactctacgccgacgaacgcatccatgcgcaggagcatttggggcttgcgtcgacatccgaaggtccgcacgagcggagcaataaacaactggccacggacattcttcagatcgaacaaaaaatccgcactgagctccttcccgaaactctcagtgctcacgaccagatggtaaaagcggaaggaatcgctggatcgattgagaaggcttaccgcgatgctcgcgcgaacttaacccgggcaccgcgagggaggtcaaattctgatctcagccggtagaacttggtctgaatattcgattatttctccgacgaaagcacttggttgacgagcgaatttttaaacgagcatcgataaagcgtgcacagggaaggcccacctaatggtcagtataaataaaaaagccccgcagaaatcttctacagcgaccacgcgcaattctgatgaacgcctggttgatcagttagggcaggcgtaccttgtggaacgcgaggcgcaggaaaggcgcgcgcgacttgaagcgccgccggcgttgaaaaaatatgcctcgaaactgcaactcctcaataagctcgatgcagatttccgtggtgtgatcgcccacaagccgtttcgcagcgagcaactgcgggtcgatagcaatggagaattgacccatagtcggggtctcataaaaaagaagaagaaggttttcattcgagatcaaacaactggctcccttcggcttattcactacgagaggtctgactggaatagtgtccgtcgctatgactacgaccagaacggcgtgttgagcgagaaacatatcaaaagcaaagccggtgccttcgaagaaaaatgggagcgggacgaaaacggtgaactgatgcgcacccgatacatcgatcggcgcagacttactggacgggcgttgcatcccatttccgaggaaatcggacgtccttatgagagtggcctggagaagaggctttatcgcgttttaacgcgtcgggagggctcccaacaaaagactttcgaacgcgatgacaagggtaatctggagctcattgcaagcaaacggatgggctattcgatgtcttcacaaaaggcaccggatcgacaaacatctagaacaagtatccgcaagcttggcggagctttcagtgaatcatatagatcccggctggataaggacggccacgagttaggtcgggatgtctccgcacatcgaagcctcctcaacaagcgttcagccgtctacgatgacgctacaggggagctaaagagcagcaagcacacgtttgggaagatatacaaagcggaagcgacatacctgaacgccgaaatcaaagaggtctccaaaaaaatcctcggagttacggtcggtaaagaattgaagacattaagtggacgcgaactcgaggctcaagtattacgtgccgcggaacgtgccctccataaacaggcctggcagcacccttcagctaacccctcgcggtcgcagcgggaaaataccaacagtcatcttggaaacgaacttgatgggccgctcgaatcggatatgaccgtcgtccatcaagccggatccgggttcgtcggcgacgatcgccacgttcatgatggcggtggatccaggttgaatgaattgcacgaatcgcgatcgtcgaatgatagggaaaagcttagttcgccgagagccgaaatttgcgaccgctcgatgaatcgggatcgcaccggctcaggtactttgtcgcgatgatagctaaactaggggggcacacaccgagttgtcaagtcgccccccggcaaatgagctcatccctgctgccatattcccaaactaccaacgtttcgcgtcaaactaggttcgcctaaaggcatgaaagtcgcgtttcaacgaacaggctcgatcgaaccagcgacccaacgttaatgattacaaactgcaaaccgtaacccttaaaggtaaacatttccaaagtttcatttgtagcgattttgaatttttcatgtgtagaagcgttcctgatatcaagttatagtcctcgcaatcgatccaccatagaaagattgctcatctgagcttaaggaattcaattcttcctcagatatacttggagccacgcgggccatctaactgacttctaggttttgatgaacaccatgtcccctcaatggctttgagaccgcaccggatgctcattgagttttgaaatcagcaccgttaccgaactttccatcctggctggctgatcacacacgattggaaagcgaggggaataggagtggcaagcatgccaaccgacgacattgtaatgtccgatcccggaatggctgctgttgacacgtctgtccctacgcgcttccagacagatcttcgccagttcagtaacctgctggacgagagcaatattgtggaatgggtcgtaaaccacgccgcaaatcgcaatgcgtgcttcggacaagaccaacttaagatttcggcggctcgggcactcacgcactacaaacggccggtacaagaaatcgacctgctattccaacaggtcgtcgcaagcgacaaactgacccggcttgattctccagatggccaacctctctacacctctacagagctgagagctgcggaacagaatactgtacgtcatgtcaccaatctttccgcagaagaaagcttcggcgttccgggaaccattgttgatatggtcgccgatagaggcattttcacaccggagctcagaggagcattacattatctgtctaggcgaaatcgagcttccactatggtgggcgtagcgggttccgcaaaaacaagtgtacttggagccctgaacgaagcggtggacaggttcaacgaggaagcgctcccgaccgagaaaataaagttgattgccttcgtacccaccaaccgggcggcccaggagcttcgtgagaaaggtcttcgcgacgtcgcgacgactttcaaggcgaaagaccgcaccatcggaaaaaataccatcgtcgtgatcgacgaaatgtcgatggccaagacgcaggagatcgcgcaactaatcgagacagttgcaaatgccacttcctatcacccaaccgaaaggccgaaactgatatgtgtgggagacgatcggcaactgccccctgttggacctggtgatctgcttccgattattatggagcaagccggctgctatgaactcgtccagccgcttcgacagctcgacgcgcggtcgcgaatagaaacagaaaagctcggacgtgacatacgacgcgatgccaagagcgccgtcgggcactatctcacagcgctcgaacaaatgggcctcgtccatttcgtatatgctcctcctagcggctcaaacgtcagggcgtcagaccagatcactgaccgcatgctggaggagatgaatagagtttgcgaccgatatccggtgtatgatcgtcttgtgatggcacactccaacaggagcgttaatcgcgccaatatcgctcttcatcagaggtttgttgacaaatccggattgcaagaccagcaaatgagtgtgtggtcaagcgtaatagatagtggaagttcggaatctggaatagatgagggttcgtcgagacgcgttcagcaaaggattaatctcgtcttgggagacaggattatattcagcgaaaaccgtctgcaagcggacatccgcaatggtacttttgcaactgtagtcggacttaatagcacagaagcttcccgagctgagaatggcacatctgctggggttcgcattactgcaaggttagacggatctggacgaaccgtcacttggaccgatagcgagtttaagggttttacctacggctatgctgctacaatttataagagtcagggggccacagttgatcacgccattctcctctgtgatggtgctctttcagataagctgacctatgtcggcctgacgaggcatcgcagtcgtctcgacgtcattgcttctcccctcgtggcaaacaatgttgaggctctcagtgcaaagctcactcagcaaagcgcgccaaataattccattcaattcccagcgctcgaacctgctgccttccaagagcgctcgtcggtttcgaacgcgcacttgctaaggccgctcgaccagatggaaatctctccaacgacgccgctttccttccaaggcagacaagaaagctccttcggggagaaccagctgcacgaaccatccacatcggatgtggaaatgccggaaagcgcggacctttacccgagcgccattgacttcgaagttttccagtcttctgtcatcacgactgaagagcaaatgcaaccggaattctgcgggtcggaatcgacggctaacacctcagcccacgaaagccaccaagtcacgatcgcaacggtaacaaacctggggatagcgatcgagaaacggaaacgagcggcggcaaaggaagaaatcgattctcgcaaaaaaatggcccgtcactcagttagttctgccgaggaagttgaagatatcacttccctgttcgaacgattgaaactggcaacctcggtcaccaacacagttcaaccgacgtatgcggacgtcgatcatatcatcggtactgatggccgagtgggtccaataccgcaccgggaagatgatccgggatcaaattgggaattgtcgtcaacgaacgccccctcaaacgtctcagagaaacgatcgaccaaagactcaggagaaaaaaatatggcttcgaatgaccagaaaatgcaaggcgctgactctgcaggcagcgagcgtcatttttcgcagacttccattgtggaagccctgcaggctggcgatcacaagaagctcgtggaaacgctcgccgcaaccggctcccttgtcgagaaggcggacgccgggtcggcgctgaaagcaatggcggatgcttacgaaagggatatcaaggcagatcccgaaaaggtccgcatgctctatgccaatcggcgcgttgatgtagatgcgctggccaaggagatcgaaaaacagggccttgcatccggtcgcctgagtggcgaccctgtcagcttcaaggcgttcaacaacaaggatatccgtttcagggtcggcgacaggctcagcgtcaccagcagctacaggaatctcattgccggtgaagccggccggatcgaaaagatcgaaggcaaatccgttaccttcaaacccgatggcagcagtcagagcaagaccttcgaggccagcaccggcgagccgggtgacaggggcgtcaagggctacaaaatcgaaggcccgatgacggtcatcggctccgcctatgaacttacgcgacatgatgacggcaaacgtgttgaccaaatctatctcttgaacgacgctgcccatggcatcaacgccaatagcgctttgctgagcaaggccgacgagcggacgcagcttttcacttcgctcaaggacaccgccgacagggacatcttggccaggcaactgggaaagccgggcagcgagctctaccaggacaaattcccagccttgccggactacacagccgccatcgatcggattgcaaaacgccaggaagttgtcgcggcacgtggcgaggagaaaacttccgccccgatagacctggcgccccaaacgccgcccgacgctgccgatgcggcagtcaataaccagaaaagaatcgtcgaggccttgcaggcaggcgaccacaagaagcttgtggaaacgctagccgcaaccggctcccttgttgagaacacaaatctcgtatcaacgttgaaagcgatagcgcagacttatgaaagagacattagtgcggaccccgagaaagtccgcgctctctacgccaacaaacgtgatcatgtagatttgcttgccgaagagatcgaaaagcagggccttgcatccggtcgcctgagtggcgaccctgtcagcttcaaggcgtttaacaacaaggatatccgtttcagggtcggtgacaggctcagcgtcactagcagctataggaatctcattgccggtgaagccggccggatcgaaaagatcgaaggcaaatccgttaccttcaaacccgatggcagcagtcagagcaagaccttcgaggccagcaccggcgagccgggtgacaggggtgtcaagggctataagattgaggggcccacgacaatcatcggctccgcctacgaaatcagaaatcacgacgatggcaggcgcgtcgatcaggtttatgtcttgcacagtgccattttcggctcaaatgccgcgagcgccctgttgagcaaggccgacgaacgaacccaggttttcaccgtgcaaagcgacacggctgacagacacatcttggccagccaactcagcaagcctggcagcgagctctatcaggacaaattcccagtctcgccggactacgcagccgcgatcgaccggatcgcgaaacgcgaggaacttagggccggacgtggcgaggaaagtcctactgttcaaatggagccggtgaaccaaacgccctacgaggcgggacattggacgcctgacagtcaaaaatctgtggtggaagccctgcaggctggcgatcacaagaagctcgtggaaacgctcgccgcaaccggctcccttgtcgagaaagcggacgccgggtcggcgctgaaagcaatggcggatgcttacgaaagggatatcaaggcagatcccgaaaaggtccgcatgctctatgccaatcggcgcgttgatgtagatgcgctggccaaggagatcgaaaaacagggccttgcatccggtcgcctgagtggcgaccctgtcagcttcaaggcgttcaacaacaaggatatccgtttcagggtcggcgacaggctcagcgtcaccagcagctacaggaatctcattgccggtgaagccggccggatcgaaaagatcgaaggcaaatccgttaccttcaaacccgatggcagcagtcagagcaagaccttcgaggccagcaccggcgagccgggtgacaggggcgtcaagggctacaaaatcgaaggcccgatgacggtcatcggctccgcctatgaacttacgcgacatgatgacggcaaacgtgttgaccaaatctatctcttgaacgacgctgcccatggcatcaacgccaatagcgctttgctgagcaaggccgacgagcggacgcagcttttcacttcgctcaaggacaccgccgacagggacatcttggccaggcaactgggaaagccgggcagcgagctctaccaggacaaattcccagccttgccggactacacagccgccatcgatcggattgcaaaacgccaggaagttgtcgcggcacgtggcgaggtcaagccgattgagcgcaccgaagcgcccgaaataccccaggttcaagctactatcgttggcgagacctcgatcattcggttgcccgatcggataaaaaccaatcgcgagaagccccaagaacttgatgtagtctcgaaagaagggcacgaaactacaggtagtctgaggcagagtgtccaagagagtaatgcagcaccaaaacagacttcgccgaaggcggcaaatgacgtggatcggctgacacgggattttgacgagcgcatccgcgtccgcggggatggacgtggactctaagtaaaagagggtgcgtaacgcgcaccctcttccactcgctgtccctgtatccgttctctgtcgcgagaacgtcgatcaccttttcggaactctttccagatctgcttgaggttccgttgccggagaaagcattggcgaggattgctgggatccggcggacggcgatgcgatgtgccggttcggtgaccaattccatcagagaccggccgacgtatggcctgccgaagtggaaacggctgatcagcttgcgaggccgagctacttccccggcaagcgtcgggttcggggcattgttttcctcgaccatggcggtattttgctgagttgcccggctaaactaggctttggcagcctgttctttgaactatgtacctcgcgaatgcatctagatccaatccaatatgcatggcatgccgaatccatgtgggagtttattcttgacacagatatttatgatataataactgagtaagcttaacataaggaggaaaaacatatgttacgcagcagcaacgatgttacgcagcagggcagtcgccctaaaacaaagttaggtggctcaagtatgggcatcattcgcacatgtaggctcggccctgaccaagtcaaatccatgcgggctgctcttgatcttttcggtcgtgagttcggagacgtagccacctactcccaacatcagccggactccgattacctcgggaacttgctccgtagtaagacattcatcgcgcttgctgccttcgaccaagaagcggttgttggcgctctcgcggcttacgttctgcccaagtttgagcagccgcgtagtgagatctatatctatgatctcgcagtctccggcgagcaccggaggcagggcattgccaccgcgctcatcaatctcctcaagcatgaggccaacgcgcttggtgcttatgtgatctacgtgcaagcagattacggtgacgatcccgcagtggctctctatacaaagttgggcatacgggaagaagtgatgcactttgatatcgacccaagtaccgccacctaataatgtctaacaattcgttcaagccgacgccgcttcgcggcgcggcttaactcaagcgttagatgcactatacgtaccaatccaaatcggatccccctgcagggctgagataggtgcctcactgattaagcattggtaactgtcagaccaagtttactcatatatactttagattgatttaaaacttcatttttaatttaaaaggatctaggtgaagatcctttttgataatctcatgaccaaaatcccttaacgtgagttttcgttccactgagcgtcagaccccgtagaaaagatcaaaggatcttcttgagatcctttttttctgcgcgtaatctgctgcttgcaaacaaaaaaaccaccgctaccagcggtggtttgtttgccggatcaagagctaccaactctttttccgaaggtaactggcttcagcagagcgcagataccaaatactgtccttctagtgtagccgtagttaggccaccacttcaagaactctgtagcaccgcctacatacctcgctctgctaatcctgttaccagtggctgctgccagtggcgataagtcgtgtcttaccgggttggactcaagacgatagttaccggataaggcgcagcggtcgggctgaacggggggttcgtgcacacagcccagcttggagcgaacgacctacaccgaactgagatacctacagcgtgagctatgagaaagcgccacgcttcccgaagggagaaaggcggacaggtatccggtaagcggcagggtcggaacaggagagcgcacgagggagcttccagggggaaacgcctggtatctttatagtcctgtcgggtttcgccacctctgacttgagcgtcgatttttgtgatgctcgtcaggggggcggagcctatggaaaaacgccagcaacgcggcctttttacggttcctggccttttgctggccttttgctcacatgttctttcctgcgttatcccctgattctgtggataaccgtattaccgcctttgagtgagctgataccgctcgccgcagccgaacgaccgagcgcagcgagtcagtgagcgaggaagcggaagagcgcctgatgcggtattttctccttacgcatctgtgcggtatttcacaccgcatatggtgcactctcagtacaatctgctctgatgccgcatagttaagccagtatacactccgctatcgctacgtgactgggtcatggctgcgccccgacacccgccaacacccgctgacgcgccctgacgggcttgtctgctcccggcatccgcttacagacaagctgtgaccgtctccgggagctgcatgtgtcagaggttttcaccgtcatcaccgaaacgcgcgaggcagcagatctatcgatggtacctatctgcagacggaagggattcctgttaattaaaacagcttgcgtcatgcggtcgctgcgtatatgatgcgatgagtaaataaacaaatacgcaaggggaacgcatgaaggttatcgctgtacttaaccagaaaggcgggtcaggcaagacgaccatcgcaacccatctagcccgcgccctgcaactcgccggggccgatgttctgttagtcgattccgatccccagggcagtgcccgcgattgggcggccgtgcgggaagatcaaccgctaaccgttgtcggcatcgaccgcccgacgattgaccgcgacgtgaaggccatcggccggcgcgacttcgtagtgatcgacggagcgccccaggcggcggacttggctgtgtccgcgatcaaggcagccgacttcgtgctgattccggtgcagccaagcccttacgacatatgggccaccgccgacctggtggagctggttaagcagcgcattgaggtcacggatggaaggctacaagcggcctttgtcgtgtcgcgggcgatcaaaggcacgcgcatcggcggtgaggttgccgaggcgctggccgggtacgagctgcccattcttgagtcccgtatcacgcagcgcgtgagctacccaggcactgccgccgccggcacaaccgttcttgaatcagaacccgagggcgacgctgcccgcgaggtccaggcgctggccgctgaaattaaatcaaaactcatttgagttaatgaggtaaagagaaaatgagcaaaagcacaaacacgctaagtgccggccgtccgagcgcacgcagcagcaaggctgcaacgttggccagcctcgcagacacgccagccatgaagcgggtcaactttcagttgccggcggaggatcacaccaagctgaagatgtacgcggtacgccaaggcaagaccattaccgagctgctatctgaatacatcgcgcagctaccagagtaaatgagcaaatgaataaatgagtagatgaattttagcggctaaaggaggcggcatggaaaatcaagaacaaccaggcaccgacgccgtggaatgccccatgtgtggaggaacgggcggttggccaggcgtaagcggctgggttgcctgccggccctgcaatggcactggaacccccaagcccgaggaatcggcgtgagcggtcgcaaaccatccggcccggtacaaatcggcgcggcgctgggtgatgacctggtggagaagttgaaggcagcgcaggccgcccagcggcaacgcatcgaggcagaagcacgccccggtgaatcgtggcaagcagccgctgatcgaatccgcaaagaatcccggcaaccgccggcagccggtgcgccgtcgattaggaagccgcccaagggcgacgagcaaccagattttttcgttccgatgctctatgacgtgggcacccgcgatagtcgcagcatcatggacgtggccgttttccgtctgtcgaagcgtgaccgacgagctggcgaggtgatccgctacgagcttccagacgggcacgtagaggtttccgcagggccggcaggcatggccagtgtgtgggattacgacctggtactgatggcggtttcccatctaaccgaatccatgaaccgataccgggaagggaagggagacaagcccggccgcgtgttccgtccacacgttgcggacgtactcaagttctgccggcgagccgatggcggaaagcagaaagacgacctggtagaaacctgcattcggttaaacaccacgcacgttgccatgcagcgtacgaagaaggccaagaacggccgcctggtgacggtatccgagggtgaagccttgattagccgctacaagatcgtaaagagcgaaaccgggcggccggagtacatcgagatcgagctagctgattggatgtaccgcgagatcacagaaggcaagaacccggacgtgctgacggttcaccccgattactttttgatcgatcccggcatcggccgttttctctaccgcctggcacgccgcgccgcaggcaaggcagaagccagatggttgttcaagacgatctacgaacgcagtggcagcgccggagagttcaagaagttctgtttcaccgtgcgcaagctgatcgggtcaaatgacctgccggagtacgatttgaaggaggaggcggggcaggctggcccgatcctagtcatgcgctaccgcaacctgatcgagggcgaagcatccgccggttcctaatgtacggagcagatgctagggcaaattgccctagcaggggaaaaaggtcgaaaaggtctctttcctgtggatagcacgtacattgggaacccaaagccgtacattgggaaccggaacccgtacattgggaacccaaagccgtacattgggaaccggtcacacatgtaagtgactgatataaaagagaaaaaaggcgatttttccgcctaaaactctttaaaacttattaaaactcttaaaacccgcctggcctgtgcataactgtctggccagcgcacagccgaagagctgcaaaaagcgcctacccttcggtcgctgcgctccctacgccccgccgcttcgcgtcggcctatgcatataattgtggtttcaaaatcggctccgtcgatactatgttatacgccaactctgaaaacaactttgaaaaagctgttttctggtatttaaatcggaaccctaaagggagcccccgatttagagcttgacggggaaagccggcgaacgtggcgagaaaggaagggaagaaagcgaaaggagcgggcgctagggcgctggcaagtgtagcggtcacgctgcgcgtaaccaccacacccgccgcgcttaatgcgccgctacagggcgcgtactatggttgctttgacgtatgcggtgtgaaataccgcacagatgcgtaaggagaaaataccgcatcagg

SEQ ID NO: 240 - DNA, 10808 bp, Artificial Sequence
  PHP71193
cagtcacgacgttgtaaaacgacggccagtgagcgcgcgtaatacgactcactatagggcgaattggagctccaccgcggtggcggccgctctagaactagtggatcccccagcttgcatgcctgcagtgcagcgtgacccggtcgtgcccctctctagagataatgagcattgcatgtctaagttataaaaaattaccacatattttttttgtcacacttgtttgaagtgcagtttatctatctttatacatatatttaaactttactctacgaataatataatctatagtactacaataatatcagtgttttagagaatcatataaatgaacagttagacatggtctaaaggacaattgagtattttgacaacaggactctacagttttatctttttagtgtgcatgtgttctcctttttttttgcaaatagcttcacctatataatacttcatccattttattagtacatccatttagggtttagggttaatggtttttatagactaatttttttagtacatctattttattctattttagcctctaaattaagaaaactaaaactctattttagtttttttatttaataatttagatataaaatagaataaaataaagtgactaaaaattaaacaaataccctttaagaaattaaaaaaactaaggaaacatttttcttgtttcgagtagataatgccagcctgttaaacgccgtcgacgagtctaacggacaccaaccagcgaaccagcagcgtcgcgtcgggccaagcgaagcagacggcacggcatctctgtcgctgcctctggacccctctcgagagttccgctccaccgttggacttgctccgctgtcggcatccagaaattgcgtggcggagcggcagacgtgagccggcacggcaggcggcctcctcctcctctcacggcaccggcagctacgggggattcctttcccaccgctccttcgctttcccttcctcgcccgccgtaataaatagacaccccctccacaccctctttccccaacctcgtgttgttcggagcgcacacacacacaaccagatctcccccaaatccacccgtcggcacctccgcttcaaggtacgccgctcgtcctcccccccccccctctctaccttctctagatcggcgttccggtccatgcatggttagggcccggtagttctacttctgttcatgtttgtgttagatccgtgtttgtgttagatccgtgctgctagcgttcgtacacggatgcgacctgtacgtcagacacgttctgattgctaacttgccagtgtttctctttggggaatcctgggatggctctagccgttccgcagacgggatcgatttcatgattttttttgtttcgttgcatagggtttggtttgcccttttcctttatttcaatatatgccgtgcacttgtttgtcgggtcatcttttcatgcttttttttgtcttggttgtgatgatgtggtctggttgggcggtcgttctagatcggagtagaattctgtttcaaactacctggtggatttattaattttggatctgtatgtgtgtgccatacatattcatagttacgaattgaagatgatggatggaaatatcgatctaggataggtatacatgttgatgcgggttttactgatgcatatacagagatgctttttgttcgcttggttgtgatgatgtggtgtggttgggcggtcgttcattcgttctagatcggagtagaatactgtttcaaactacctggtgtatttattaattttggaactgtatgtgtgtgtcatacatcttcatagttacgagtttaagatggatggaaatatcgatctaggataggtatacatgttgatgtgggttttactgatgcatatacatgatggcatatgcagcatctattcatatgctctaaccttgagtacctatctattataataaacaagtatgttttataattattttgatcttgatatacttggatgatggcatatgcagcagctatatgtggatttttttagccctgccttcatacgctatttatttgcttggtactgtttcttttgtcgatgctcaccctgttgtttggtgttacttctgcaggtcgactctagaggatccatggcaccgaagaagaagcgcaaggtgatggacaagaagtacagcatcggcctcgacatcggcaccaactcggtgggctgggccgtcatcacggacgaatataaggtcccgtcgaagaagttcaaggtcctcggcaatacagaccgccacagcatcaagaaaaacttgatcggcgccctcctgttcgatagcggcgagaccgcggaggcgaccaggctcaagaggaccgccaggagacggtacactaggcgcaagaacaggatctgctacctgcaggagatcttcagcaacgagatggcgaaggtggacgactccttcttccaccgcctggaggaatcattcctggtggaggaggacaagaagcatgagcggcacccaatcttcggcaacatcgtcgacgaggtaagtttctgcttctacctttgatatatatataataattatcattaattagtagtaatataatatttcaaatatttttttcaaaataaaagaatgtagtatatagcaattgcttttctgtagtttataagtgtgtatattttaatttataacttttctaatatatgaccaaaacatggtgatgtgcaggtggcctaccacgagaagtacccgacaatctaccacctccggaagaaactggtggacagcacagacaaggcggacctccggctcatctaccttgccctcgcgcatatgatcaagttccgcggccacttcctcatcgagggcgacctgaacccggacaactccgacgtggacaagctgttcatccagctcgtgcagacgtacaatcaactgttcgaggagaaccccataaacgctagcggcgtggacgccaaggccatcctctcggccaggctctcgaaatcaagaaggctggagaaccttatcgcgcagttgccaggcgaaaagaagaacggcctcttcggcaaccttattgcgctcagcctcggcctgacgccgaacttcaaatcaaacttcgacctcgcggaggacgccaagctccagctctcaaaggacacctacgacgacgacctcgacaacctcctggcccagataggagaccagtacgcggacctcttcctcgccgccaagaacctctccgacgctatcctgctcagcgacatccttcgggtcaacaccgaaattaccaaggcaccgctgtccgccagcatgattaaacgctacgacgagcaccatcaggacctcacgctgctcaaggcactcgtccgccagcagctccccgagaagtacaaggagatcttcttcgaccaatcaaaaaacggctacgcgggatatatcgacggcggtgccagccaggaagagttctacaagttcatcaaaccaatcctggagaagatggacggcaccgaggagttgctggtcaagctcaacagggaggacctcctcaggaagcagaggaccttcgacaacggctccatcccgcatcagatccacctgggcgaactgcatgccatcctgcggcgccaggaggacttctacccgttcctgaaggataaccgggagaagatcgagaagatcttgacgttccgcatcccatactacgtgggcccgctggctcgcggcaactcccggttcgcctggatgacccggaagtcggaggagaccatcacaccctggaactttgaggaggtggtcgataagggcgctagcgctcagagcttcatcgagcgcatgaccaacttcgataaaaacctgcccaatgaaaaagtcctccccaagcactcgctgctctacgagtacttcaccgtgtacaacgagctcaccaaggtcaaatacgtcaccgagggcatgcggaagccggcgttcctgagcggcgagcagaagaaggcgatagtggacctcctcttcaagaccaacaggaaggtgaccgtgaagcaattaaaagaggactacttcaagaaaatagagtgcttcgactccgtggagatctcgggcgtggaggatcggttcaacgcctcactcggcacgtatcacgacctcctcaagatcattaaagacaaggacttcctcgacaacgaggagaacgaggacatcctcgaggacatcgtcctcaccctgaccctgttcgaggaccgcgaaatgatcgaggagaggctgaagacctacgcgcacctgttcgacgacaaggtcatgaaacagctcaagaggcgccgctacactggttggggaaggctgtcccgcaagctcattaatggcatcagggacaagcagagcggcaagaccatcctggacttcctcaagtccgacgggttcgccaaccgcaacttcatgcagctcattcacgacgactcgctcacgttcaaggaagacatccagaaggcacaggtgagcgggcagggtgactccctccacgaacacatcgccaacctggccggctcgccggccattaaaaagggcatcctgcagacggtcaaggtcgtcgacgagctcgtgaaggtgatgggccggcacaagcccgaaaatatcgtcatagagatggccagggagaaccagaccacccaaaaagggcagaagaactcgcgcgagcggatgaaacggatcgaggagggcattaaagagctcgggtcccagatcctgaaggagcaccccgtggaaaatacccagctccagaatgaaaagctctacctctactacctgcagaacggccgcgacatgtacgtggaccaggagctggacattaatcggctatcggactacgacgtcgaccacatcgtgccgcagtcgttcctcaaggacgatagcatcgacaacaaggtgctcacccggtcggataaaaatcggggcaagagcgacaacgtgcccagcgaggaggtcgtgaagaagatgaaaaactactggcgccagctcctcaacgcgaaactgatcacccagcgcaagttcgacaacctgacgaaggcggaacgcggtggcttgagcgaactcgataaggcgggcttcataaaaaggcagctggtcgagacgcgccagatcacgaagcatgtcgcccagatcctggacagccgcatgaatactaagtacgatgaaaacgacaagctgatccgggaggtgaaggtgatcacgctgaagtccaagctcgtgtcggacttccgcaaggacttccagttctacaaggtccgcgagatcaacaactaccaccacgcccacgacgcctacctgaatgcggtggtcgggaccgccctgatcaagaagtacccgaagctggagtcggagttcgtgtacggcgactacaaggtctacgacgtgcgcaaaatgatcgccaagtccgagcaggagatcggcaaggccacggcaaaatacttcttctactcgaacatcatgaacttcttcaagaccgagatcaccctcgcgaacggcgagatccgcaagcgcccgctcatcgaaaccaacggcgagacgggcgagatcgtctgggataagggccgggatttcgcgacggtccgcaaggtgctctccatgccgcaagtcaatatcgtgaaaaagacggaggtccagacgggcgggttcagcaaggagtccatcctcccgaagcgcaactccgacaagctcatcgcgaggaagaaggattgggacccgaaaaaatatggcggcttcgacagcccgaccgtcgcatacagcgtcctcgtcgtggcgaaggtggagaagggcaagtcaaagaagctcaagtccgtgaaggagctgctcgggatcacgattatggagcggtcctccttcgagaagaacccgatcgacttcctagaggccaagggatataaggaggtcaagaaggacctgattattaaactgccgaagtactcgctcttcgagctggaaaacggccgcaagaggatgctcgcctccgcaggcgagttgcagaagggcaacgagctcgccctcccgagcaaatacgtcaatttcctgtacctcgctagccactatgaaaagctcaagggcagcccggaggacaacgagcagaagcagctcttcgtggagcagcacaagcattacctggacgagatcatcgagcagatcagcgagttctcgaagcgggtgatcctcgccgacgcgaacctggacaaggtgctgtcggcatataacaagcaccgcgacaaaccaatacgcgagcaggccgaaaatatcatccacctcttcaccctcaccaacctcggcgctccggcagccttcaagtacttcgacaccacgattgaccggaagcggtacacgagcacgaaggaggtgctcgatgcgacgctgatccaccagagcatcacagggctctatgaaacacgcatcgacctgagccagctgggcggagacaagagaccacgggaccgccacgatggcgagctgggaggccgcaagcgggcaaggtaggtaccgttaacctagacttgtccatcttctggattggccaacttaattaatgtatgaaataaaaggatgcacacatagtgacatgctaatcactataatgtgggcatcaaagttgtgtgttatgtgtaattactagttatctgaataaaagagaaagagatcatccatatttcttatcctaaatgaatgtcacgtgtctttataattctttgatgaaccagatgcatttcattaaccaaatccatatacatataaatattaatcatatataattaatatcaattgggttagcaaaacaaatctagtctaggtgtgttttgcgaatgcggccgggctgcaggaattcgatagctttgagagtacaatgatgaacctagattaatcaatgccaaagtctgaaaaatgcaccctcagtctatgatccagaaaatcaagattgcttgaggccctgttcggttgttccggattagagccccggattaattcctagccggattacttctctaatttatatagattttgatgagctggaatgaatcctggcttattccggtacaaccgaacaggccctgaaggataccagtaatcgctgagctaaattggcatgctgtcagagtgtcagtattgcagcaaggtagtgagataaccggcatcatggtgccagtttgatggcaccattagggttagagatggtggccatgggcgcatgtcctggccaactttgtatgatatatggcagggtgaataggaaagtaaaattgtattgtaaaaagggatttcttctgtttgttagcgcatgtacaaggaatgcaagttttgagcgagggggcatcaaagatctggctgtgtttccagctgtttttgttagccccatcgaatccttgacataatgatcccgcttaaataagcaacctcgcttgtatagttccttgtgctctaacacacgatgatgataagtcgtaaaatagtggtgtccaaagaatttccaggcccagttgtaaaagctaaaatgctattcgaatttctactagcagtaagtcgtgtttagaaattatttttttatataccttttttccttctatgtacagtaggacacagtgtcagcgccgcgttgacggagaatatttgcaaaaaagtaaaagagaaagtcatagcggcgtatgtgccaaaaacttcgtcacagagagggccataagaaacatggcccacggcccaatacgaagcaccgcgacgaagcccaaacagcagtccgtaggtggagcaaagcgctgggtaatacgcaaacgttttgtcccaccttgactaatcacaagagtggagcgtaccttataaaccgagccgcaagcaccgaattgtacgtaacgtgcagtacgttttagagctagaaatagcaagttaaaataaggctagtccgttatcaacttgaaaaagtggcaccgagtcggtgctttttttttgcggccatcaagcttatcgataccgtcgacctcgagggggggcccggtacccagcttttgttccctttagtgagggttaattgcgcgcttggcgtaatcatggtcatagctgtttcctgtgtgaaattgttatccgctcacaattccacacaacatacgagccggaagcataaagtgtaaagcctggggtgcctaatgagtgagctaactcacattaattgcgttgcgctcactgcccgctttccagtcgggaaacctgtcgtgccagctgcattaatgaatcggccaacgcgcggggagaggcggtttgcgtattgggcgctcttccgcttcctcgctcactgactcgctgcgctcggtcgttcggctgcggcgagcggtatcagctcactcaaaggcggtaatacggttatccacagaatcaggggataacgcaggaaagaacatgtgagcaaaaggccagcaaaaggccaggaaccgtaaaaaggccgcgttgctggcgtttttccataggctccgcccccctgacgagcatcacaaaaatcgacgctcaagtcagaggtggcgaaacccgacaggactataaagataccaggcgtttccccctggaagctccctcgtgcgctctcctgttccgaccctgccgcttaccggatacctgtccgcctttctcccttcgggaagcgtggcgctttctcatagctcacgctgtaggtatctcagttcggtgtaggtcgttcgctccaagctgggctgtgtgcacgaaccccccgttcagcccgaccgctgcgccttatccggtaactatcgtcttgagtccaacccggtaagacacgacttatcgccactggcagcagccactggtaacaggattagcagagcgaggtatgtaggcggtgctacagagttcttgaagtggtggcctaactacggctacactagaagaacagtatttggtatctgcgctctgctgaagccagttaccttcggaaaaagagttggtagctcttgatccggcaaacaaaccaccgctggtagcggtggtttttttgtttgcaagcagcagattacgcgcagaaaaaaaggatctcaagaagatcctttgatcttttctacggggtctgacgctcagtggaacgaaaactcacgttaagggattttggtcatgagattatcaaaaaggatcttcacctagatccttttaaattaaaaatgaagttttaaatcaatctaaagtatatatgagtaaacttggtctgacagttaccaatgcttaatcagtgaggcacctatctcagcgatctgtctatttcgttcatccatagttgcctgactccccgtcgtgtagataactacgatacgggagggcttaccatctggccccagtgctgcaatgataccgcgagacccacgctcaccggctccagatttatcagcaataaaccagccagccggaagggccgagcgcagaagtggtcctgcaactttatccgcctccatccagtctattaattgttgccgggaagctagagtaagtagttcgccagttaatagtttgcgcaacgttgttgccattgctacaggcatcgtggtgtcacgctcgtcgtttggtatggcttcattcagctccggttcccaacgatcaaggcgagttacatgatcccccatgttgtgcaaaaaagcggttagctccttcggtcctccgatcgttgtcagaagtaagttggccgcagtgttatcactcatggttatggcagcactgcataattctcttactgtcatgccatccgtaagatgcttttctgtgactggtgagtactcaaccaagtcattctgagaatagtgtatgcggcgaccgagttgctcttgcccggcgtcaatacgggataataccgcgccacatagcagaactttaaaagtgctcatcattggaaaacgttcttcggggcgaaaactctcaaggatcttaccgctgttgagatccagttcgatgtaacccactcgtgcacccaactgatcttcagcatcttttactttcaccagcgtttctgggtgagcaaaaacaggaaggcaaaatgccgcaaaaaagggaataagggcgacacggaaatgttgaatactcatactcttcctttttcaatattattgaagcatttatcagggttattgtctcatgagcggatacatatttgaatgtatttagaaaaataaacaaataggggttccgcgcacatttccccgaaaagtgccacctaaattgtaagcgttaatattttgttaaaattcgcgttaaatttttgttaaatcagctcattttttaaccaataggccgaaatcggcaaaatcccttataaatcaaaagaatagaccgagatagggttgagtgttgttccagtttggaacaagagtccactattaaagaacgtggactccaacgtcaaagggcgaaaaaccgtctatcagggcgatggcccactacgtgaaccatcaccctaatcaagttttttggggtcgaggtgccgtaaagcactaaatcggaaccctaaagggagcccccgatttagagcttgacggggaaagccggcgaacgtggcgagaaaggaagggaagaaagcgaaaggagcgggcgctagggcgctggcaagtgtagcggtcacgctgcgcgtaaccaccacacccgccgcgcttaatgcgccgctacagggcgcgtcccattcgccattcaggctgcgcaactgttgggaagggcgatcggtgcgggcctcttcgctattacgccagctggcgaaagggggatgtgctgcaaggcgattaagttgggtaacgccagggttttcc

SEQ ID NO: 241 - DNA, 5120 bp, Artificial Sequence
  PHP71788
gtttacccgccaatatatcctgtcaaacactgatagtttaaactgaaggcgggaaacgacaatctgatcatgagcggagaattaagggagtcacgttatgacccccgccgatgacgcgggacaagccgttttacgtttggaactgacagaaccgcaacgttgaaggagccactcagcaagctggtacgattgtaatacgactcactatagggcgaattgagcgctgtttaaacgctcttcaactggaagagcggttactaccggctggatggcggggccttgatcgtgcaccgccggcgtccggaggttaccggccagaatggcccggaccgaagactctcggtccgaagcttgcgatagcggccgcgcagaatttacggtccagcacgggcatgccgcgcgggctgactttgctccactgactcgatcatgtgcggattccatcgcggcgtagcgtagccaaccgcaacgcaaaccgacttcatcttttttttttattatgaacaaaaggagatcgagagaaacgtgaacggtaaataatatatctgatcccatgcatgcacgctgcctgggtcgatctcgctctcgctccgcccagacgaacatgcatgctggtcaggctcaacgctcaggcgggcaagctgtgggaggacatgggatgggagaggaggacacatgcatgctggccagtcaggcactgtgctggcacatgaggtagggataggggggccctcggccagtgtccaggccgcatgcatgcatgccccccctgctgctcgaccgaacaacgttggatgcctggattgatgcaacagtttggacggacggaccatacgttatgtaccagtaggtacctcactgactagctaatcgagctagttaccctatgaggtgacatgaagcgctcacggttactatgacggttagcttcacgactgttggtggcagtagcgtacgacttagctatagttccggacttaccgataacttcgtatagcatacattatacgaagttatggcgccgctagcctgcagtgcagcgtgacccggtcgtgcccctctctagagataatgagcattgcatgtctaagttataaaaaattaccacatattttttttgtcacacttgtttgaagtgcagtttatctatctttatacatatatttaaactttactctacgaataatataatctatagtactacaataatatcagtgttttagagaatcatataaatgaacagttagacatggtctaaaggacaattgagtattttgacaacaggactctacagttttatctttttagtgtgcatgtgttctcctttttttttgcaaatagcttcacctatataatacttcatccattttattagtacatccatttagggtttagggttaatggtttttatagactaatttttttagtacatctattttattctattttagcctctaaattaagaaaactaaaactctattttagtttttttatttaataatttagatataaaatagaataaaataaagtgactaaaaattaaacaaataccctttaagaaattaaaaaaactaaggaaacatttttcttgtttcgagtagataatgccagcctgttaaacgccgtcgacgagtctaacggacaccaaccagcgaaccagcagcgtcgcgtcgggccaagcgaagcagacggcacggcatctctgtcgctgcctctggacccctctcgagagttccgctccaccgttggacttgctccgctgtcggcatccagaaattgcgtggcggagcggcagacgtgagccggcacggcaggcggcctcctcctcctctcacggcaccggcagctacgggggattcctttcccaccgctccttcgctttcccttcctcgcccgccgtaataaatagacaccccctccacaccctctttccccaacctcgtgttgttcggagcgcacacacacacaaccagatctcccccaaatccacccgtcggcacctccgcttcaaggtacgccgctcgtcctcccccccccccctctctaccttctctagatcggcgttccggtccatgcatggttagggcccggtagttctacttctgttcatgtttgtgttagatccgtgtttgtgttagatccgtgctgctagcgttcgtacacggatgcgacctgtacgtcagacacgttctgattgctaacttgccagtgtttctctttggggaatcctgggatggctctagccgttccgcagacgggatcgatttcatgattttttttgtttcgttgcatagggtttggtttgcccttttcctttatttcaatatatgccgtgcacttgtttgtcgggtcatcttttcatgcttttttttgtcttggttgtgatgatgtggtctggttgggcggtcgttctagatcggagtagaattctgtttcaaactacctggtggatttattaattttggatctgtatgtgtgtgccatacatattcatagttacgaattgaagatgatggatggaaatatcgatctaggataggtatacatgttgatgcgggttttactgatgcatatacagagatgctttttgttcgcttggttgtgatgatgtggtgtggttgggcggtcgttcattcgttctagatcggagtagaatactgtttcaaactacctggtgtatttattaattttggaactgtatgtgtgtgtcatacatcttcatagttacgagtttaagatggatggaaatatcgatctaggataggtatacatgttgatgtgggttttactgatgcatatacatgatggcatatgcagcatctattcatatgctctaaccttgagtacctatctattataataaacaagtatgttttataattattttgatcttgatatacttggatgatggcatatgcagcagctatatgtggatttttttagccctgccttcatacgctatttatttgcttggtactgtttcttttgtcgatgctcaccctgttgtttggtgttacttctgcaggtcgactttaacttagcctagggaagttcctattccgaagttcctattctctagaaagtataggaacttcagatccaccgggatccaccatggttgaacaagatggattgcacgcaggttctccggccgcttgggtggagaggctattcggctatgactgggcacaacagacaatcggctgctctgatgccgccgtgttccggctgtcagcgcaggggcgcccggttctttttgtcaagaccgacctgtccggtgccctgaatgaactgcaggacgaggcagcgcggctatcgtggctggccacgacgggcgttccttgcgcagctgtgctcgacgttgtcactgaagcgggaagggactggctgctattgggcgaagtgccggggcaggatctcctgtcatctcaccttgctcctgccgagaaagtatccatcatggctgatgcaatgcggcggctgcatacgcttgatccggctacctgcccattcgaccaccaagcgaaacatcgcatcgagcgagcacgtactcggatggaagccggtcttgtcgatcaggatgatctggacgaagagcatcaggggctcgcgccagccgaactgttcgccaggctcaaggcgcgcatgcccgacggcgatgatctcgtcgtgacccatggcgatgcctgcttgccgaatatcatggtggaaaatggccgcttttctggattcatcgactgtggccggctgggtgtggcggaccgctatcaggacatagcgttggctacccgtgatattgctgaagagcttggcggcgaatgggctgaccgcttcctcgtgctttacggtatcgccgctcccgattcgcagcgcatcgccttctatcgccttcttgacgagttcttctgaggatccaccatggttaacctagacttgtccatcttctggattggccaacttaattaatgtatgaaataaaaggatgcacacatagtgacatgctaatcactataatgtgggcatcaaagttgtgtgttatgtgtaattactagttatctgaataaaagagaaagagatcatccatatttcttatcctaaatgaatgtcacgtgtctttataattctttgatgaaccagatgcatttcattaaccaaatccatatacatataaatattaatcatatataattaatatcaattgggttagcaaaacaaatctagtctaggtgtgttttgcgaatgcggccctagcgtatacgaagttcctattccgaagttcctattctccagaaagtataggaacttctgtacacctgagctgattccgatgacttcgtaggttcctagctcaagccgctcgtgtccaagcgtcacttacgattagctaatgattacggcatctaggaccgactagctaactaactagtaccgaggccggccccgcgggagctcggcgcgccctgcacgttacgtacgtacgaactaatatactccaccagctgatcactgatgagccgagccgccatgcattgtaatttataacatgtgcggctgtacgcttccatctcaaatacctttttatatatatattgtactttatagtctacgacataatctgccatggtaatttataagatgtgctttattgctcgttgttctgttctcatctgtgtccatggcatggcatggatacaaaatgtatgtatggccacgcatccaatctgtgacgttgtcaaggcagaggtccaaccgtccaagaccctcttgtgccgccctgtacttgcagtcagtgacgttgtgagaaaaagctgtgggtggtctccgcagagcgcgcgggccacgagagggagccccatctctcggccgaggggtacgggggctccagacacggtcctttggtttcttctgcctgtagcgagcggccccgccccccaccgcgctgctagcccggggattagaattaattcattccgattaatcgtggcctcttgctcttcaggatgaagagctatgtttaaacgtgcaagcgctactagacaattcagtacattaaaaacgtccgcaatgtgttattaagttgtctaagcgtcaatttgtttacaccacaatatatcctgcca

SEQ ID NO: 242 - DNA, 7842 bp, Artificial Sequence
  PHP21875
ttttcccagtcacgacgttgtaaaacgacggccagtgaattgtaatacgactcactatagggcgaattgggttacccggaccgaagcttgcatgcctgcagtgcagcgtgacccggtcgtgcccctctctagagataatgagcattgcatgtctaagttataaaaaattaccacatattttttttgtcacacttgtttgaagtgcagtttatctatctttatacatatatttaaactttactctacgaataatataatctatagtactacaataatatcagtgttttagagaatcatataaatgaacagttagacatggtctaaaggacaattgagtattttgacaacaggactctacagttttatctttttagtgtgcatgtgttctcctttttttttgcaaatagcttcacctatataatacttcatccattttattagtacatccatttagggtttagggttaatggtttttatagactaatttttttagtacatctattttattctattttagcctctaaattaagaaaactaaaactctattttagtttttttatttaataatttagatataaaatagaataaaataaagtgactaaaaattaaacaaataccctttaagaaattaaaaaaactaaggaaacatttttcttgtttcgagtagataatgccagcctgttaaacgccgtcgacgagtctaacggacaccaaccagcgaaccagcagcgtcgcgtcgggccaagcgaagcagacggcacggcatctctgtcgctgcctctggacccctctcgagagttccgctccaccgttggacttgctccgctgtcggcatccagaaattgcgtggcggagcggcagacgtgagccggcacggcaggcggcctcctcctcctctcacggcaccggcagctacgggggattcctttcccaccgctccttcgctttcccttcctcgcccgccgtaataaatagacaccccctccacaccctctttccccaacctcgtgttgttcggagcgcacacacacacaaccagatctcccccaaatccacccgtcggcacctccgcttcaaggtacgccgctcgtcctcccccccccccctctctaccttctctagatcggcgttccggtccatgcatggttagggcccggtagttctacttctgttcatgtttgtgttagatccgtgtttgtgttagatccgtgctgctagcgttcgtacacggatgcgacctgtacgtcagacacgttctgattgctaacttgccagtgtttctctttggggaatcctgggatggctctagccgttccgcagacgggatcgatttcatgattttttttgtttcgttgcatagggtttggtttgcccttttcctttatttcaatatatgccgtgcacttgtttgtcgggtcatcttttcatgcttttttttgtcttggttgtgatgatgtggtctggttgggcggtcgttctagatcggagtagaattctgtttcaaactacctggtggatttattaattttggatctgtatgtgtgtgccatacatattcatagttacgaattgaagatgatggatggaaatatcgatctaggataggtatacatgttgatgcgggttttactgatgcatatacagagatgctttttgttcgcttggttgtgatgatgtggtgtggttgggcggtcgttcattcgttctagatcggagtagaatactgtttcaaactacctggtgtatttattaattttggaactgtatgtgtgtgtcatacatcttcatagttacgagtttaagatggatggaaatatcgatctaggataggtatacatgttgatgtgggttttactgatgcatatacatgatggcatatgcagcatctattcatatgctctaaccttgagtacctatctattataataaacaagtatgttttataattattttgatcttgatatacttggatgatggcatatgcagcagctatatgtggatttttttagccctgccttcatacgctatttatttgcttggtactgtttcttttgtcgatgctcaccctgttgtttggtgttacttctgcaggtcgactctagaggatccatggccactgtgaacaactggctcgctttctccctctccccgcaggagctgccgccctcccagacgacggactccacactcatctcggccgccaccgccgaccatgtctccggcgatgtctgcttcaacatcccccaagattggagcatgaggggatcagagctttcggcgctcgtcgcggagccgaagctggaggacttcctcggcggcatctccttctccgagcagcatcacaaggccaactgcaacatgatacccagcactagcagcacagtttgctacgcgagctcaggtgctagcaccggctaccatcaccagctgtaccaccagcccaccagctcagcgctccacttcgcggactccgtaatggtggcctcctcggccggtgtccacgacggcggtgccatgctcagcgcggccgccgctaacggtgtcgctggcgctgccagtgccaacggcggcggcatcgggctgtccatgattaagaactggctgcggagccaaccggcgcccatgcagccgagggtggcggcggctgagggcgcgcaggggctctctttgtccatgaacatggcggggacgacccaaggcgctgctggcatgccacttctcgctggagagcgcgcacgggcgcccgagagtgtatcgacgtcagcacagggtggagccgtcgtcgtcacggcgccgaaggaggatagcggtggcagcggtgttgccggcgctctagtagccgtgagcacggacacgggtggcagcggcggcgcgtcggctgacaacacggcaaggaagacggtggacacgttcgggcagcgcacgtcgatttaccgtggcgtgacaaggcatagatggactgggagatatgaggcacatctttgggataacagttgcagaagggaagggcaaactcgtaagggtcgtcaagtctatttaggtggctatgataaagaggagaaagctgctagggcttatgatcttgctgctctgaagtactggggtgccacaacaacaacaaattttccagtgagtaactacgaaaaggagctcgaggacatgaagcacatgacaaggcaggagtttgtagcgtctctgagaaggaagagcagtggtttctccagaggtgcatccatttacaggggagtgactaggcatcaccaacatggaagatggcaagcacggattggacgagttgcagggaacaaggatctttacttgggcaccttcagcacccaggaggaggcagcggaggcgtacgacatcgcggcgatcaagttccgcggcctcaacgccgtcaccaacttcgacatgagccgctacgacgtgaagagcatcctggacagcagcgccctccccatcggcagcgccgccaagcgcctcaaggaggccgaggccgcagcgtccgcgcagcaccaccacgccggcgtggtgagctacgacgtcggccgcatcgcctcgcagctcggcgacggcggagccctggcggcggcgtacggcgcgcactaccacggcgccgcctggccgaccatcgcgttccagccgggcgccgccagcacaggcctgtaccacccgtacgcgcagcagccaatgcgcggcggcgggtggtgcaagcaggagcaggaccacgcggtgatcgcggccgcgcacagcctgcaggacctccaccacctgaacctgggcgcggccggcgcgcacgactttttctcggcagggcagcaggccgccgccgctgcgatgcacggcctgggtagcatcgacagtgcgtcgctcgagcacagcaccggctccaactccgtcgtctacaacggcggggtcggcgacagcaacggcgccagcgccgtcggcggcagtggcggtggctacatgatgccgatgagcgctgccggagcaaccactacatcggcaatggtgagccacgagcaggtgcatgcacgggcctacgacgaagccaagcaggctgctcagatggggtacgagagctacctggtgaacgcggagaacaatggtggcggaaggatgtctgcatgggggactgtcgtgtctgcagccgcggcggcagcagcaagcagcaacgacaacatggccgccgacgtcggccatggcggcgcgcagctcttcagtgtctggaacgacacttaagcgtacgtgccggcctggctctccgaaagggcgaattccagcacactggcggccgttactagacccaacctagacttgtccatcttctggattggccaacttaattaatgtatgaaataaaaggatgcacacatagtgacatgctaatcactataatgtgggcatcaaagttgtgtgttatgtgtaattactagttatctgaataaaagagaaagagatcatccatatttcttatcctaaatgaatgtcacgtgtctttataattctttgatgaaccagatgcatttcattaaccaaatccatatacatataaatattaatcatatataattaatatcaattgggttagcaaaacaaatctagtctaggtgtgttttgcgaatgcggccgccaccgcggtggagctcgaattccggtccgggtcacccagcttgagtattctatagtgtcacctaaatagcttggcgtaatcatggtcatagctgtttcctgtgtgaaattgttatccgctcacaattccacacaacatacgagccggaagcataaagtgtaaagcctggggtgcctaatgagtgagctaactcacattaattgcgttgcgctcactgcccgctttccagtcgggaaacctgtcgtgccagctgcattaatgaatcggccaacgcgcggggagaggcggtttgcgtattgggcgctcttccgcttcctcgctcactgactcgctgcgctcggtcgttcggctgcggcgagcggtatcagctcactcaaaggcggtaatacggttatccacagaatcaggggataacgcaggaaagaacatgtgagcaaaaggccagcaaaaggccaggaaccgtaaaaaggccgcgttgctggcgtttttccataggctccgcccccctgacgagcatcacaaaaatcgacgctcaagtcagaggtggcgaaacccgacaggactataaagataccaggcgtttccccctggaagctccctcgtgcgctctcctgttccgaccctgccgcttaccggatacctgtccgcctttctcccttcgggaagcgtggcgctttctcatagctcacgctgtaggtatctcagttcggtgtaggtcgttcgctccaagctgggctgtgtgcacgaaccccccgttcagcccgaccgctgcgccttatccggtaactatcgtcttgagtccaacccggtaagacacgacttatcgccactggcagcagccactggtaacaggattagcagagcgaggtatgtaggcggtgctacagagttcttgaagtggtggcctaactacggctacactagaagaacagtatttggtatctgcgctctgctgaagccagttaccttcggaaaaagagttggtagctcttgatccggcaaacaaaccaccgctggtagcggtggtttttttgtttgcaagcagcagattacgcgcagaaaaaaaggatctcaagaagatcctttgatcttttctacggggtctgacgctcagtggaacgaaaactcacgttaagggattttggtcatggagccacgttgtgtctcaaaatctctgatgttacattgcacaagataaaaatatatcatcatgaacaataaaactgtctgcttacataaacagtaatacaaggggtgttatgagccatattcaacgggaaacgtcttgctcgaggccgcgattaaattccaacatggatgctgatttatatgggtataaatgggctcgcgataatgtcgggcaatcaggtgcgacaatctatcgattgtatgggaagcccgatgcgccagagttgtttctgaaacatggcaaaggtagcgttgccaatgatgttacagatgagatggtcagactaaactggctgacggaatttatgcctcttccgaccatcaagcattttatccgtactcctgatgatgcatggttactcaccactgcgatccccggaaaaacagcattccaggtattagaagaatatcctgattcaggtgaaaatattgttgatgcgctggcagtgttcctgcgccggttgcattcgattcctgtttgtaattgtccttttaacagcgatcgcgtatttcgtctcgctcaggcgcaatcacgaatgaataacggtttggttgatgcgagtgattttgatgacgagcgtaatggctggcctgttgaacaagtctggaaagaaatgcataaacttttgccattctcaccggattcagtcgtcactcatggtgatttctcacttgataaccttatttttgacgaggggaaattaataggttgtattgatgttggacgagtcggaatcgcagaccgataccaggatcttgccatcctatggaactgcctcggtgagttttctccttcattacagaaacggctttttcagaaatatggtattgataatcctgatatgaataaattgcagtttcatttgatgctcgatgagtttttctaatcagaattggttaattggttgtaacactggcagagcattacgctgacttgacgggacggcggctttgttgaataaatcgaacttttgctgagttgaaggatcagatcacgcatcttcccgacaacgcagaccgttccgtggcaaagcaaaagttcaaaatcaccaactggtccacctacaacaaagctctcatcaaccgtggctccctcactttctggctggatgatggggcgattcaggcctggtatgagtcagcaacaccttcttcacgagccatgacattaacctataaaaataggcgtatcacgaggccctttcgtctcgcgcgtttcggtgatgacggtgaaaacctctgacacatgcagctcccggagacggtcacagcttgtctgtaagcggatgccgggagcagacaagcccgtcagggcgcgtcagcgggtgttggcgggtgtcggggctggcttaactatgcggcatcagagcagattgtactgagagtgcaccatatgcggtgtgaaataccgcacagatgcgtaaggagaaaataccgcatcaggaaattgtaagcgttaatattttgttaaaattcgcgttaaatttttgttaaatcagctcattttttaaccaataggccgaaatcggcaaaatcccttataaatcaaaagaatagaccgagatagggttgagtgttgttccagtttggaacaagagtccactattaaagaacgtggactccaacgtcaaagggcgaaaaaccgtctatcagggcgatggcccactacgtgaaccatcaccctaatcaagttttttggggtcgaggtgccgtaaagcactaaatcggaaccctaaagggagcccccgatttagagcttgacggggaaagccggcgaacgtggcgagaaaggaagggaagaaagcgaaaggagcgggcgctagggcgctggcaagtgtagcggtcacgctgcgcgtaaccaccacacccgccgcgcttaatgcgccgctacagggcgcgtccattcgccattcaggctgcgcaactgttgggaagggcgatcggtgcgggcctcttcgctattacgccagctggcgaaagggggatgtgctgcaaggcgattaagttgggtaacgccaggg

SEQ ID NO: 243 - DNA, 6418 bp, Artificial Sequence
  PHP40428
gtttacccgccaatatatcctgtcaaacactgatagtttcgacgtacgcgtatcgatggcgccagctgcaggcggccgcatgcacacctcgtctagagctcagatcagcttggggctggtatcgataaatgtttccacatagattttgcatatcataatgatgtttgtcgttccgtatctatgtttcatacaaaatttttacgcatatcgcaacacatgggcacatacctagtgactgtataactctgcatgtatgagtgtatgactatatgatgtagtaactaataagaagggtagacatttgagtgattcttttattcctggacttgtaagacttgacatttctgccttgagtgcgatacatcatatggacaggggttatgcatacactgcttgtttgttgtttatgttctaagagcatctccaacaacgtgacatatgaaaatgccctacaatttaaaaatggttatattttataaaatttagggcataaataaaacatcccgctccaacattaaagccttaaatctattatagggaagcccactatgatatagtatatttgaggcactttagagggtgccctataattttttgaccatttttttatgaaatgagacactattggagtattttttttccgtagagcaccatatttcaatttgagacaccaatttaaggcattgttggagatgttctaaatgttggtttattttgtctgtatcgttgtggttttgatagtggtgcctttgcaatgtacatcttacattgacaataataataggtaaaactctacaaattttttatctaatggactcttgtatgaaacattgtacttgcacacatctgatgtaaacactgcatacttttaacagtgacaagattctgtttcattttagggctagtttgggaaccaaattttattagggtttttattttctaagaaaaagtaatttattttaccttgagaaaatataaattacttgagaaaatagagttccaaactagctcttatctttgtcgaatcctcctctattcaaatgtgacatttctggcacgtgacaactggtgatgttgtagactgtgttaagtaatacgtgtcattattactaaatgccattttagtaaatgttgagtatgtactctactacagtaagtattattggtgtatttacactagacagttggcggcctggcgggtaaagttatcctgtagaaagttgggccaggccaaaaccaaccgccaaaggaaaggccttccggcccgcccacctttgcgcgccgaaggtcagttccttcagtctcctcccgcttcagactctgaccacgtcgacaatccgggccgaaacacatctgcaccgtccacttgcgacagattgaacacaccacttctatccacgtcagcgatccgtggcactagcccttccaccaatcagcccaagttgcccctttcctttaaattcgccgcacccattgctcttctcacggccatagaaatcgaccgagcgaatccctcgcatcgcattcgcagcctttgctgcatcacaccaccgcgaaaccccagcagccgcatctgcaggtcgactctaggggtcgactccccaacctcgtgttgttcggagcgcacacacacacaaccagatctcccccaaatccacccgtcggcacctccgcttcaaggtacgccgctcgtcctcccccccccccctctctaccttctctagatcggcgttccggtccatggttagggcccggtagttctacttctgttcatgtttgtgttagatccgtgtttgtgttagatccgtgctgctagcgttcgtacacggatgcgacctgtacgtcagacacgttctgattgctaacttgccagtgtttctctttggggaatcctgggatggctctagccgttccgcagacgggatcgatttcatgattttttttgtttcgttgcatagggtttggtttgcccttttcctttatttcaatatatgccgtgcacttgtttgtcgggtcatcttttcatgcttttttttgtcttggttgtgatgatgtggtctggttgggcggtcgttctagatcggagtagaattctgtttcaaactacctggtggatttattaattttggatctgtatgtgtgtgccatacatattcatagttacgaattgaagatgatggatggaaatatcgatctaggataggtatacatgttgatgcgggttttactgatgcatatacagagatgctttttgttcgcttggttgtgatgatgtggtgtggttgggcggtcgttcattcgttctagatcggagtagaatactgtttcaaactacctggtgtatttattaattttggaactgtatgtgtgtgtcatacatcttcatagttacgagtttaagatggatggaaatatcgatctaggataggtatacatgttgatgtgggttttactgatgcatatacatgatggcatatgcagcatctattcatatgctctaaccttgagtacctatctattataataaacaagtatgttttataattattttgatcttgatatacttggatgatggcatatgcagcagctatatgtggatttttttagccctgccttcatacgctatttatttgcttggtactgtttcttttgtcgatgctcaccctgttgtttggtgttacttctgcaggtcgactctagaggatccaaaaccatggcccagtccaagcacggcctgaccaaggagatgaccatgaagtaccgcatggagggctgcgtggacggccacaagttcgtgatcaccggcgagggcatcggctaccccttcaagggcaagcaggccatcaacctgtgcgtggtggagggcggccccttgcccttcgccgaggacatcttgtccgccgccttcatgtacggcaaccgcgtgttcaccgagtacccccaggacatcgtcgactacttcaagaactcctgccccgccggctacacctgggaccgctccttcctgttcgaggacggcgccgtgtgcatctgcaacgccgacatcaccgtgagcgtggaggagaactgcatgtaccacgagtccaagttctacggcgtgaacttccccgccgacggccccgtgatgaagaagatgaccgacaactgggagccctcctgcgagaagatcatccccgtgcccaagcagggcatcttgaagggcgacgtgagcatgtacctgctgctgaaggacggtggccgcttgcgctgccagttcgacaccgtgtacaaggccaagtccgtgccccgcaagatgcccgactggcacttcatccagcacaagctgacccgcgaggaccgcagcgacgccaagaaccagaagtggcacctgaccgagcacgccatcgcctccggctccgccttgccctccggactcagatctcgatagagtcaacctagacttgtccatcttctggattggccaacttaattaatgtatgaaataaaaggatgcacacatagtgacatgctaatcactataatgtgggcatcaaagttgtgtgttatgtgtaattactagttatctgaataaaagagaaagagatcatccatatttcttatcctaaatgaatgtcacgtgtctttataattctttgatgaaccagatgcatttcattaaccaaatccatatacatataaatattaatcatatataattaatatcaattgggttagcaaaacaaatctagtctaggtgtgttttgcgaattaaggtccgggtaacagaattcgtttaaacgcggccgctaagcaggtcaccggtccgtatcccccaattcgtcaacttcgtccacagacatcaacatcttatcgtcctttgaagataagataataatgttgaagataagagtgggagcccccactaaaacattgctttgtcaaaagctaaaaaagatgatgcccgacagccacttgtgtgaagcatgagaagccggtccctccactaagaaaattagtgaagcatcttccagtggtccctccactcacagctcaatcagtgagcaacaggacgaaggaaatgacgtaagccatgacgtctaatcccaacttcgtccacagacatcaacatcttatcgtcctttgaagataagataataatgttgaagataagagtgggagccaccactaaaacattgctttgtcaaaagctaaaaaagatgatgcccgacagccacttgtgtgaagcatgagaagccggtccctccactaagaaaattagtgaagcatcttccagtggtccctccactcacagctcaatcagtgagcaacaggacgaaggaaatgacgtaagccatgacgtctaatcccacaagaatttccttatataaggaacacaaatcagaaggaagagatcaatcgaaatcaaaatcggaatcgaaatcaaaatcggaatcgaaatctctcatctaagaggatcctaggcgctatcaactttgtatagaaaagttgggtgcccgggcccaccattcaacatgacatgaaaaagccatccgagttcaacaaatcggcaattctcggatttttcattatttctgtgttcaacttcaccaccgtaatcgtgtgcggcactgtgtacggtaacagcatccgcgagtcggtgatcaattccatccagacagtgtggatccagcaggcgatcaacctgatgatcactcgagcaactttattatacaaagttgatagatatcggtccgagatccatcaggtaagtttctgcttctacctttgatatatatataataattatcattaattagtagtaatataatatttcaaatatttttttcaaaataaaagaatgtagtatatagcaattgcttttctgtagtttataagtgtgtatattttaatttataacttttctaatatatgaccaaaacatggtgatgtgcaggtccatggtggagctcgaccgatatctatcaactttgtataataaagttgctcgagtgatcatcaggttgatcgcctgctggatccacactgtctggatggaattgatcaccgactcgcggatgctgttaccgtacacagtgccgcacacgattacggtggtgaagttgaacacagaaataatgaaaaatccgagaattgccgatttgttgaactcggatggctttttcatgtcatgttgaatggtgggcccgggcacccaacttttctatacaaagttgatagcgttaacccgggtaactgtacctaaagaaggagtgcgtcgaagcagatcgttcaaacatttggcaataaagtttcttaagattgaatcctgttgccggtcttgcgatgattatcatataatttctgttgaattacgttaagcatgtaataattaacatgtaatgcatgacgttatttatgagatgggtttttatgattagagtcccgcaattatacatttaatacgcgatagaaaacaaaatatagcgcgcaaactaggataaattatcgcgcgcggtgtcatctatgttactagatcgatgtcgaatcgatgggccccggccgaagcttcggtccgggtcacacagcttgagtattctatagtgtcacctaaatagcatgcgctagagtcgacctgcagaagctcgcgcctctagttgaagacacgttcatgtcttcatcgtaagaagacactcagtagtcttcggccagaatggcctaactcaaggccatcgtggcctcttgctcttcaggatgaagagctatgtttaattcgcactggccgtcgttttacaacgtcgtgactgggaaaaccctggcgttacccaacttaatcgccttgcagcacatccccctttcgccagctggcgtaatagcgaagaggcccgcaccgatcgcccttcccaacagttgcgcagcctgaatggcgaatggcgcccgctcctttcgctttcttcccttcctttctcgccacgttcgccggctttccccgtcaagctctaaatcgggggctccctttagggttccgatttagtgctttacggcacctcgaccccaaaaaacttgatttgggtgatggttcacgtagtggccatcgccctgatagacggtttttcgccctttgacgttggagtccacgttctttaatagtggactcttgttccaaactggaacaacactcaaccctatctcgggctattcttttgatttataagggattttgccgatttcggaaccaccatcaaacaggattttcgcctgctggggcaaaccagcgtggaccgcttgctgcaactctctcagggccaggcggtgaagggcaatcagctgttgcccgtctcactggtgaaaagaaaaaccaccccagtacattaaaaacgtccgcaatgtgttattaagttgtctaagcgtcaatttgtttacaccacaatatatcctgcca

SEQ ID NO: 244 - DNA, 12211 bp, Artificial Sequence
  PHP93586
gtttacccgccaatatatcctgtcaaacactgatagttttaaactgaaggcgggaaacgacaatctgatcatgagcggagaattaagggagtcacgttatgacccccgccgatgacgcgggacaagccgttttacgtttggaactgacagaaccgcaacgttgaaggagccactcagcaagctggtacgattgtaatacgactcactatagggcgaattgagcgctgtttaaacgctcttcaactggaagagcggttacgctgtttaaacgctcttcaactggaagagcggttactaccggttcactagctagctgctaatcgagctagttaccctatgaggtgacatgaagcgctcacggttactatgacggttagcttcacgactgttggtggcagtagcgtacgacttagctatagttccggacttacccttaagcgatttaaatcctgaggcaattcttaccctagctccctgcggctgttacgcggtcccccatcaatcttctgttcttgcggttgtagcctgtgtaacagtgctagagtatgtatgataaataggttttaagtctgcttacatgacattttttattgtggaagagacatataaaaattagagagagtggttctcatgcaacggcggacggcccggtgctaaaagagcttcaagacaaaataatgaaacaggaagagagtagatttatctaagagccaactttattatatgaatgtgtttattgttggctttagatgatatggtaaggagttagagctaataatagataggctctattattattattattaattaaactcgctctaaggaggaaagtgggaggaagggacgaggacgaagactactggaagcatcgtgcatggatgatggatgtggtgtctcttaatgtaggtggccggaggatgtacgtgttaattgcgcgataagcactcagatccaaccgcaaactacctccacactgacacactgatagagagaaagagagacctccgacgactgccgccgcagatgagccacgtacgtatacgacgtctgccggccggctcaggctgccgccatcaccctgctcgaaagtcgcgttaggcggcgccagctacataggagtatctagtctagccagttagtatactactactgcgctgatgatgaattaactctgcatagatactgtacttgcctccctccaacacccaaccacctcctgctcggctcttaataacttggacacggatcgatgccatccaaggaagaacacgacgacgacgacggaacatccaccatgcaagcttgcatccatacgccgatacgcgtgcatccatccatccaccattatttccattttccaccgatcacacgtacacaggcctatttaaggagcgacatcccactgcaactctcctcaccactcatcaccagctagctctagcaaagcacttgccatctaccgaccgccgcattccaaacagcccgacgagctagcagagcggcaggcacctccctcctcaaggaacccatggcggccaatgcgggcggcggtggagcgggaggaggcagcggcagcggcagcgtggctgcgccggcggtgtgccgccccagcggctcgcggtggacgccgacgccggagcagatcaggatgctgaaggagctctactacggctgcggcatccggtcgcccagctcggagcagatccagcgcatcaccgccatgctgcggcagcacggcaagatcgagggcaagaacgtcttctactggttccagaaccacaaggcccgcgagcgccagaagcgccgcctcaccagcctcgacgtcaacgtgcccgccgccggcgcggccgacgccaccaccagccaactcggcgtcctctcgctgtcgtcgccgccgccttcaggcgcggcgcctccctcgcccaccctcggcttctacgccgccggcaatggcggcggatcggctgtgctgctggacacgagttccgactggggcagcagcggcgctgctatggccaccgagacatgcttcctgcaggactacatgggcgtgacggacacgggcagctcgtcgcagtggccacgcttctcgtcgtcggacacgataatggcggcggccgcggcgcgggcggcgacgacgcgggcgcccgagacgctccctctcttcccgacctgcggcgacgacggcggcagcggtagcagcagctacttgccgttctggggtgccgcgtccacaactgccggcgccacttcttccgttgcgatccaacagcaacaccagctgcaggagcagtacagcttttacagcaacagcaacagcacccagctggccggcaccggcaaccaagacgtatcggcaacagcagcagcagccgccgccctggagctgagcctcagctcatggtgctccccttaccctgctgcagggagtatgggctccggcgagggtcgcggttccctcctgacctgcggcgacgtggaggaaaaccccggtcccatggcctcttcatctgcacccaggttccgtgtctattccaagtacctctttctaacatatcctgaatgtacccttgagccacagtacgccttggattcacttcgcactctcttgaacaaatatgagcccctctacatcgctgctgttagagagctccacgaagatggatcaccacatctgcacgttctcgtgcagaacaagcttcgtgcttccatcaccaatcccaatgccttaaacctccgtatggatacatctccattctccatattccatccaaatatacaagctgccaaagactgcaaccaagttcgtgattacatcacgaaggaggttgactccgatgtaaacacagctgagtggggaacattcgtggctgtttcaactccaggtcgtaaagaccgtgatgcggatatgaaacagatcattgaatctagttcctctcgcgaggaattcctcagcatggtttgcaatcgttttccgtttgaatggtctatccgtctcaaagacttcgagtacacggcacgccatctatttcctgacccagttgccacttacacacctgagtttccaaccgaatcactcatttgccatgagaccattgaaagctggaaaaatgaacatctctactctctgtccctcgagagctacatcctgtgcaccagcacccctgccgaccaggcccagtccgacctcgaatggatggacgactacagccgtagtcaccggggaggcataagtccatctacatctgcgggccaaccagaacaggaaagacttcctgggcaaggtctctaggcgtacctagtggtacctgacatcttatagtctgcaacctctcgtgtctgaattcctatctttatcaagtgttattgcttccacgactataggacagctttcgtcgaaaggttttgctcatgtgatctcgaaggattcatctagtctgatttttcgtgacttgtatcggttttattggattcatccaacatatatcaataaaaaatgagttgtgtttcctttcttcctagttcagttaaaattatttccctcctgcgcttgtgctgtaattgtctgtgtacctgttgtttgtgactgtgttagttcccttggatatgatttcgtatttgatatgtacatggagatagcttagcttcattattggagtatgaagttagtatgacatagtcactctcctggaaaattgacactgcaaaccatatttttattctgaaccacaaatcctagtcagtccgctggcatatgccgtccgtttgctgaatccagaacgtgggtttggagatgtacggctgagatgcctctatgcgaaggggatttcgtggtgaaacgagatgggagtagagcaacgcccgtggaagatgcttcaaacttccacacttttgagcaacgatcggcagtagtaaggtagacgatttcaagatcaaagcatatgaagataaacaacatcaacaacaaaatttgttggggttctatagagagaaacagagctacatacatacactgttttgtatctaccatctgagatgatgaaaagatgaaaaactaaagaatgccccggcgccaacgccaggacacgccgcgcgcgcgtcacccgagccatctcttgacccagccggcgctgtatatttacacacgttgcagcatcgatcaccacctgttcgatcgcgtcgccgtcaccaagcttggcgcgccggtcacccggtccgggcctagaaggccacccggggcgacttattgaactagtctagggcgcggctaacaacctagcttagattgccttgtctaaacccttaggctaacgcgccaccccccgaattcctgcccttaaggccaattgttcaagattcattcaacaattgaaacatctcccatgattaaatcagtataaggttgctatggtcttgcttgacaaagtttttttttgagggaatttcaactaaatttttgagtgaaactatcaaatactgattttaaaaaatttttataaaaggaagcgcagagataaaaggccatctatgctacaaaagtacccaaaaatgtaatcctaaagtatgaattgcattttttttttgtttggacgaaaggaaaggagtattaccacaagaatgatatcatcttcatatttagatcttttttgggtaaagcttgagattctctaaatatagagaaatcagaagaaaaaaaaaccgtgttttggtggttttgatttctagcctccacaataactttgacggcgtcgacaagtctaacggacaccaagcagcgaaccaccagcgccgagccaagcgaagcagacggccgagacgttgacaccttcggcgcggcatctctcgagagttccgctccggcgctccacctccaccgctggcggtttcttattccgttccgttccgcctcctgctctgctcctctccacaccacacggcacgaaaccgttacggcaccggcagcacccagcacgggagaggggattcctttcccaccgttccttccctttccgccccgccgctataaatagccagccccatccccagcttttttccccaatctcatctcctctctcctgttgttcggagcacacgcacaatccgatcgatccccaaatccccttcgtctctcctcgcgagcctcgtggatcccagcttcaaggtacggcgatcgatcatcccccctccttctctctaccttcttttctctagactacatcggatggcgatccatggttagggcctgctagtttcccttcctgttttgtcgatggctgcgaggcacaatagatctgatggcgttatgacggctaacttgtcatgttgttgcgatttatagtccctttaggagatcagtttaatttctcggatggttcgagatcggtggtccatggttagtaccctaagatccgcgctgttagggttcgtagatggaggcgacctgttctgattgttaacttgtcagtacctgggaaatcctgggatggttctagctcgtccgcagatgagatcgatttcatgatcctctgtatcttgtttcgttgcctaggttccgtctaatctatccgtggtatgatgtagatgttttgatcgtgctaactacgtcttgtaaagttaattgtcaggtcataatttttagcatgcctttttttttgtttggttttgtctaattgggctgtcgttctagatcagagtagaagactgttccaaactacctgctggatttattgaacttggatctgtatgtgtgtcacatatcttcataaattcatgattaagatggattgaaatatcttttatctttttggtatggatagttctatatgttggtgtggctttgttagatgtatacatgcttagatacatgaagcaacgtgctgctactgtttagtaattgctgttcatttgtctaataaacagataaggatatgtatttatgttgctgttggttttgctggtactttgttggatacaaatgcttcaatacagaaaacagcatgctgctacgatttaccatttatctaatcttatcatatgtctaatctaataaacaaacatgcttttaaattatcttcatatgcttggatgatggcatacacagcggctatgtgtggttttttaaatacccagcatcatgggcatgcatgacactgctttaatatgctttttatttgcttgagactgtttcttttgtttatactgaccctttagttcggtgactcttctgcaggtcgactttaacttagcctaggatccatggcccagtccaagcacggcctgaccaaggagatgaccatgaagtaccgcatggagggctgcgtggacggccacaagttcgtgatcaccggcgagggcatcggctaccccttcaagggcaagcaggccatcaacctgtgcgtggtggagggcggccccttgcccttcgccgaggacatcttgtccgccgccttcatgtacggcaaccgcgtgttcaccgagtacccccaggacatcgtcgactacttcaagaactcctgccccgccggctacacctgggaccgctccttcctgttcgaggacggcgccgtgtgcatctgcaacgccgacatcaccgtgagcgtggaggagaactgcatgtaccacgagtccaagttctacggcgtgaacttccccgccgacggccccgtgatgaagaagatgaccgacaactgggagccctcctgcgagaagatcatccccgtgcccaagcagggcatcttgaagggcgacgtgagcatgtacctgctgctgaaggacggtggccgcttgcgctgccagttcgacaccgtgtacaaggccaagtccgtgccccgcaagatgcccgactggcacttcatccagcacaagctgacccgcgaggaccgcagcgacgccaagaaccagaagtggcacctgaccgagcacgccatcgcctccggctccgccttgccctccggactcagatctcgatagggtaccaatggccagttaacagatccagctgctgctgttctagggttcacaagtctgcctatttgtcttccccaatggagctatggttgtctggtctggtccttggtcgtgtcccgtttcattgtgtactatttacctgtaatgtgtatccttaagtctggtttgatggtgtctgaaacgttttgctgtggtagagcagcatggaagaactataatgaataagtgatccctaatcattgtgtccaaattttgcttctgctatacccttttgtgctgtttcttatgttttgcttaaaaatttgatctgacaaacaaatttgtctaaattatgctcttgttctgactgtgtactgtacacatttgtattgctaccggtttggcacatagttttctctttgattgcagatcaaacccttctgattgcagattgcttggctatggctgatgtgctcactgttcttctttagcttgtatattgctgatggtggcttggctacggctgaaaaagttgctgctgcgccgacttggcaactgttgctccagtaatgctttgtcctctcttcctagccgccgacttggcacttggcagctgttgctcctgtaatgcgttgttatctcttatctcttgagatgtactatgattttgaggctgtttgacttgtgccagattgccagtgctgatgctatattatctcaggtttttatgctagtatatgttttactgtgtgctgcctgtgtcgagttacgtaatctattgaaccgctatgcgtgttgatgccctgttgttgcttgccagattgatgcccctgttgcttgcagcttgcaagctgtagtgaaatcctaaaattcgaaaccaaatctattctgaacttttgaagatctgtgatgtccggaagaaaagattcaaacagataaacgggactctccagaatctataaaataaatgatcgacaaacgctttgctttggtaggcttcctagttagttagcggaccgaagcttcggtccgggcctagaaggccagcttcggccgcccctcggtaccctgggatctgcccttactttaacgcctctaaccaacacccctttatctttataaggaacaataaacagaatttgccccactgttctaaatcacctaataatatccccagctaaaaacaataaaggtttcctagaattaagacaagcatgactgttcctccaggagggtttggaacattgttgcagtcttgcagatacgggcgaagggtgagaaacagagcggagggctggaggtgacctcggtagtcgacgccggagttgagcttgacaacgacggggcggcccctgatggacttgaggaagtccgatggcgtcttcaccgtcccgccggcgcccgaggcgggcctgtcgctgccgccgccgccgctgctcatcttgcgcgctgtgcccccggcggtgtccctgtgttgcggatcgcgggtgggccaggtggatgcgagggcgacccgtttggactccggccggagccgccggatccctggtcggtgtcagtgccgtttactctgggccccacgtgtcagtaccgtctgtagatgacaacaacccgtcgtccacagtcatgtccaaaatatcctttcttcttttttttcgattcggatatctatcttccttttttttttccaaaaatcttcttgacgcaccagcgcgcacgtttgtggtaaacgccgacacgtcggtcccacgtcgatagaccccacccaccagtgagtagcgtgtacgtattcgggggtgacggacgtgtcgccgtcgtcttgctagtcccattcccatctgagccacacatctctgaacaaaaaaaaggagggaggcctccacgcacatccccctccgtgccacccgccccaaaccctcgcgccgcctccgagacagccgccgcaaccatggccaccgccgccgccgcgtctaccgcgctcactggcgccactaccgctgcgcccaaggcgaggcgccgggcgcacctcctggccacccgccgcgccctcgccgcgcccatcaggtgctcagcggcgtcacccgccatgccgatggctcccccggccaccccgctccggccgtggggccccaccgagccccgcaagggtgctgacatcctcgtcgagtccctcgagcgctgcggcgtccgcgacgtcttcgcctaccccggcggcgcgtccatggagatccaccaggcactcacccgctcccccgtcatcgccaaccacctcttccgccacgagcaaggggaggcctttgccgcctccggctacgcgcgctcctcgggccgcgtcggcgtctgcatcgccacctccggccccggcgccaccaacctagtctccgcgctcgccgacgcgctgctcgattccgtccccatggtcgccatcacgggacaggtggcgcgacgcatgattggcaccgacgccttccaggagacgcccatcgtcgaggtcacccgctccatcaccaagcacaactacctggtcctcgacgtcgacgacatcccccgcgtcgtgcaggaggctttcttcctcgcctcctctggtcgaccagggccggtgcttgtcgacatccccaaggacatccagcagcagatggcggtgcctgtctgggacaagcccatgagtctgcctgggtacattgcgcgccttcccaagccccctgcgactgagttgcttgagcaggtgctgcgtcttgttggtgaatcgcggcgccctgttctttatgtgggcggtggctgcgcagcatctggtgaggagttgcgacgctttgtggagctgactggaatcccggtcacaactactcttatgggcctcggcaacttccccagcgacgacccactgtctctgcgcatgctaggtatgcatgggacggtgtatgcaaattatgcagtggataaggccgatctgttgcttgcacttggtgtgcggtttgatgatcgcgtgacagggaagattgaggcttttgcaagcagggctaagattgtgcacgttgatattgatccggctgagattggcaagaacaagcagccacatgtgtccatctgtgcagatgttaagcttgctttgcagggcatgaatgctcttcttgaaggaagcacatcaaagaagagctttgactttggctcatggaacgatgagttggatcagcagaagagggaattcccccttgggtataaaacatctaatgaggagatccagccacaatatgctattcaggttcttgatgagctgacgaaaggcgaggccatcatcggcacaggtgttgggcagcaccagatgtgggcggcacagtactacacttacaagcggccaaggcagtggttgtcttcagctggtcttggggctatgggatttggtttgccggctgctgctggtgcttctgtggcaaacccaggtgtcactgttgttgacatcgatggagatggtagctttctcatgaacgttcaggagctagctatgatccgaattgagaacctcccagtgaaggtctttgtgctaaacaaccagcacctggggatggtggtgcagttggaggacaggttctataaggccaacagagcgcacacatacttgggaaacccagagaatgaaagtgagatatatccagatttcgtgacgatcgccaaagggttcaacattccagcggtccgtgtgacaaagaagaacgaagtccgcgcagcgataaagaagatgctcgagactccagggccgtacctcttggatataatcgtcccacaccaggagcatgtgttgcctatgatccctagtggtggggctttcaaggatatgatcctggatggtgatggcaggactgtgtactgactagctagtcagttaacagatctgccagatcctcggtgtacaaataacccgtcttatcctatgagacgggccggcgtcagtgtgttctggaggaatttttatgtcagagcctttttctttgtgtgcttgatgtagatgccaagggaagcttattggctgttgaagcttgatgcaaaataaattatggaactctgttttttgtttatctaataataactagcaaatatgcttccattgcattgaaactaacagccttttgtgtttccaagttttattttgtgacaatgtcatctatttcaattagttgtggaatcggaaacttgcaggactaacttggaaactccaatccctcagcatcctggactttttcctggtgtaatccatgtagatattattttaatcatcattttagttctggaggtttttccatctccggttttgctcccctttcttcaaaaaaaaaaaaaaaatgccgtaggcgccgcaacgcccacctgttgttcaaactcatgggcacgagtggctcgaagattttatacaacaattgctgtagtttcaccgttgctggtgaagaagcatttttttaaaaaaatatagtggtattcattttaattagtttagttgtgcagcgagcaaaatttggacatgctctgctcggaatctgatcgacctagacacagattagcagcagtagctttgtcatctgttccaagagttgcgatctgatagaagaaaaaaaaaccttcccttcaatgtaaaaccgaaactaacaagaaagaagcacagtgccgtttaggcaagtatggagtacgtattaagcatgtagaaggccatgcatgaaccactaacaagaaagaagcgcagtgccattcaggcaagcataagcatgtagattggcatgcatgaacaactaacagtagatcgtctctggtctgattagaagttttttgggaagccaagaaatcatgtacaactggttccatctcaaattccgtggcaaaaagaggcctaagcaacataaagcttcggtccgggcctagaaggccgaagtacttggtcttcctagtcgagtagatcacattcaagcttggtcacccggtccgtcaatattctgattccgatgacttcgtaggttcctagctcaagccgctcgtgtccaagcgtcacttacgattagctaatgattacggcatctaggaccgactagtggcgcgccgactagctagctaaggtaccgagctcgaattcattccgattaatcgtggcctcttgctcttcaggatgaagagctatgtttaaacgtgcaagcgctactagacaattcagtacattaaaaacgtccgcaatgtgttattaagttgtctaagcgtcaatttgtttacaccacaatatatcctgcca

SEQ ID NO: 245 - DNA, 15523 bp, Artificial Sequence
  PHP93742
gtttacccgccaatatatcctgtcaaacactgcggccgcacttgaccgcggatggagccggagctgtggtgaggccatcgacgggaggtgggggagaacacagtctcagtgttctttgtgagtccgcaaggtttttagcttttctgtattaattaaggttgctgttggctgtagaatacggtcgtggaagagctgtatcggtagctactacgtaagctattatatactggaagtctggagctcgtcgatctccggtcgtcttcctccatttctcctcgtcttgctttgactgctgctaccatttgcttctgttttctgatgaagcatgccatgtcggccaccagtgtttgtgtggtttttgcagggaatggctttcaagtgctgtgattgaatggccctcgtcgtcctcggctgagctcacatggacgcgtcatgtgagtgagatatatgatcatatgatgagtggggttcgggtgagtgcgtacttgaagtaggatcccgctttcactcattcattcattggcctttaaaccgggaaattttcgcgaggagatggagggaagcaagcagggtgacgagtgcagagtgccgcgagcgctttgtcaaaaggcaccgccgtaggcaaaaaaatcaatggccctgactgactcgatggtagtactactgtagagactagagagggttgctccccatatcttcgtgtgacttttactccagcattgcatttccgtcattgagacgttaattaatagcagctttcgggacagatgactgtggccatgtttcgtcacggccgcttcgtgccagctgggggtactatagtactgtgattttgttagtaaaaactttcattaggccaccattgacgaccgggccttcgcttttgctgcgctaattaaccatttcccggcgaccgaagggaacatgaacatgccccgacacatgagggcatgaggactagtgttctccctgtcgttcgttgacttgactagtgatagtttaaacgctcttcaactggaagagcggttactaccggttcactagctagctgctaatcgagctagttaccctatgaggtgacatgaagcgctcacggttactatgacggttagcttcacgactgttggtggcagtagcgtacgacttagctatagttccggacttacccttaagataacttcgtatagcatacattatacgaagttatgggcccacgcgtgaagagcggttaccagagctggtcacctttgtccaccaagatggaactgtcttcggccagaatggccatctggattcagcaggcctagaaggccatttatcgctatcaactttgtatagaaaagttgggccgaattcgagctcggtacggccagaatggcccggaccgggttacccggaccgaagcttgcatgcctgcagggcacaaaatacataaaactagattagaaaaggaagagaatacgccaaattgcagcttaatcaattagacgatttagtcctgtttttacgaaacaattgtttaagataacattaggacatgtacaatatgtgtctttggatgtgtttaaggagtaaatgtaaaaaaaatagatacgtctcttaacgaagtcattgtgtcttggctctatgctcgagacggagaaatagctaattgattaatttaatttattgaatgttcttattggtgtaatgaatatagtaaggcactggccttatacttggagtttggcatgtcttatgctatgttgcaaacaggcccggtcttgacatttcgggggccctaagagaaaatttatatagaggtcctatacgaaaatttgagtctgttattttttcaacttttaaataatatatgaaaaataaaaaattgatgatttacataattttattcaaaatgatatgactggaaatattgttacagtattttatgagtcgtaaaattatataaattatgtaatatacatttgttttgacttttgagagagtatttttacttttaatttgtcaaactagcctaaaccttaaaatacacagtaaaccaaatctaaatacattagatcaaattttctgaaaataaagttcagcaaactaaactaggattaatcaatgtaggttattagggtcgacccttcggtaggctagaattaagcaacgcgataggcacaggtgtacaacacctttcgtccttcccacgtcaattttagggcctgtttggttcacggctaattatgccacactttgcctaaggttagtcgtccgaattgaagaactaaccttatgcagaaaagttaggcaaagtatggcaagttaggtagtaaaccaaacaggccaaagtatttgtcatcaagcagacggttgcgcgacctcaaagagatgattgctagaaaataaagagacgcaacaaaagaatgaaaatatagatttatctataacttatatgcatttgatataagatagataaatgggagccctacgaaccttgaggctctgagcagtcgcatatcctgcacacccttggcgccggccctggttgcaaatatgcaattgtgtccttatccgcgactggtcacgaggctaggattgatcgaaagctgccgatgagaaatggcaagggcggcatgctgtggccttttttttacggtctgtcaggacaactgaaaagttacaaatttatagtggttgtaaacagcaacacgttaaaaagtcgattatcagtttcacagaaagaggtcgttaaaaccgccagcaagcttgtttcactatcagtctgtcgctaagacaatctctttcaccaaaaatacaatttgctttcttgccgttgcttcaagtgaaaatcttaatgttttaaattaaaatatgtggctctacgtaggaaaaaataattcaatcgagtctcatttcataaaaaaaatttggtcaaaaaattatacaccatctcgctcaagtgactcaaatatactaaacggtactgagctgtcttataatataaatttgatttactgttagaatatgatgttttatgagtgcactaaattctataaaatatatttatttttaaattataagatatttttataggtctgctcttagagagagctaaaaaagagagaggctgtctgaagaaaaatccataaccaacgcaaaatcccgggcgcccaatcagccttctccgcggagattcctagcctcagccagagctacctcatctgcgtgaggctccggtggcgccaagtgttccggcatcccggacgcaccaatggcatccgagcaacagatcttttctgcaacaacgcttcgcgtcgcggcggtgtttccctccatctgctctgctctttaaatacctccgtcgtctcctcgtctccacagcatctcaagtcttcacactcctcgccatcacataaaaccagtgcaagcagaagcagcgcaggatccgccatggcggccaatgcgggcggcggtggagcgggaggaggcagcggcagcggcagcgtggctgcgccggcggtgtgccgccccagcggctcgcggtggacgccgacgccggagcagatcaggatgctgaaggagctctactacggctgcggcatccggtcgcccagctcggagcagatccagcgcatcaccgccatgctgcggcagcacggcaagatcgagggcaagaacgtcttctactggttccagaaccacaaggcccgcgagcgccagaagcgccgcctcaccagcctcgacgtcaacgtgcccgccgccggcgcggccgacgccaccaccagccaactcggcgtcctctcgctgtcgtcgccgccgccttcaggcgcggcgcctccctcgcccaccctcggcttctacgccgccggcaatggcggcggatcggctgtgctgctggacacgagttccgactggggcagcagcggcgctgctatggccaccgagacatgcttcctgcaggactacatgggcgtgacggacacgggcagctcgtcgcagtggccacgcttctcgtcgtcggacacgataatggcggcggccgcggcgcgggcggcgacgacgcgggcgcccgagacgctccctctcttcccgacctgcggcgacgacggcggcagcggtagcagcagctacttgccgttctggggtgccgcgtccacaactgccggcgccacttcttccgttgcgatccaacagcaacaccagctgcaggagcagtacagcttttacagcaacagcaacagcacccagctggccggcaccggcaaccaagacgtatcggcaacagcagcagcagccgccgccctggagctgagcctcagctcatggtgctccccttaccctgctgcagggagtatgggctccggcgagggtcgcggttccctcctgacctgcggcgacgtggaggaaaaccccggtccgcccatggccactgtgaacaactggctcgctttctccctctccccgcaggagctgccgccctcccagacgacggactccacactcatctcggccgccaccgccgaccatgtctccggcgatgtctgcttcaacatcccccaagattggagcatgaggggatcagagctttcggcgctcgtcgcggagccgaagctggaggacttcctcggcggcatctccttctccgagcagcatcacaaggccaactgcaacatgatacccagcactagcagcacagtttgctacgcgagctcaggtgctagcaccggctaccatcaccagctgtaccaccagcccaccagctcagcgctccacttcgcggactccgtaatggtggcttcctcggccggtgtccacgacggcggtgccatgctcagcgcggccgccgctaacggtgtcgctggcgctgccagtgccaacggcggcggcatcgggctgtccatgattaagaactggctgcggagccaaccggcgcccatgcagccgagggtggcggcggctgagggcgcgcaggggctctctttgtccatgaacatggcggggacgacccaaggcgctgctggcatgccacttctcgctggagagcgcgcacgggcgcccgagagtgtatcgacgtcagcacagggtggagccgtcgtcgtcacggcgccgaaggaggatagcggtggcagcggtgttgccggcgctctagtagccgtgagcacggacacgggtggcagcggcggcgcgtcggctgacaacacggcaaggaagacggtggacacgttcgggcagcgcacgtcgatttaccgtggcgtgacaaggcatagatggactgggagatatgaggcacatctttgggataacagttgcagaagggaagggcaaactcgtaagggtcgtcaagtctatttaggtggctatgataaagaggagaaagctgctagggcttatgatcttgctgctctgaagtactggggtgccacaacaacaacaaattttccagtgagtaactacgaaaaggagctcgaggacatgaagcacatgacaaggcaggagtttgtagcgtctctgagaaggaagagcagtggtttctccagaggtgcatccatttacaggggagtgactaggcatcaccaacatggaagatggcaagcacggattggacgagttgcagggaacaaggatctttacttgggcaccttcagcacccaggaggaggcagcggaggcgtacgacatcgcggcgatcaagttccgcggcctcaacgccgtcaccaacttcgacatgagccgctacgacgtgaagagcatcctggacagcagcgccctccccatcggcagcgccgccaagcgcctcaaggaggccgaggccgcagcgtccgcgcagcaccaccacgccggcgtggtgagctacgacgtcggccgcatcgcctcgcagctcggcgacggcggagccctggcggcggcgtacggcgcgcactaccacggcgccgcctggccgaccatcgcgttccagccgggcgccgccagcacaggcctgtaccacccgtacgcgcagcagccaatgcgcggcggcgggtggtgcaagcaggagcaggaccacgcggtgatcgcggccgcgcacagcctgcaggacctccaccacctgaacctgggcgcggccggcgcgcacgactttttctcggcagggcagcaggccgccgccgctgcgatgcacggcctgggtagcatcgacagtgcgtcgctcgagcacagcaccggctccaactccgtcgtctacaacggcggggtcggcgacagcaacggcgccagcgccgtcggcggcagtggcggtggctacatgatgccgatgagcgctgccggagcaaccactacatcggcaatggtgagccacgagcaggtgcatgcacgggcctacgacgaagccaagcaggctgctcagatggggtacgagagctacctggtgaacgcggagaacaatggtggcggaaggatgtctgcatgggggactgtcgtgtctgcagccgcggcggcagcagcaagcagcaacgacaacatggccgccgacgtcgggcatggcggcgcgcagctcttcagtgtctggaacgacacttaagcgtacctagtggtaccgagcaacgcgagctgccactgctcttcactgatgtctctggaatggaaggaggaggaagtgagaacagatcaattcgacaaagcagcattagtccgttgatcggtggaagaccactcgtcagtgttgagttgaatgtttgatcaataaaatacggcaatgctgtaagggttgttttttatgccattgataatacactgtactgttcagttgttgaactctatttcttagccatgccaagtgcttttcttattttgaataacattacagcaaaaagttgaaagacaaaaaaaaaaacccccgaacagagtgctttgggtcccaagcttctttagactgtgttcggcgttccccctaaatttctccccctatatctcactcacttgtcacatcagcgttctctttccccctatatctccacgctctacagcagttccacctatatcaaacctctataccccaccacaacaatattatatactttcatcttcaactaactcatgtaccttccaatttttttctactaataattatttacgtgcacagaaacttagcaaggagagagagagcgggaatttaaatgctcggcgttaggcttttagtccgctaggtggctagaccgaggttaggacgctagttcactaggggcctagtggtgttttaagggttaccccggctttaattcgtaacgagcagtttataccgttttgcgctgcattcaccttcgtgagtccggaccccggaagacaggaactgtagcctttttccctttgctagcatgaatatgaatagaataacacgaatttaacatcaattcagctcatattggaacaatctacgcctaaaatttagtggaacacgttttgctcattttccttgaaaagcaacagtgaagcaacatcggtaaaggttcttttggttgcctctaacggtctaacctgaggattcagttataatctggaacatgacagaaacagagcctcgcacccgttttgggaccaaaaccacatgatcgatctccaagaagattattttggacaatatttttccagccacaggcaatccgaagaccacaaatcagaggcactccaaatgcagcccatccattggaccatacagataagacccggataaggcagagcccatcgtgaccgtcaaatagatcacgtccggtctacggccgtccgatctgccacccagagatagcaccgggatttcctataagcacttttcctatttgtagcccgtgacgagcccagcgccacacaccaacctcagcacaccaaggagagtacgtggaggagcagcctccacaaccaagcactcccatcatcatgcatgcagcaggctgtgctgtggacctgatcgagtttcaattgatccaagcaagcaagagggatgggagtccttggttgtggactagacttgtccatcttctggattggccaacttaattaatgtatgaaataaaaggatgcacacatagtgacatgctaatcactataatgtgggcatcaaagttgtgtgttatgtgtaattactagttatctgaataaaagagaaagagatcatccatatttcttatcctaaatgaatgtcacgtgtctttataattctttgatgaaccagatgcatttcattaaccaaatccatatacatataaatattaatcatatataattaatatcaattgggttagcaaaacaaatctagtctaggtgtgttttgcattaagacccgtcgtcaagtaggaattccagaaatcaacgcacggtaactaaatcctcgcgctaagctgggtcagtctagaaggccgatctcccgggataacttcgtatagcatacattatacgaagttatgaattccggaccgggttaccgaattcctgcccttaaggccaattgttcaagattcattcaacaattgaaacatctcccatgattaaatcagtataaggttgctatggtcttgcttgacaaagtttttttttgagggaatttcaactaaatttttgagtgaaactatcaaatactgattttaaaaaatttttataaaaggaagcgcagagataaaaggccatctatgctacaaaagtacccaaaaatgtaatcctaaagtatgaattgcattttttttttgtttggacgaaaggaaaggagtattaccacaagaatgatatcatcttcatatttagatcttttttgggtaaagcttgagattctctaaatatagagaaatcagaagaaaaaaaaaccgtgttttggtggttttgatttctagcctccacaataactttgacggcgtcgacaagtctaacggacaccaagcagcgaaccaccagcgccgagccaagcgaagcagacggccgagacgttgacaccttcggcgcggcatctctcgagagttccgctccggcgctccacctccaccgctggcggtttcttattccgttccgttccgcctcctgctctgctcctctccacaccacacggcacgaaaccgttacggcaccggcagcacccagcacgggagaggggattcctttcccaccgttccttccctttccgccccgccgctataaatagccagccccatccccagcttttttccccaatctcatctcctctctcctgttgttcggagcacacgcacaatccgatcgatccccaaatccccttcgtctctcctcgcgagcctcgtggatcccagcttcaaggtacggcgatcgatcatcccccctccttctctctaccttcttttctctagactacatcggatggcgatccatggttagggcctgctagtttcccttcctgttttgtcgatggctgcgaggcacaatagatctgatggcgttatgacggctaacttgtcatgttgttgcgatttatagtccctttaggagatcagtttaatttctcggatggttcgagatcggtggtccatggttagtaccctaagatccgcgctgttagggttcgtagatggaggcgacctgttctgattgttaacttgtcagtacctgggaaatcctgggatggttctagctcgtccgcagatgagatcgatttcatgatcctctgtatcttgtttcgttgcctaggttccgtctaatctatccgtggtatgatgtagatgttttgatcgtgctaactacgtcttgtaaagttaattgtcaggtcataatttttagcatgcctttttttttgtttggttttgtctaattgggctgtcgttctagatcagagtagaagactgttccaaactacctgctggatttattgaacttggatctgtatgtgtgtcacatatcttcataaattcatgattaagatggattgaaatatcttttatctttttggtatggatagttctatatgttggtgtggctttgttagatgtatacatgcttagatacatgaagcaacgtgctgctactgtttagtaattgctgttcatttgtctaataaacagataaggatatgtatttatgttgctgttggttttgctggtactttgttggatacaaatgcttcaatacagaaaacagcatgctgctacgatttaccatttatctaatcttatcatatgtctaatctaataaacaaacatgcttttaaattatcttcatatgcttggatgatggcatacacagcggctatgtgtggttttttaaatacccagcatcatgggcatgcatgacactgctttaatatgctttttatttgcttgagactgtttcttttgtttatactgaccctttagttcggtgactcttctgcaggtcgactttaacttagcctaggatccatggcccagtccaagcacggcctgaccaaggagatgaccatgaagtaccgcatggagggctgcgtggacggccacaagttcgtgatcaccggcgagggcatcggctaccccttcaagggcaagcaggccatcaacctgtgcgtggtggagggcggccccttgcccttcgccgaggacatcttgtccgccgccttcatgtacggcaaccgcgtgttcaccgagtacccccaggacatcgtcgactacttcaagaactcctgccccgccggctacacctgggaccgctccttcctgttcgaggacggcgccgtgtgcatctgcaacgccgacatcaccgtgagcgtggaggagaactgcatgtaccacgagtccaagttctacggcgtgaacttccccgccgacggccccgtgatgaagaagatgaccgacaactgggagccctcctgcgagaagatcatccccgtgcccaagcagggcatcttgaagggcgacgtgagcatgtacctgctgctgaaggacggtggccgcttgcgctgccagttcgacaccgtgtacaaggccaagtccgtgccccgcaagatgcccgactggcacttcatccagcacaagctgacccgcgaggaccgcagcgacgccaagaaccagaagtggcacctgaccgagcacgccatcgcctccggctccgccttgccctccggactcagatctcgatagggtaccaatggccagttaacagatccagctgctgctgttctagggttcacaagtctgcctatttgtcttccccaatggagctatggttgtctggtctggtccttggtcgtgtcccgtttcattgtgtactatttacctgtaatgtgtatccttaagtctggtttgatggtgtctgaaacgttttgctgtggtagagcagcatggaagaactataatgaataagtgatccctaatcattgtgtccaaattttgcttctgctatacccttttgtgctgtttcttatgttttgcttaaaaatttgatctgacaaacaaatttgtctaaattatgctcttgttctgactgtgtactgtacacatttgtattgctaccggtttggcacatagttttctctttgattgcagatcaaacccttctgattgcagattgcttggctatggctgatgtgctcactgttcttctttagcttgtatattgctgatggtggcttggctacggctgaaaaagttgctgctgcgccgacttggcaactgttgctccagtaatgctttgtcctctcttcctagccgccgacttggcacttggcagctgttgctcctgtaatgcgttgttatctcttatctcttgagatgtactatgattttgaggctgtttgacttgtgccagattgccagtgctgatgctatattatctcaggtttttatgctagtatatgttttactgtgtgctgcctgtgtcgagttacgtaatctattgaaccgctatgcgtgttgatgccctgttgttgcttgccagattgatgcccctgttgcttgcagcttgcaagctgtagtgaaatcctaaaattcgaaaccaaatctattctgaacttttgaagatctgtgatgtccggaagaaaagattcaaacagataaacgggactctccagaatctataaaataaatgatcgacaaacgctttgctttggtaggcttcctagttagttagcggaccgggatccgacggcgtcttcaccgccccgccgccgcccgagccggacttgtcgctgccgccgccgctgctcatcttgcgcgcttgtgtccctccctcagtccctgcgttcgcggatcgcgggcgggtgcgacccgtttggactccggccggtagccttcgtgccgacctcgctcggtccaccggtttgtcggggacccacatgtcagtgaaggtacgcgtccacgtccacagaccctactaccccagacgagtccaaatcgctgttccctcacactctcgtgtaccagcgcgcggcggaaagcacctttccaacaaccgccgacacgtcggtcccacgtcggcatgctccaccggtcagtgtttggcgtgtacggctcccggcgacgaacgagtgtggcctaagctttcctactcccatcccatctgagccacacatctctctcacgccacgcgcacaaaacagccaggctcccacgcgcatcaaccggctctccctttccgtgccactcgcccccaagccccaaaccctcgccgccgcctccgagacagccgccgccacctaggccatggccaccgccgccgccgcgtctaccgcgctcactggcgccactaccgctgcgcccaaggcgaggcgccgggcgcacctcctggccacccgccgcgccctcgccgcgcccatcaggtgctcagcggcgtcacccgccatgccgatggctcccccggccaccccgctccggccgtggggccccaccgagccccgcaagggtgctgacatcctcgtcgagtccctcgagcgctgcggcgtccgcgacgtcttcgcctaccccggcggcgcgtcgatggagatccaccaggcactcacccgctcccccgtcatcgccaaccacctcttccgccacgagcaaggggaggcctttgccgcctccggctacgcgcgctcctcgggccgcgtcggcgtctgcatcgccacctccggccccggcgccaccaacctagtctccgcgctcgccgacgcgctgctcgattccgtcccgatggtcgccatcacgggacaggtggcgcgacgcatgattggcaccgacgccttccaggagacgcccatcgtcgaggtcacgcgctccatcaccaagcacaactacctggtcctcgacgtcgacgacatcccccgcgtcgtgcaggaggctttcttcctcgcctcctctggtcgaccagggccggtgcttgtcgacatccccaaggacatccagcagcagatggcggtgcctgtctgggacaagcccatgagtctgcctgggtacattgcgcgccttcccaagccccctgcgactgagttgcttgagcaggtgctgcgtcttgttggtgaatcgcggcgccctgttctttatgtgggcggtggctgcgcagcatctggtgaggagttgcgacgctttgtggagctgactggaatcccggtcacaactactcttatgggcctcggcaacttccccagcgacgacccactgtctctgcgcatgctaggtatgcatgggacggtgtatgcaaattatgcagtggataaggccgatctgttgcttgcacttggtgtgcggtttgatgatcgcgtgacagggaagattgaggcttttgcaagcagggctaagattgtgcacgttgatattgatccggctgagattggcaagaacaagcagccacatgtgtccatctgtgcagatgttaagcttgctttgcagggcatgaatgctcttcttgaaggaagcacatcaaagaagagctttgactttggctcatggaacgatgagttggatcagcagaagagggaattcccccttgggtataaaacatctaatgaggagatccagccacaatatgctattcaggttcttgatgagctgacgaaaggcgaggccatcatcggcacaggtgttgggcagcaccagatgtgggcggcacagtactacacttacaagcggccaaggcagtggttgtcttcagctggtcttggggctatgggatttggtttgccggctgctgctggtgcttctgtggcaaacccaggtgtcactgttgttgacatcgatggagatggtagctttctcatgaacgttcaggagctagctatgatccgaattgagaacctcccagtgaaggtctttgtgctaaacaaccagcacctggggatggtggtgcagttggaggacaggttctataaggccaacagagcgcacacatacttgggaaacccagagaatgaaagtgagatatatccagatttcgtgacgatcgccaaagggttcaacattccagccgtccgtgtgacaaagaagaacgaagtccgcgcagcgataaagaagatgctcgagactccagggccgtacctcttggatataatcgtcccacaccaggagcatgtgttgcctatgatccctagtggtggggctttcaaggatatgatcctggatggtgatggcaggactgtgtactgacttcgaataggtacccggggatcctctagtgccgtgggtcgtttaagctgccgctgtacctgtgtcgtctggtgccttctggtgtacctgggaggttgtcgtctatcaagtatctgtggttggtgtcatgagtcagtgagtcccaatactgttcgtgtcctgtgtgcattatacccaaaactgttatgggcaaatcatgaataagcttgatgttcgaacttaaaagtctctgctcaatatggtattatggttgtttttgttcgtctcctaatatttgcctgggatcaaattttattggctggtgttcatttgacctccatgttcttgctaggctccattttttactctacagccataatatgtttgattgtttggtttgttctttgttgtacacctggttctgtcgagcttagttttcgacactggcttacagcttaacatgttgctattttattgggttctgattgctattttattgggttctgattgctagtttttgctgaatccaaaaaccatgttatttatttaagcgatccaggttattattatgatggtggctaagtttttttttttccaagggtaaattttctggattctccagtgtttctgtggccgaattcaatcactagagtcgacctgcaaagcttcggtccgggcctagaaggcccgcgccacttacgcttgattccgatgacttcgtaggttcctagctcaagccgctcgtgtccaagcgtcacttacgattagctaatgattacggcatctaggaccgactagctagctagctaagagctcggtaccgagctcgaattcattccgattaatcgtggcctcttgctcttcaggatgaagagctatgtttaaacgtgcaagcgctactagacaattcagtacattaaaaacgtccgcaatgtgttattaagttgtctaagcgtcaatttgtttacaccacaatatatcctgcca

SEQ ID NO: 246 - DNA, 12833 bp, Artificial Sequence
  PHP93937
gtttacccgccaatatatcctgtcaaacactgcggccgcacttgaccgcggatggagccggagctgtggtgaggccatcgacgggaggtgggggagaacacagtctcagtgttctttgtgagtccgcaaggtttttagcttttctgtattaattaaggttgctgttggctgtagaatacggtcgtggaagagctgtatcggtagctactacgtaagctattatatactggaagtctggagctcgtcgatctccggtcgtcttcctccatttctcctcgtcttgctttgactgctgctaccatttgcttctgttttctgatgaagcatgccatgtcggccaccagtgtttgtgtggtttttgcagggaatggctttcaagtgctgtgattgaatggccctcgtcgtcctcggctgagctcacatggacgcgtcatgtgagtgagatatatgatcatatgatgagtggggttcgggtgagtgcgtacttgaagtaggatcccgctttcactcattcattcattggcctttaaaccgggaaattttcgcgaggagatggagggaagcaagcagggtgacgagtgcagagtgccgcgagcgctttgtcaaaaggcaccgccgtaggcaaaaaaatcaatggccctgactgactcgatggtagtactactgtagagactagagagggttgctccccatatcttcgtgtgacttttactccagcattgcatttccgtcattgagacgttaattaatagcagctttcgggacagatgactgtggccatgtttcgtcacggccgcttcgtgccagctgggggtactatagtactgtgattttgttagtaaaaactttcattaggccaccattgacgaccgggccttcgcttttgctgcgctaattaaccatttcccggcgaccgaagggaacatgaacatgccccgacacatgagggcatgaggactagtgttctccctgtcgttcgttgacttgactagtgatagtttaaacgctcttcaactggaagagcggttactaccggttcactagctagctgctaatcgagctagttaccctatgaggtgacatgaagcgctcacggttactatgacggttagcttcacgactgttggtggcagtagcgtacgacttagctatagttccggacttacccttaagataacttcgtatagcatacattatacgaagttatgggcccacgcgtgaagagcggttaccagagctggtcacctttgtccaccaagatggaactgtcttcggccagaatggccatctggattcagcaggcctagaaggccatttatcgctatcaactttgtatagaaaagttgggccgaattcgagctcggtacggccagaatggcccggaccgggttacccggaccgaagcttgcatgcctgcaggccggctttaattcgtaacgagcagtttataccgttttgcgctgcattcaccttcgtgagtccggaccccggaagacaggaactgtagcctttttccctttgctagcatgaatatgaatagaataacacgaatttaacatcaattcagctcatattggaacaatctacgcctaaaatttagtggaacacgttttgctcattttccttgaaaagcaacagtgaagcaacatcggtaaaggttcttttggttgcctctaacggtctaacctgaggattcagttataatctggaacatgacagaaacagagcctcgcacccgttttgggaccaaaaccacatgatcgatctccaagaagattattttggacaatatttttccagccacaggcaatccgaagaccacaaatcagaggcactccaaatgcagcccatccattggaccatacagataagacccggataaggcagagcccatcgtgaccgtcaaatagatcacgtccggtctacggccgtccgatctgccacccagagatagcaccgggatttcctataagcacttttcctatttgtagcccgtgacgagcccagcgccacacaccaacctcagcacaccaaggagagtacgtggaggagcagccggatccatggcggccaatgcgggcggcggtggagcgggaggaggcagcggcagcggcagcgtggctgcgccggcggtgtgccgccccagcggctcgcggtggacgccgacgccggagcagatcaggatgctgaaggagctctactacggctgcggcatccggtcgcccagctcggagcagatccagcgcatcaccgccatgctgcggcagcacggcaagatcgagggcaagaacgtcttctactggttccagaaccacaaggcccgcgagcgccagaagcgccgcctcaccagcctcgacgtcaacgtgcccgccgccggcgcggccgacgccaccaccagccaactcggcgtcctctcgctgtcgtcgccgccgccttcaggcgcggcgcctccctcgcccaccctcggcttctacgccgccggcaatggcggcggatcggctgtgctgctggacacgagttccgactggggcagcagcggcgctgctatggccaccgagacatgcttcctgcaggactacatgggcgtgacggacacgggcagctcgtcgcagtggccacgcttctcgtcgtcggacacgataatggcggcggccgcggcgcgggcggcgacgacgcgggcgcccgagacgctccctctcttcccgacctgcggcgacgacggcggcagcggtagcagcagctacttgccgttctggggtgccgcgtccacaactgccggcgccacttcttccgttgcgatccaacagcaacaccagctgcaggagcagtacagcttttacagcaacagcaacagcacccagctggccggcaccggcaaccaagacgtatcggcaacagcagcagcagccgccgccctggagctgagcctcagctcatggtgctccccttaccctgctgcagggagtatgtgagagcaacgcgagctgccactgctcttcactgatgtctctggaatggaaggaggaggaagtgagaacagatcaattcgacaaagcagcattagtccgttgatcggtggaagaccactcgtcagtgttgagttgaatgtttgatcaataaaatacggcaatgctgtaagggttgttttttatgccattgataatacactgtactgttcagttgttgaactctatttcttagccatgccaagtgcttttcttattttgaataacattacagcaaaaagttgaaagacaaaaaaaaaaacccccgaacagagtgctttgggtcccaagcttctttagactgtgttcggcgttccccctaaatttctccccctatatctcactcacttgtcacatcagcgttctctttccccctatatctccacgctctacagcagttccacctatatcaaacctctataccccaccacaacaatattatatactttcatcttcaactaactcatgtaccttccaatttttttctactaataattatttacgtgcacagaaacttagcaaggagagagagagcgggaatttaaatgctcggcgttaggcttttagtccgctaggtggctagaccgaggttaggacgctagttcactaggggcctagtggtgttttaagggttaccgcacaaaatacataaaactagattagaaaaggaagagaatacgccaaattgcagcttaatcaattagacgatttagtcctgtttttacgaaacaattgtttaagataacatggccttatacttggagtttggcatgtcttatgctatgttgcaaacaggcccggtcttgacatttcgggggccctaagagaaaatttatatagaggtcctatacgaaaatttgagtctgttattttttcaacttttaaataatatatgaaaaataaaaaattgatgatttacataattttattcaaaatgatatgactggaaatattgttacagtattttatgagtcgtaaaattatataaattatgtaatatacatttgttttgacttttgagagagtatttttacttttaatttgtcaaactagcctaaaccttaaaatacacagtaaaccaaatctaaatacattagatcaaattttctgaaaataaagttcagcaaactaaactaggattaatcaatgtaggttattagggtcgacccttcggtaggctagaattaagcaacgcgataggcacaggtgtacaacacctttcgtccttcccacgtcaataaagtatttgtcatcaagcagacggttgcgcgacctcaaagagatgattgctagaaaataaagagacgcaacaaaagaatgaaaatatagatttatctataacttatatgcatttgatataagatagataaatgggagccctacgaaccttgaggctctgagcagtcgcatatcctgcacacccttggcgccggccctggttgcaaatatgcaattgtgtccttatccgcgactggtcacgaggctaggattgatcgaaagctgccgatgagaaatggcaagggcggcatgctgtggccttttttttacggtctgtcaggacaactgaaaagttacaaatttatagtggttgtaaacagcaacacgttaaaaagtcgattatcagtttcacagaaagaggtcgttaaaaccgccagcaagcttgtttcactatcagtctgtcgctaagacaatctctttcaccaaaaatacaatttgctttcttgccgttgcttcaagtgaaaatctgagctaaaaaagagagaggctgtctgaagaaaaatccataaccaacgcaaaatcccgggcgcccaatcagccttctccgcggagattcctagcctcagccagagctacctcatctgcgtgaggctccggtggcgccaagtgttccggcatcccggacgcaccaatggcatccgagcaacagatcttttctgcaacaacgcttcgcgtcgcggcggtgtttccctccatctgctctgctctttaaatacctccgtcgtctcctcgtctccacagcatctcaagtcttcacactcctcgccatcacataaaaccagtgcaagcagaagcagcgcatccacaaccaagcactcccatcatcatgcatgcagcaggctgtgctgtggacctgatcgagtttcaattgatccaagcaagcaagagggatgggagtccttggttgtggagggggtggaggcgccaccgcccaccggccaccgctgcggatatctaggtgttcggatgcacgtgagcgcgcactggttccagtttgtaccatgatgtaaattacttaccgtaccagggttcaatcggcaaggaagaattgttgtgttcactgtcttgggcagtctcttggtccaatatgaatcaacttacacagcatctccaaaaacttctaaaattactagctgaatgcccgtgcgttgcaacgggaatatataataccagtatactacgataacttatatacaaaatgtatgttatatcgttatgagaaaatgtttcataaccaatttatgattctggtcatacataaattttgttatttatagtctatctgtttcaccactacattgcaaccatcagattaagacccgtcgtcaagtaggaattccagaaatcaacgcacggtaactaaatcctcgcgctaagctgggtcagtctagaaggccgatctcccgggataacttcgtatagcatacattatacgaagttatgaattccggaccgggttaccgaattcctgcccttaaggccaattgttcaagattcattcaacaattgaaacatctcccatgattaaatcagtataaggttgctatggtcttgcttgacaaagtttttttttgagggaatttcaactaaatttttgagtgaaactatcaaatactgattttaaaaaatttttataaaaggaagcgcagagataaaaggccatctatgctacaaaagtacccaaaaatgtaatcctaaagtatgaattgcattttttttttgtttggacgaaaggaaaggagtattaccacaagaatgatatcatcttcatatttagatcttttttgggtaaagcttgagattctctaaatatagagaaatcagaagaaaaaaaaaccgtgttttggtggttttgatttctagcctccacaataactttgacggcgtcgacaagtctaacggacaccaagcagcgaaccaccagcgccgagccaagcgaagcagacggccgagacgttgacaccttcggcgcggcatctctcgagagttccgctccggcgctccacctccaccgctggcggtttcttattccgttccgttccgcctcctgctctgctcctctccacaccacacggcacgaaaccgttacggcaccggcagcacccagcacgggagaggggattcctttcccaccgttccttccctttccgccccgccgctataaatagccagccccatccccagcttttttccccaatctcatctcctctctcctgttgttcggagcacacgcacaatccgatcgatccccaaatccccttcgtctctcctcgcgagcctcgtggatcccagcttcaaggtacggcgatcgatcatcccccctccttctctctaccttcttttctctagactacatcggatggcgatccatggttagggcctgctagtttcccttcctgttttgtcgatggctgcgaggcacaatagatctgatggcgttatgacggctaacttgtcatgttgttgcgatttatagtccctttaggagatcagtttaatttctcggatggttcgagatcggtggtccatggttagtaccctaagatccgcgctgttagggttcgtagatggaggcgacctgttctgattgttaacttgtcagtacctgggaaatcctgggatggttctagctcgtccgcagatgagatcgatttcatgatcctctgtatcttgtttcgttgcctaggttccgtctaatctatccgtggtatgatgtagatgttttgatcgtgctaactacgtcttgtaaagttaattgtcaggtcataatttttagcatgcctttttttttgtttggttttgtctaattgggctgtcgttctagatcagagtagaagactgttccaaactacctgctggatttattgaacttggatctgtatgtgtgtcacatatcttcataaattcatgattaagatggattgaaatatcttttatctttttggtatggatagttctatatgttggtgtggctttgttagatgtatacatgcttagatacatgaagcaacgtgctgctactgtttagtaattgctgttcatttgtctaataaacagataaggatatgtatttatgttgctgttggttttgctggtactttgttggatacaaatgcttcaatacagaaaacagcatgctgctacgatttaccatttatctaatcttatcatatgtctaatctaataaacaaacatgcttttaaattatcttcatatgcttggatgatggcatacacagcggctatgtgtggttttttaaatacccagcatcatgggcatgcatgacactgctttaatatgctttttatttgcttgagactgtttcttttgtttatactgaccctttagttcggtgactcttctgcaggtcgactttaacttagcctaggatccatggcccagtccaagcacggcctgaccaaggagatgaccatgaagtaccgcatggagggctgcgtggacggccacaagttcgtgatcaccggcgagggcatcggctaccccttcaagggcaagcaggccatcaacctgtgcgtggtggagggcggccccttgcccttcgccgaggacatcttgtccgccgccttcatgtacggcaaccgcgtgttcaccgagtacccccaggacatcgtcgactacttcaagaactcctgccccgccggctacacctgggaccgctccttcctgttcgaggacggcgccgtgtgcatctgcaacgccgacatcaccgtgagcgtggaggagaactgcatgtaccacgagtccaagttctacggcgtgaacttccccgccgacggccccgtgatgaagaagatgaccgacaactgggagccctcctgcgagaagatcatccccgtgcccaagcagggcatcttgaagggcgacgtgagcatgtacctgctgctgaaggacggtggccgcttgcgctgccagttcgacaccgtgtacaaggccaagtccgtgccccgcaagatgcccgactggcacttcatccagcacaagctgacccgcgaggaccgcagcgacgccaagaaccagaagtggcacctgaccgagcacgccatcgcctccggctccgccttgccctccggactcagatctcgatagggtaccaatggccagttaacagatccagctgctgctgttctagggttcacaagtctgcctatttgtcttccccaatggagctatggttgtctggtctggtccttggtcgtgtcccgtttcattgtgtactatttacctgtaatgtgtatccttaagtctggtttgatggtgtctgaaacgttttgctgtggtagagcagcatggaagaactataatgaataagtgatccctaatcattgtgtccaaattttgcttctgctatacccttttgtgctgtttcttatgttttgcttaaaaatttgatctgacaaacaaatttgtctaaattatgctcttgttctgactgtgtactgtacacatttgtattgctaccggtttggcacatagttttctctttgattgcagatcaaacccttctgattgcagattgcttggctatggctgatgtgctcactgttcttctttagcttgtatattgctgatggtggcttggctacggctgaaaaagttgctgctgcgccgacttggcaactgttgctccagtaatgctttgtcctctcttcctagccgccgacttggcacttggcagctgttgctcctgtaatgcgttgttatctcttatctcttgagatgtactatgattttgaggctgtttgacttgtgccagattgccagtgctgatgctatattatctcaggtttttatgctagtatatgttttactgtgtgctgcctgtgtcgagttacgtaatctattgaaccgctatgcgtgttgatgccctgttgttgcttgccagattgatgcccctgttgcttgcagcttgcaagctgtagtgaaatcctaaaattcgaaaccaaatctattctgaacttttgaagatctgtgatgtccggaagaaaagattcaaacagataaacgggactctccagaatctataaaataaatgatcgacaaacgctttgctttggtaggcttcctagttagttagcggaccgggatccgacggcgtcttcaccgccccgccgccgcccgagccggacttgtcgctgccgccgccgctgctcatcttgcgcgcttgtgtccctccctcagtccctgcgttcgcggatcgcgggcgggtgcgacccgtttggactccggccggtagccttcgtgccgacctcgctcggtccaccggtttgtcggggacccacatgtcagtgaaggtacgcgtccacgtccacagaccctactaccccagacgagtccaaatcgctgttccctcacactctcgtgtaccagcgcgcggcggaaagcacctttccaacaaccgccgacacgtcggtcccacgtcggcatgctccaccggtcagtgtttggcgtgtacggctcccggcgacgaacgagtgtggcctaagctttcctactcccatcccatctgagccacacatctctctcacgccacgcgcacaaaacagccaggctcccacgcgcatcaaccggctctccctttccgtgccactcgcccccaagccccaaaccctcgccgccgcctccgagacagccgccgccacctaggccatggccaccgccgccgccgcgtctaccgcgctcactggcgccactaccgctgcgcccaaggcgaggcgccgggcgcacctcctggccacccgccgcgccctcgccgcgcccatcaggtgctcagcggcgtcacccgccatgccgatggctcccccggccaccccgctccggccgtggggccccaccgagccccgcaagggtgctgacatcctcgtcgagtccctcgagcgctgcggcgtccgcgacgtcttcgcctaccccggcggcgcgtcgatggagatccaccaggcactcacccgctcccccgtcatcgccaaccacctcttccgccacgagcaaggggaggcctttgccgcctccggctacgcgcgctcctcgggccgcgtcggcgtctgcatcgccacctccggccccggcgccaccaacctagtctccgcgctcgccgacgcgctgctcgattccgtcccgatggtcgccatcacgggacaggtggcgcgacgcatgattggcaccgacgccttccaggagacgcccatcgtcgaggtcacgcgctccatcaccaagcacaactacctggtcctcgacgtcgacgacatcccccgcgtcgtgcaggaggctttcttcctcgcctcctctggtcgaccagggccggtgcttgtcgacatccccaaggacatccagcagcagatggcggtgcctgtctgggacaagcccatgagtctgcctgggtacattgcgcgccttcccaagccccctgcgactgagttgcttgagcaggtgctgcgtcttgttggtgaatcgcggcgccctgttctttatgtgggcggtggctgcgcagcatctggtgaggagttgcgacgctttgtggagctgactggaatcccggtcacaactactcttatgggcctcggcaacttccccagcgacgacccactgtctctgcgcatgctaggtatgcatgggacggtgtatgcaaattatgcagtggataaggccgatctgttgcttgcacttggtgtgcggtttgatgatcgcgtgacagggaagattgaggcttttgcaagcagggctaagattgtgcacgttgatattgatccggctgagattggcaagaacaagcagccacatgtgtccatctgtgcagatgttaagcttgctttgcagggcatgaatgctcttcttgaaggaagcacatcaaagaagagctttgactttggctcatggaacgatgagttggatcagcagaagagggaattcccccttgggtataaaacatctaatgaggagatccagccacaatatgctattcaggttcttgatgagctgacgaaaggcgaggccatcatcggcacaggtgttgggcagcaccagatgtgggcggcacagtactacacttacaagcggccaaggcagtggttgtcttcagctggtcttggggctatgggatttggtttgccggctgctgctggtgcttctgtggcaaacccaggtgtcactgttgttgacatcgatggagatggtagctttctcatgaacgttcaggagctagctatgatccgaattgagaacctcccagtgaaggtctttgtgctaaacaaccagcacctggggatggtggtgcagttggaggacaggttctataaggccaacagagcgcacacatacttgggaaacccagagaatgaaagtgagatatatccagatttcgtgacgatcgccaaagggttcaacattccagccgtccgtgtgacaaagaagaacgaagtccgcgcagcgataaagaagatgctcgagactccagggccgtacctcttggatataatcgtcccacaccaggagcatgtgttgcctatgatccctagtggtggggctttcaaggatatgatcctggatggtgatggcaggactgtgtactgacttcgaataggtacccggggatcctctagtgccgtgggtcgtttaagctgccgctgtacctgtgtcgtctggtgccttctggtgtacctgggaggttgtcgtctatcaagtatctgtggttggtgtcatgagtcagtgagtcccaatactgttcgtgtcctgtgtgcattatacccaaaactgttatgggcaaatcatgaataagcttgatgttcgaacttaaaagtctctgctcaatatggtattatggttgtttttgttcgtctcctaatatttgcctgggatcaaattttattggctggtgttcatttgacctccatgttcttgctaggctccattttttactctacagccataatatgtttgattgtttggtttgttctttgttgtacacctggttctgtcgagcttagttttcgacactggcttacagcttaacatgttgctattttattgggttctgattgctattttattgggttctgattgctagtttttgctgaatccaaaaaccatgttatttatttaagcgatccaggttattattatgatggtggctaagtttttttttttccaagggtaaattttctggattctccagtgtttctgtggccgaattcaatcactagagtcgacctgcaaagcttcggtccgggcctagaaggcccgcgccacttacgcttgattccgatgacttcgtaggttcctagctcaagccgctcgtgtccaagcgtcacttacgattagctaatgattacggcatctaggaccgactagctagctagctaagagctcggtaccgagctcgaattcattccgattaatcgtggcctcttgctcttcaggatgaagagctatgtttaaacgtgcaagcgctactagacaattcagtacattaaaaacgtccgcaatgtgttattaagttgtctaagcgtcaatttgtttacaccacaatatatcctgcca

SEQ ID NO: 247 - DNA, 16555 bp, Artificial Sequence
  PHP94638
gtttacccgccaatatatcctgtcaaacactgcggccgcacttgaccgcggatggagccggagctgtggtgaggccatcgacgggaggtgggggagaacacagtctcagtgttctttgtgagtccgcaaggtttttagcttttctgtattaattaaggttgctgttggctgtagaatacggtcgtggaagagctgtatcggtagctactacgtaagctattatatactggaagtctggagctcgtcgatctccggtcgtcttcctccatttctcctcgtcttgctttgactgctgctaccatttgcttctgttttctgatgaagcatgccatgtcggccaccagtgtttgtgtggtttttgcagggaatggctttcaagtgctgtgattgaatggccctcgtcgtcctcggctgagctcacatggacgcgtcatgtgagtgagatatatgatcatatgatgagtggggttcgggtgagtgcgtacttgaagtaggatcccgctttcactcattcattcattggcctttaaaccgggaaattttcgcgaggagatggagggaagcaagcagggtgacgagtgcagagtgccgcgagcgctttgtcaaaaggcaccgccgtaggcaaaaaaatcaatggccctgactgactcgatggtagtactactgtagagactagagagggttgctccccatatcttcgtgtgacttttactccagcattgcatttccgtcattgagacgttaattaatagcagctttcgggacagatgactgtggccatgtttcgtcacggccgcttcgtgccagctgggggtactatagtactgtgattttgttagtaaaaactttcattaggccaccattgacgaccgggccttcgcttttgctgcgctaattaaccatttcccggcgaccgaagggaacatgaacatgccccgacacatgagggcatgaggactagtgttctccctgtcgttcgttgacttgactagtgatagtttaaacgctcttcaactggaagagcggttactaccggttcactagctagctgctaatcgagctagttaccctatgaggtgacatgaagcgctcacggttactatgacggttagcttcacgactgttggtggcagtagcgtacgacttagctatagttccggacttacccagatcttggccaataacttcgtatagcatacattatacgaagttataggtacaattcgagctcggtaccctggttcacaaactcaatacaacacacagtggagtagggtattacgctccggcggcccgaaccactctaaatccttgtgtcctcgtgtgctcttccaccattaatgactgtaattgcagggacacgaagagttgtagcgcttttgccaacaagatccgctatatgctagtagagtggaacctgcacagcaacaagcatccaataatctgagaataagaattatgtgtggtgatggttctcatctctgcaactcgccattttcgcgagagaaccaaatccaagttggtgaagatcatgatttgggctcatgggctggcatagtagctattacctttgcaattgtggttcgaatctatccgatattctccttttcagggagagctaatgcttatgcttattgggtattttggtttgacactgcttcacgcccaaaaaaaggcaactatgtctgagttggatatggcccaaaaaaaggcagctatgtctgagttggatatggaagtcttctttcgtttagggtgaagtaagaccaagctcatgagcttattatcttaggtcggaacaaattagttgataggcatggcacatttatcaaattataatgattttaacagaaaagcaacacctctttttcagcagcaccagctttgcaagctgcaattgacactccaagcatagtatttgctccaaactcagcctgcatttcgcacaatatcatatctatttccatttggataaaatatattttccagaaatatgggaacagaatcaagatacagaaaaaagttgtggtagtagtggtaagtggaaacacaagtacagtgaaaagatagcattatttctgaacagtcaaattaaccgaaataagtagtatcacatactgcccctaaattgactacacccaatgtaaagaattgcttgagcatattgagccatcagttgtttgtttgtgtaacggatttgacaatgcagagttcaggagcaaaaaaccgcaaaggagagaaagagggaaaggatctcctagtatcccaccttgtggcgcgccctgtcaagtgcatgatggcctggtcgatctgcgtctgctgctgcggttccatcccaacgagtgcctccgacaccttgtcgttgatcacccgcaccgcgtaggcgacccccctggcgaggaacttccgcctctcggaggccccggccgcgtcggcggcggcgccctcgagcgcgcccacgctagccgtagatgctcggtgcacggccttgttggtgtgcaactcgacctcaacggccggtgcgctacgcccgtcaaggatctggcgcgcccgcaccctcgtgatcacggtgggcgcctcccgcctcatgtggccgacgatgaaaagcgccgggttaggggccttggcgcgcaccgccgtattcagggcctcctcgctcttgcgcgagagcaggtgcttccccaggtactcctgcactgacaaggctgccacagcggtggaatttgtcctcacgacttcgccacgtcgtcctcacctccctggcttcccacgactccgccgtatcgaggtgctcggtgggtcgtcttaatccgaagtccgaactaggaagacgagacagagaggtctgaggaatgggcctcgtttgatgttgagctgaattatttttccagcataagcccaggtcttggtccatgaacaaaattactagaaacccagcccagtactacgatctaaaagagggactgccactggatagctctctctagcattctccacgctccaatacagcggcgtcgtgtctatccgggtctatccgcgaacacgtgagaactctccagaaactgctttctcctccacttcatctctctcgctttccctctataaaaagaccccttctaggaattgagggagacagcaagcaccaagcagcgatccgaagctcaatcaattcactcaaacctcttccccaaatcttcgattagatcttcgttgacaagaagactagaaccgaacctgacatgtccaacctgctcacggttcaccagaaccttccggctcttccagtggacgcgacgtccgatgaagtcaggaagaacctcatggacatgttccgcgacaggcaagcgttcagcgagcacacctggaagatgctgctctccgtctgccgctcctgggctgcatggtgcaagctgaacaacaggaagtggttccccgctgagcccgaggacgtgagggattaccttctgtacctgcaagcgcgaggtttgtttctgcttctacctttgatatatatataataattatcattaattagtagtaatataatatttcaaatatttttttcaaaataaaagaatgtagtatatagcaattgcttttctgtagtttataagtgtgtatattttaatttataacttttctaatatatgaccaaaacatggtgatgcctaggtctggcagtgaagaccatccagcaacaccttggacaactgaacatgcttcacaggcgctccggcctcccgcgccccagcgactcgaacgccgtgagcctcgtcatgcgccgcatcaggaaggaaaacgtcgatgccggcgaaagggcaaagcaggccctcgcgttcgagaggaccgatttcgaccaggtccgcagcctgatggagaacagcgacaggtgccaggacattaggaacctggcgttcctcggaattgcatacaacacgctcctcaggatcgcggaaattgcccgcattcgcgtgaaggacattagccgcaccgacggcggcaggatgcttatccacattggcaggaccaagacgctcgtttccaccgcaggcgtcgaaaaggccctcagcctcggagtgaccaagctcgtcgaacgctggatctccgtgtccggcgtcgcggacgacccaaacaactacctcttctgccgcgtccgcaagaacggggtggctgcccctagcgccaccagccaactcagcacgagggccttggaaggtattttcgaggccacccaccgcctgatctacggcgcgaaggatgacagcggtcaacgctacctcgcatggtccgggcactccgcccgcgttggagctgctagggacatggcccgcgccggtgtttccatccccgaaatcatgcaggcgggtggatggacgaacgtgaacattgtcatgaactacattcgcaaccttgacagcgagacgggcgcaatggttcgcctcctggaagatggtgactgaggtacccaacctagacttgtccatcttctggattggccaacttaattaatgtatgaaataaaaggatgcacacatagtgacatgctaatcactataatgtgggcatcaaagttgtgtgttatgtgtaattactagttatctgaataaaagagaaagagatcatccatatttcttatcctaaatgaatgtcacgtgtctttataattctttgatgaaccagatgcatttcattaaccaaatccatatacatataaatattaatcatatataattaatatcaattgggttagcaaaacaaatctagtctaggtgtgttttgcgatccgatatcgatctcccatccttaaaacaccactaggcccctagtgaactagcgtcctaacctcggtctagccacctagcggactaaaagcctaacgccgagccccgggtggccttctaggcccggaccgggtgaccccgctctctctctccttgctaagtttctgtgcacgtaaataattattagtagaaaaaaattggaaggtacatgagttagttgaagatgaaagtatataatattgttgtggtggggtatagaggtttgatataggtggaactgctgtagagcgtggagatatagggggaaagagaacgctgatgtgacaagtgagtgagatatagggggagaaatttagggggaacgccgaacacagtctaaagaagcttgggacccaaagcactctgttcgggggtttttttttttgtctttcaactttttgctgtaatgttattcaaaataagaaaagcacttggcatggctaagaaatagagttcaacaactgaacagtacagtgtattatcaatggcataaaaaacaacccttacagcattgccgtattttattgatcaaacattcaactcaacactgacgagtggtcttccaccgatcaacggactaatgctgctttgtcgaatgatctgttctcacttcctcctccttccattccagagacatcagtgaagagcagtggcagctcgcgttgctctcacatactccctgcagcagggtaaggggagcaccatgagctgaggctcagctccagggcggcggctgctgctgctgttgccgatacgtcttggttgccggtgccggccagctgggtgctgttgctgttgctgtaaaagctgtactgctcctgcagctggtgttgctgttggatcgcaacggaagaagtggcgccggcagttgtggacgcggcaccccagaacggcaagtagctgctgctaccgctgccgccgtcgtcgccgcaggtcgggaagagagggagcgtctcgggcgcccgcgtcgtcgccgcccgcgccgcggccgccgccattatcgtgtccgacgacgagaagcgtggccactgcgacgagctgcccgtgtccgtcacgcccatgtagtcctgcaggaagcatgtctcggtggccatagcagcgccgctgctgccccagtcggaactcgtgtccagcagcacagccgatccgccgccattgccggcggcgtagaagccgagggtgggcgagggaggcgccgcgcctgaaggcggcggcgacgacagcgagaggacgccgagttggctggtggtggcgtcggccgcgccggcggcgggcacgttgacgtcgaggctggtgaggcggcgcttctggcgctcgcgggccttgtggttctggaaccagtagaagacgttcttgccctcgatcttgccgtgctgccgcagcatggcggtgatgcgctggatctgctccgagctgggcgaccggatgccgcagccgtagtagagctccttcagcatcctgatctgctccggcgtcggcgtccaccgcgagccgctggggcggcacaccgccggcgcagccacgctgccgctgccgctgcctcctcccgctccaccgccgcccgcattggccgccatggatcctgcagaagtaacaccaaacaacagggtgagcatcggacaaaagaaacagtaccaagcaaataaatagcgtatgaaggcagggctaaaaaatccacatatagctgctgcatatgccatcatccaagtatatcaagatcaaaataattataaaacatacttgtttattataatagataggtactcaaggttagagcatatgaatagatgccgcatatgccatcatgtatatgcatcagtaaaacccacatcaacatgtatacctatcctagatcaatatttccatccatcatcttaaactcgtaactatgaagatgtatggcacacacataaagatacaaaattaataaatccaccaggtagtttgaaacagtattctactccgatctagaacgaccgcccaaccagaccacatcatcacaaccaagcgaaaaaaagcatctctgtatatgcatcagtaaaacccgcatcaacatgtatacctatcctagatcgatatttccatccatcatcttaaactcgtaactatgaagatgtaggcacatacatacagatcctttaataaatccaccaggtagtttgaaacagtattctactccgatctagaacgaccctttaataaatccaccaggtagtttgaaacagtattctactccgatctagaacgaccgcccaaccagaccatatcatcacaaccaagcgagaaaaaaagcatctctgtatatgcatcagtaaaacccgcatcaacatgtatacctatcctagatcgatatttccatccatcatcttaaactcgtaactatgaagatgtatggcacacacatacagatacaaaattaataaatccaccaggtagcttgaaacagtatcctactccgatctagaacgaccgcccaaccagaccacatcatcacaaacatgaacatgaacatgtttgctctaacacaaacatgaacagaagtagaactaccgggccctaaccatggaccggatcgccgatctagagaaggtagagagaggggggggggaggatgagcggcgtaccttgaagcggaggtgccgacggctggatttgggggagatctggttgcgtgtgtgtgcgctccgaacgaacacgaggttggggaagagggtgtggagggggtgtctatttattacggcgggcgaggaagggaaagcgaaggagcggtgggaaaggaatcccccgtagctgccggtgccgtgagaggaggaagaggccgcctgccgtgccgcctcacgtctgccgctccgccacgcaatttctggatgccgacagcggagcaagtccaacggtggagcggaactctcgagaggggtccagggatcgctatcaactttgtatagaaaagttgggccgagctcggtacggccagaatggcccggaccggcagcttgcatgcctgcagtgcagcgtgacccggtcgtgcccctctctagagataatgagcattgcatgtctaagttataaaaaattaccacatattttttttgtcacacttgtttgaagtgcagtttatctatctttatacatatatttaaactttactctacgaataatataatctatagtactacaataatatcagtgttttagagaatcatataaatgaacagttagacatggtctaaaggacaattgagtattttgacaacaggactctacagttttatctttttagtgtgcatgtgttctcctttttttttgcaaatagcttcacctatataatacttcatccattttattagtacatccatttagggtttagggttaatggtttttatagactaatttttttagtacatctattttattctattttagcctctaaattaagaaaactaaaactctattttagtttttttatttaataatttagatataaaatagaataaaataaagtgactaaaaattaaacaaataccctttaagaaattaaaaaaactaaggaaacatttttcttgtttcgagtagataatgccagcctgttaaacgccgtcgacgagtctaacggacaccaaccagcgaaccagcagcgtcgcgtcgggccaagcgaagcagacggcacggcatctctgtcgctgcctctggacccctctcgagagttccgctccaccgttggacttgctccgctgtcggcatccagaaattgcgtggcggagcggcagacgtgagccggcacggcaggcggcctcctcctcctctcacggcaccggcagctacgggggattcctttcccaccgctccttcgctttcccttcctcgcccgccgtaataaatagacaccccctccacaccctctttccccaacctcgtgttgttcggagcgcacacacacacaaccagatctcccccaaatccacccgtcggcacctccgcttcaaggtacgccgctcgtcctcccccccccccctctctaccttctctagatcggcgttccggtccatgcatggttagggcccggtagttctacttctgttcatgtttgtgttagatccgtgtttgtgttagatccgtgctgctagcgttcgtacacggatgcgacctgtacgtcagacacgttctgattgctaacttgccagtgtttctctttggggaatcctgggatggctctagccgttccgcagacgggatcgatttcatgattttttttgtttcgttgcatagggtttggtttgcccttttcctttatttcaatatatgccgtgcacttgtttgtcgggtcatcttttcatgcttttttttgtcttggttgtgatgatgtggtctggttgggcggtcgttctagatcggagtagaattctgtttcaaactacctggtggatttattaattttggatctgtatgtgtgtgccatacatattcatagttacgaattgaagatgatggatggaaatatcgatctaggataggtatacatgttgatgcgggttttactgatgcatatacagagatgctttttgttcgcttggttgtgatgatgtggtgtggttgggcggtcgttcattcgttctagatcggagtagaatactgtttcaaactacctggtgtatttattaattttggaactgtatgtgtgtgtcatacatcttcatagttacgagtttaagatggatggaaatatcgatctaggataggtatacatgttgatgtgggttttactgatgcatatacatgatggcatatgcagcatctattcatatgctctaaccttgagtacctatctattataataaacaagtatgttttataattattttgatcttgatatacttggatgatggcatatgcagcagctatatgtggatttttttagccctgccttcatacgctatttatttgcttggtactgtttcttttgtcgatgctcaccctgttgtttggtgttacttctgcaggtcgactttaacttagcctagcatggccactgtgaacaactggctcgctttctccctctccccgcaggagctgccgccctcccagacgacggactccacactcatctcggccgccaccgccgaccatgtctccggcgatgtctgcttcaacatcccccaagattggagcatgaggggatcagagctttcggcgctcgtcgcggagccgaagctggaggacttcctcggcggcatctccttctccgagcagcatcacaaggccaactgcaacatgatacccagcactagcagcacagtttgctacgcgagctcaggtgctagcaccggctaccatcaccagctgtaccaccagcccaccagctcagcgctccacttcgcggactccgtaatggtggcttcctcggccggtgtccacgacggcggtgccatgctcagcgcggccgccgctaacggtgtcgctggcgctgccagtgccaacggcggcggcatcgggctgtccatgattaagaactggctgcggagccaaccggcgcccatgcagccgagggtggcggcggctgagggcgcgcaggggctctctttgtccatgaacatggcggggacgacccaaggcgctgctggcatgccacttctcgctggagagcgcgcacgggcgcccgagagtgtatcgacgtcagcacagggtggagccgtcgtcgtcacggcgccgaaggaggatagcggtggcagcggtgttgccggcgctctagtagccgtgagcacggacacgggtggcagcggcggcgcgtcggctgacaacacggcaaggaagacggtggacacgttcgggcagcgcacgtcgatttaccgtggcgtgacaaggcatagatggactgggagatatgaggcacatctttgggataacagttgcagaagggaagggcaaactcgtaagggtcgtcaagtctatttaggtggctatgataaagaggagaaagctgctagggcttatgatcttgctgctctgaagtactggggtgccacaacaacaacaaattttccagtgagtaactacgaaaaggagctcgaggacatgaagcacatgacaaggcaggagtttgtagcgtctctgagaaggaagagcagtggtttctccagaggtgcatccatttacaggggagtgactaggcatcaccaacatggaagatggcaagcacggattggacgagttgcagggaacaaggatctttacttgggcaccttcagcacccaggaggaggcagcggaggcgtacgacatcgcggcgatcaagttccgcggcctcaacgccgtcaccaacttcgacatgagccgctacgacgtgaagagcatcctggacagcagcgccctccccatcggcagcgccgccaagcgcctcaaggaggccgaggccgcagcgtccgcgcagcaccaccacgccggcgtggtgagctacgacgtcggccgcatcgcctcgcagctcggcgacggcggagccctggcggcggcgtacggcgcgcactaccacggcgccgcctggccgaccatcgcgttccagccgggcgccgccagcacaggcctgtaccacccgtacgcgcagcagccaatgcgcggcggcgggtggtgcaagcaggagcaggaccacgcggtgatcgcggccgcgcacagcctgcaggacctccaccacctgaacctgggcgcggccggcgcgcacgactttttctcggcagggcagcaggccgccgccgctgcgatgcacggcctgggtagcatcgacagtgcgtcgctcgagcacagcaccggctccaactccgtcgtctacaacggcggggtcggcgacagcaacggcgccagcgccgtcggcggcagtggcggtggctacatgatgccgatgagcgctgccggagcaaccactacatcggcaatggtgagccacgagcaggtgcatgcacgggcctacgacgaagccaagcaggctgctcagatggggtacgagagctacctggtgaacgcggagaacaatggtggcggaaggatgtctgcatgggggactgtcgtgtctgcagccgcggcggcagcagcaagcagcaacgacaacatggccgccgacgtcgggcatggcggcgcgcagctcttcagtgtctggaacgacacttaatattggtaccgtcatgggtcgtttaagctgccgatgtgcctgcgtcgtctggtgccctctctccatatggaggttgtcaaagtatctgctgttcgtgtcatgagtcgtgtcagtgttggtttaataatggaccggttgtgttgtgtgtgcgtactacccagaactatgacaaatcatgaataagtttgatgtttgaaattaaagcctgtgctcattatgttctgtctttcagttgtctcctaatatttgcctgcaggtactggctatctaccgtttcttacttaggaggtgtttgaatgcactaaaactaatagttagtggctaaaattagttaaaacatccaaacaccatagctaatagttgaactattagctatttttggaaaattagttaatagtgaggtagttatttgttagctagctaattcaactaacaatttttagccaactaacaattagtttcagtgcattcaaacacccccttaatgttaaggtggttctatctaccgtctcctaatatatggttgattgttcggtttgttgctatgctattgggttctgattgctgctagttcttgctgaatccagaagttctcgtagtatagctcagattcatattatttatttgagtgataagtgatccaggttattactatgttagctaggttttttttacaaggataaattatctgtgatcataattcttatgaaagctttatgtttcctggaggcagtggcatgcaatgcatgacagcaacttgatcacaccagctgaggtagatacggtaacaaggttcttaaatctgttcaccaaatcattggagaacacacatacacattcttgccagtcttggttagagaaatttcatgacaaaatgccaaagctgtcttgactcttcacttttggccatgagtcgtgacgcgacttattgaactagtctagggcgcggctaacaacctagcttagattgccttgtctaaacccttaggctaacgcgccactctagaaggccgatctcccgggataacttcgtatagcatacattatacgaagttatgaattccggaccggcctagaaggccccagagctggtcaccccatacgattggaagcttcaagtttgtacaaaaaagcaggctccggccagaatggcccggaccgggttaccgaattcctaactaactagctgcccttaaggccaattgttcaagattcattcaacaattgaaacatctcccatgattaaatcagtataaggttgctatggtcttgcttgacaaagtttttttttgagggaatttcaactaaatttttgagtgaaactatcaaatactgattttaaaaaatttttataaaaggaagcgcagagataaaaggccatctatgctacaaaagtacccaaaaatgtaatcctaaagtatgaattgcattttttttttgtttggacgaaaggaaaggagtattaccacaagaatgatatcatcttcatatttagatcttttttgggtaaaccttgagattctctaaatatagagaaatcagaagaaaaaaaaaccgtgttttggtggttttgatttctagcctccacaataactttgacggcgtcgacaagtctaacggacaccaagcagcgaaccaccagcgccgagccaagcgaagcagacggccgagacgttgacaccttcggcgcggcatctctggagagttccgctccggcgctccacctccaccgctggcggtttcttattccgttccgttccgcctcctgctctgctcctctccacaccacacggcacgaaaccgttacggcaccggcagcacccagcacgggagaggggattcctttcccaccgttccttccctttccgccccgccgctataaatagccagccccatccccagcttttttccccaatctcatctcctctctcctgttgttcggagcacacgcacaatccgatcgatccccaaatccccttcgtctctcctcgcgagcctcgtggttcccagcttcaaggtacggcgatcgatcatcccccctccttctctctaccttcttttctctagactacatcggatggcgatccttggttagggcctgctagtttcccttcctgttttgtcgatggctgcgaggcacaatagatctgatggcgttatgacggctaacttgtcatgttgttgcgatttatagtccctttaggagatcagtttaatttctcggatggttcgagatcggtggtccttggttagtaccctaagatccgcgctgttagggttcgtagatggaggcgacctgttctgattcttaacttgtcagtacctgggaaatcctgggatggttctagctcgtccgcagatgagatcgatttcatgatcctctgtatcttgtttcgttgcctaggttccgtctaatctatccgtggtatgatgtagatgttttgatcgtgctaactacgtcttgtaaagttaattgtcaggtcataatttttagcatgccttttttttgtttggttttgtctaattgggctgtcgttctagatcagagtagaagactgttccaaactacctgctggatttattgaacttggatctgtatgtgtgtcacatatcttcataaattcatgattaagatggattgaaatatcttttatctttttggtatggatagttctatatgttggtgtggctttgttagatgtatacatgcttagatacatgaagcaacgtgctgctactgtttagtaattgctgttcatttgtctaataaacagataaggatatgtatttatgttgctgttggttttgctggtactttgttggatacaaatgcttcaatacagaaaacagcatgctgctacgatttaccatttatctaatcttatcatatgtctaatctaataaacaaacatgcttttaaattatcttcatatgcttggatgatggcatacacagcggctatgtgtggttttttaaatacccagcatcatgggcatgcatgacactgctttaatatgctttttatttgcttgagactgtttcttttgtttatactgaccctttagttcggtgactcttctgcaggtcgactttaacttagcctaggatccgtcccccagatttgctaggacaccgccgtacccacaccccggatcagttaatatcgtagacataatggccctccctgccatctccacaaccaagcactcccatcatcatgcatgcagcaggctgtgctgtggacctgatcgagtttcaattgatccaagcaagcaagagggatgggagtccttggttgtggaaattgcagagagagaccagtcgttgatcggtcggagatctccccgaatcgatctcgatcggccggaattttgggggccggccgggaggtggatgatggggggtgattaccatctaggcggcgccgtgttggatgatgtaccaacatatcactataggctactttgggaacctcagatccccttcgggattggaggaaattgagatggaaatgaactaatttcttctctaacccccttcaatcacgaaggggattcgagtttccaaactagccctatatatatcagagctagggagggatattgctgcaacatgcatcacgaggtacagatatataattagggttctgctgcaatgttttgactatagatcgttagtgatctgctgtaattaataataatggtgatctcgaagcaattctaaacatcatagtagcaggcccaggtaccgttaacagatctactaactatctatactgtaataatgttgtatagccgccggatagctagctagtttagtcattcagcggcgatgggtaataataaagtgtcatccatccatcaccatgcgtggcaacgtgagcaatgacctgattgaacaaattgaaatgaaaagaagaaatatgttatatgtcaacgagatttcctcataatgccactgacgacgtgtgtccaagaaatgtatcagtgatacgtatattcacaatttttttatgacttatactcacaatttgtttttttactacttatactcacaatttgttgtgcgtaccataacaatttcgatcgaatatatatcagaaagttgacgaaagtaagctcactcaaaaagttaaatgggctgcggaagctgcgtcaggcccaagttttggctattctatccggtatccacgattttgatggctgagggacatatgttcgcttaagcttcggtccgggcctagaaggccagcttcggccgccccgggcaactttattatacaaagttgatagatgtacctgattccgatgacttcgtaggttcctagctcaagccgctcgtgtccaagcgtcacttacgattagctaatgattacggcatctaggaccgactagctagctagctaagagctcggtaccgagctcgaattcattccgattaatcgtggcctcttgctcttcaggatgaagagctatgtttaaacgtgcaagcgctactagacaattcagtacattaaaaacgtccgcaatgtgttattaagttgtctaagcgtcaatttgtttacaccacaatatatcctgcca

SEQ ID NO: 248 - DNA, 22694 bp, Artificial Sequence
  PHP98567
gtttacccgccaatatatcctgtcaaacactgcggccgcacttgaccgcggatggagccggagctgtggtgaggccatcgacgggaggtgggggagaacacagtctcagtgttctttgtgagtccgcaaggtttttagcttttctgtattaattaaggttgctgttggctgtagaatacggtcgtggaagagctgtatcggtagctactacgtaagctattatatactggaagtctggagctcgtcgatctccggtcgtcttcctccatttctcctcgtcttgctttgactgctgctaccatttgcttctgttttctgatgaagcatgccatgtcggccaccagtgtttgtgtggtttttgcagggaatggctttcaagtgctgtgattgaatggccctcgtcgtcctcggctgagctcacatggacgcgtcatgtgagtgagatatatgatcatatgatgagtggggttcgggtgagtgcgtacttgaagtaggatcccgctttcactcattcattcattggcctttaaaccgggaaattttcgcgaggagatggagggaagcaagcagggtgacgagtgcagagtgccgcgagcgctttgtcaaaaggcaccgccgtaggcaaaaaaatcaatggccctgactgactcgatggtagtactactgtagagactagagagggttgctccccatatcttcgtgtgacttttactccagcattgcatttccgtcattgagacgttaattaatagcagctttcgggacagatgactgtggccatgtttcgtcacggccgcttcgtgccagctgggggtactatagtactgtgattttgttagtaaaaactttcattaggccaccattgacgaccgggccttcgcttttgctgcgctaattaaccatttcccggcgaccgaagggaacatgaacatgccccgacacatgagggcatgaggactagtgttctccctgtcgttcgttgacttgactagtgatagtttaaacgctcttcaactggaagagcggttactaccggttcactagctagctgctaatcgagctagttaccctatgaggtgacatgaagcgctcacggttactatgacggttagcttcacgactgttggtggcagtagcgtacgacttagctatagttccggacttacctagctaataacttcgtatagcatacattatacgaagttatggttaccgaattcgagctcggtaccctggcggaccgaagcttgcatgcctgcagtgcagcgtgacccggtcgtgcccctctctagagataatgagcattgcatgtctaagttataaaaaattaccacatattttttttgtcacacttgtttgaagtgcagtttatctatctttatacatatatttaaactttactctacgaataatataatctatagtactacaataatatcagtgttttagagaatcatataaatgaacagttagacatggtctaaaggacaattgagtattttgacaacaggactctacagttttatctttttagtgtgcatgtgttctcctttttttttgcaaatagcttcacctatataatacttcatccattttattagtacatccatttagggtttagggttaatggtttttatagactaatttttttagtacatctattttattctattttagcctctaaattaagaaaactaaaactctattttagtttttttatttaataatttagatataaaatagaataaaataaagtgactaaaaattaaacaaataccctttaagaaattaaaaaaactaaggaaacatttttcttgtttcgagtagataatgccagcctgttaaacgccgtcgacgagtctaacggacaccaaccagcgaaccagcagcgtcgcgtcgggccaagcgaagcagacggcacggcatctctgtcgctgcctctggacccctctcgagagttccgctccaccgttggacttgctccgctgtcggcatccagaaattgcgtggcggagcggcagacgtgagccggcacggcaggcggcctcctcctcctctcacggcaccggcagctacgggggattcctttcccaccgctccttcgcacgtaagcgcttacgcaccgaacaacgtaagcgcttacgcaccgaacaacgtaagcgcttacgctttcccttcctcgcccgccgtaataaatagacaccccctccacaccctctttccccaacctcgtgttgttcggagcgcacacacacacaaccagatctcccccaaatccacccgtcggcacctccgcttcaaggtacgccgctcgtcctcccccccccccctctctaccttctctagatcggcgttccggtccatgcatggttagggcccggtagttctacttctgttcatgtttgtgttagatccgtgtttgtgttagatccgtgctgctagcgttcgtacacggatgcgacctgtacgtcagacacgttctgattgctaacttgccagtgtttctctttggggaatcctgggatggctctagccgttccgcagacgggatcgatttcatgattttttttgtttcgttgcatagggtttggtttgcccttttcctttatttcaatatatgccgtgcacttgtttgtcgggtcatcttttcatgcttttttttgtcttggttgtgatgatgtggtctggttgggcggtcgttctagatcggagtagaattctgtttcaaactacctggtggatttattaattttggatctgtatgtgtgtgccatacatattcatagttacgaattgaagatgatggatggaaatatcgatctaggataggtatacatgttgatgcgggttttactgatgcatatacagagatgctttttgttcgcttggttgtgatgatgtggtgtggttgggcggtcgttcattcgttctagatcggagtagaatactgtttcaaactacctggtgtatttattaattttggaactgtatgtgtgtgtcatacatcttcatagttacgagtttaagatggatggaaatatcgatctaggataggtatacatgttgatgtgggttttactgatgcatatacatgatggcatatgcagcatctattcatatgctctaaccttgagtacctatctattataataaacaagtatgttttataattattttgatcttgatatacttggatgatggcatatgcagcagctatatgtggatttttttagccctgccttcatacgctatttatttgcttggtactgtttcttttgtcgatgctcaccctgttgtttggtgttacttctgcaggtcgactttaacttagcctaggatccgcccatggcggccaatgcgggcggcggtggagcgggaggaggcagcggcagcggcagcgtggctgcgccggcggtgtgccgccccagcggctcgcggtggacgccgacgccggagcagatcaggatgctgaaggagctctactacggctgcggcatccggtcgcccagctcggagcagatccagcgcatcaccgccatgctgcggcagcacggcaagatcgagggcaagaacgtcttctactggttccagaaccacaaggcccgcgagcgccagaagcgccgcctcaccagcctcgacgtcaacgtgcccgccgccggcgcggccgacgccaccaccagccaactcggcgtcctctcgctgtcgtcgccgccgccttcaggcgcggcgcctccctcgcccaccctcggcttctacgccgccggcaatggcggcggatcggctgtgctgctggacacgagttccgactggggcagcagcggcgctgctatggccaccgagacatgcttcctgcaggactacatgggcgtgacggacacgggcagctcgtcgcagtggccacgcttctcgtcgtcggacacgataatggcggcggccgcggcgcgggcggcgacgacgcgggcgcccgagacgctccctctcttcccgacctgcggcgacgacggcggcagcggtagcagcagctacttgccgttctggggtgccgcgtccacaactgccggcgccacttcttccgttgcgatccaacagcaacaccagctgcaggagcagtacagcttttacagcaacagcaacagcacccagctggccggcaccggcaaccaagacgtatcggcaacagcagcagcagccgccgccctggagctgagcctcagctcatggtgctccccttaccctgctgcagggagtatgtgagagcaacgcgagctgccactgctcttcactgatgtctctggaatggaaggaggaggaagtgagaacagatcattcgacaaagcagcattagtccgttgatcggtggaagaccactcgtcagtgttgagttgaatgtttgatcaataaaatacggcaatgctgtaagggttgttttttatgccattgataatacactgtactgttcagttgttgaactctatttcttagccatgccaagtgcttttcttattttgaataacattacagcaaaaagttgaaagacaaaaaaaaaaacccccgaacagagtgctttgggtcccaagcttctttagactgtgttcggcgttccccctaaatttctccccctatatctcactcacttgtcacatcagcgttctctttccccctatatctccacgctctacagcagttccacctatatcaaacctctataccccaccacaacaatattatatactttcatcttcaactaactcatgtaccttccaatttttttctactaataattatttacgtgcacagaaacttagcaaggagagagagagcgggaatttaaatgctcggcgttaggcttttagtccgctaggtggctagaccgaggttaggacgctagttcactaggggcctagtggtgttttaagacgtcacggtcaccacgcgtggaccgaagcttgcatgcctgcagtgcagcgtgacccggtcgtgcccctctctagagataatgagcattgcatgtctaagttataaaaaattaccacatattttttttgtcacacttgtttgaagtgcagtttatctatctttatacatatatttaaactttactctacgaataatataatctatagtactacaataatatcagtgttttagagaatcatataaatgaacagttagacatggtctaaaggacaattgagtattttgacaacaggactctacagttttatctttttagtgtgcatgtgttctcctttttttttgcaaatagcttcacctatataatacttcatccattttattagtacatccatttagggtttagggttaatggtttttatagactaatttttttagtacatctattttattctattttagcctctaaattaagaaaactaaaactctattttagtttttttatttaataatttagatataaaatagaataaaataaagtgactaaaaattaaacaaataccctttaagaaattaaaaaaactaaggaaacatttttcttgtttcgagtagataatgccagcctgttaaacgccgtcgacgagtctaacggacaccaaccagcgaaccagcagcgtcgcgtcgggccaagcgaagcagacggcacggcatctctgtcgctgcctctggacccctctcgagagttccgctccaccgttggacttgctccgctgtcggcatccagaaattgcgtggcggagcggcagacgtgagccggcacggcaggcggcctcctcctcctctcacggcaccggcagctacgggggattcctttcccaccgctccttcgcacgtaagcgcttacgcaccgaacaacgtaagcgcttacgcaccgaacaacgtaagcgcttacgctttcccttcctcgcccgccgtaataaatagacaccccctccacaccctctttccccaacctcgtgttgttcggagcgcacacacacacaaccagatctcccccaaatccacccgtcggcacctccgcttcaaggtacgccgctcgtcctcccccccccccctctctaccttctctagatcggcgttccggtccatgcatggttagggcccggtagttctacttctgttcatgtttgtgttagatccgtgtttgtgttagatccgtgctgctagcgttcgtacacggatgcgacctgtacgtcagacacgttctgattgctaacttgccagtgtttctctttggggaatcctgggatggctctagccgttccgcagacgggatcgatttcatgattttttttgtttcgttgcatagggtttggtttgcccttttcctttatttcaatatatgccgtgcacttgtttgtcgggtcatcttttcatgcttttttttgtcttggttgtgatgatgtggtctggttgggcggtcgttctagatcggagtagaattctgtttcaaactacctggtggatttattaattttggatctgtatgtgtgtgccatacatattcatagttacgaattgaagatgatggatggaaatatcgatctaggataggtatacatgttgatgcgggttttactgatgcatatacagagatgctttttgttcgcttggttgtgatgatgtggtgtggttgggcggtcgttcattcgttctagatcggagtagaatactgtttcaaactacctggtgtatttattaattttggaactgtatgtgtgtgtcatacatcttcatagttacgagtttaagatggatggaaatatcgatctaggataggtatacatgttgatgtgggttttactgatgcatatacatgatggcatatgcagcatctattcatatgctctaaccttgagtacctatctattataataaacaagtatgttttataattattttgatcttgatatacttggatgatggcatatgcagcagctatatgtggatttttttagccctgccttcatacgctatttatttgcttggtactgtttcttttgtcgatgctcaccctgttgtttggtgttacttctgcaggtcgactttaacttagcctaggatccatggccactgtgaacaactggctcgctttctccctctccccgcaggagctgccgccctcccagacgacggactccacactcatctcggccgccaccgccgaccatgtctccggcgatgtctgcttcaacatcccccaagattggagcatgaggggatcagagctttcggcgctcgtcgcggagccgaagctggaggacttcctcggcggcatctccttctccgagcagcatcacaaggccaactgcaacatgatacccagcactagcagcacagtttgctacgcgagctcaggtgctagcaccggctaccatcaccagctgtaccaccagcccaccagctcagcgctccacttcgcggactccgtaatggtggcttcctcggccggtgtccacgacggcggtgccatgctcagcgcggccgccgctaacggtgtcgctggcgctgccagtgccaacggcggcggcatcgggctgtccatgattaagaactggctgcggagccaaccggcgcccatgcagccgagggtggcggcggctgagggcgcgcaggggctctctttgtccatgaacatggcggggacgacccaaggcgctgctggcatgccacttctcgctggagagcgcgcacgggcgcccgagagtgtatcgacgtcagcacagggtggagccgtcgtcgtcacggcgccgaaggaggatagcggtggcagcggtgttgccggcgctctagtagccgtgagcacggacacgggtggcagcggcggcgcgtcggctgacaacacggcaaggaagacggtggacacgttcgggcagcgcacgtcgatttaccgtggcgtgacaaggcatagatggactgggagatatgaggcacatctttgggataacagttgcagaagggaagggcaaactcgtaagggtcgtcaagtctatttaggtggctatgataaagaggagaaagctgctagggcttatgatcttgctgctctgaagtactggggtgccacaacaacaacaaattttccagtgagtaactacgaaaaggagctcgaggacatgaagcacatgacaaggcaggagtttgtagcgtctctgagaaggaagagcagtggtttctccagaggtgcatccatttacaggggagtgactaggcatcaccaacatggaagatggcaagcacggattggacgagttgcagggaacaaggatctttacttgggcaccttcagcacccaggaggaggcagcggaggcgtacgacatcgcggcgatcaagttccgcggcctcaacgccgtcaccaacttcgacatgagccgctacgacgtgaagagcatcctggacagcagcgccctccccatcggcagcgccgccaagcgcctcaaggaggccgaggccgcagcgtccgcgcagcaccaccacgccggcgtggtgagctacgacgtcggccgcatcgcctcgcagctcggcgacggcggagccctggcggcggcgtacggcgcgcactaccacggcgccgcctggccgaccatcgcgttccagccgggcgccgccagcacaggcctgtaccacccgtacgcgcagcagccaatgcgcggcggcgggtggtgcaagcaggagcaggaccacgcggtgatcgcggccgcgcacagcctgcaggacctccaccacctgaacctgggcgcggccggcgcgcacgactttttctcggcagggcagcaggccgccgccgctgcgatgcacggcctgggtagcatcgacagtgcgtcgctcgagcacagcaccggctccaactccgtcgtctacaacggcggggtcggcgacagcaacggcgccagcgccgtcggcggcagtggcggtggctacatgatgccgatgagcgctgccggagcaaccactacatcggcaatggtgagccacgagcaggtgcatgcacgggcctacgacgaagccaagcaggctgctcagatggggtacgagagctacctggtgaacgcggagaacaatggtggcggaaggatgtctgcatgggggactgtcgtgtctgcagccgcggcggcagcagcaagcagcaacgacaacatggccgccgacgtcgggcatggcggcgcgcagctcttcagtgtctggaacgacacttaagcgtacctagtggtacctgacatcttatagtctgcaacctctcgtgtctgaattcctatctttatcaagtgttattgcttccacgactataggacagctttcgtcgaaagcttttgctcatgtgatctcgaaggattcatctagtctgatttttcgtgacttgtatcggttttattggattcatccaacatatatcaataaaaaatgagttgtgtttcctttcttcctagttcagttaaaattatttccctcctgcgcttgtgctgtaattgtctgtgtacctgttgtttgtgactgtgttagttcccttggatatgatttcgtatttgatatgtacatggagatagcttagcttcattattggagtatgaagttagtatgacatagtcactctcctggaaaattgacactgcaaaccatatttttattctgaaccacaaatcctagtcagtccgctggcatatgccgtccgtttgctgaatccagaacgtgggtttggagatgtacggctgagatgcctctatgcgaaggggatttcgtggtgaaacgagatgggagtagagcaacgcccgtggaagatgcttcaaacttccacacttttgagcaacgatcggcagtagtaaggtagacgatttcaagatcaaagcatatgaagataaacaacatcaacaacaaaatttgttggggttctatagagagaaacagagctacatacatacactgttttgtatctaccatctgagatgatgaaaagatgaaaaactaaagaatgccccggcgccaacgccaggacacgccgcgcgcgcgtcacccgagccatctcttgacccagccggcgctgtatatttacacacgttgcagcatcgatcaccacctgttcgatcgcgtcgccgtcaccggcgcgccgcgacttattgaactagtctagggcgcggctaacaacctagcttagattgccttgtctaaacccttaaggctaacgcgccactctagattcttatgtgcttctagtctccaaatgtggttgatagttattttgctctaagatcaacagtaatgaagtataaatcatcgttgtggtgtgctactcggttaattgagcattaacacacacaaacatgacgaggatggtataatctccaaaaatgtgtactttgttaggtgggaccctatagccttgattaatgtgctatgttaggcatgcctggaaacgtgtgacgcatatgttttgtgaacctgttgatattatatgtgcttttatattaccatattttattaaaatactaatatttattactagtaagatataacattctatctagcttaaaaactaaccataaatattccataataactagatttaccaaactaatatactaaatatacataataaatacaaaattaacaagacaataatcaatatttatgagcttaatatatttagacattatggttggtcgacgataatcatgctaacttttcgtaattgcttgattgaaatatgcttagaataatgcctctttgttctacatggcaaatagggaccattatggtgtaacaccctgggaaccacaaacaccccgaaatgctactaaactacacaactaaccttcatatataaaatttcgacagcatctcctttgaaaatttgcatagacgtggaagcaacagagtataaacagatatcatgataagaaaacatactagacattaataatctgctagaaatgggaagaatcgagctcggtaccctggttcacaaactcaatacaacacacagtggagtagggtattacgctccggcggcccgaaccactctaaatccttgtgtcctcgtgtgctcttccaccattaatgactgtaattgcagggacacgaagagttgtagcgcttttgccaacaagatccgctatatgctagtagagtggaacctgcacagcaacaagcatccaataatctgagaataagaattatgtgtggtgatggttctcatctctgcaactcgccattttcgcgagagaaccaaatccaagttggtgaagatcatgatttgggctcatgggctggcatagtagctattacctttgcaattgtggttcgaatctatccgatattctccttttcagggagagctaatgcttatgcttattgggtattttggtttgacactgcttcacgcccaaaaaaaggcaactatgtctgagttggatatggcccaaaaaaaggcagctatgtctgagttggatatggaagtcttctttcgtttagggtgaagtaagaccaagctcatgagcttattatcttaggtcggaacaaattagttgataggcatggcacatttatcaaattataatgattttaacagaaaagcaacacctctttttcagcagcaccagctttgcaagctgcaattgacactccaagcatagtatttgctccaaactcagcctgcatttcgcacaatatcatatctatttccatttggataaaatatattttccagaaatatgggaacagaatcaagatacagaaaaaagttgtggtagtagtggtaagtggaaacacaagtacagtgaaaagatagcattatttctgaacagtcaaattaaccgaaataagtagtatcacatactgcccctaaattgactacacccaatgtaaagaattgcttgagcatattgagccatcagttgtttgtttgtgtaacggatttgacaatgcagagttcaggagcaaaaaaccgcaaaggagagaaagagggaaaggatctcctagtatcccaccttgtggcgcgccctgtcaagtgcatgatggcctggtcgatctgcgtctgctgctgcggttccatcccaacgagtgcctccgacaccttgtcgttgatcacccgcaccgcgtaggcgacccccctggcgaggaacttccgcctctcggaggccccggccgcgtcggcggcggcgccctcgagcgcgcccacgctagccgtagatgctcggtgcacggccttgttggtgtgcaactcgacctcaacggccggtgcgctacgcccgtcaaggatctggcgcgcccgcaccctcgtgatcacggtgggcgcctcccgcctcatgtggccgacgatgaaaagcgccgggttaggggccttggcgcgcaccgccgtattcagggcctcctcgctcttgcgcgagagcaggtgcttccccaggtactcctgcactgacaaggctgccacagcggtggaatttgtcctcacgacttcgccacgtcgtcctcacctccctggcttcccacgactccgccgtatcgaggtgctcggtgggtcgtcttaatccgaagtccgaactaggaagacgagacagagaggtctgaggaatgggcctcgtttgatgttgagctgaattatttttccagcataagcccaggtcttggtccatgaacaaaattactagaaacccagcccagtactacgatctaaaagagggactgccactggatagctctctctagcattctccacgctccaatacagcggcgtcgtgtctatccgggtctatccgcgaacacgtgagaactctccagaaactgctttctcctccacttcatctctctcgctttccctctataaaaagaccccttctaggaattgagggagacagcaagcaccaagcagcgatccgaagctcaatcaattcactcaaacctcttccccaaatcttcgattagatcttcgttgacaagaagactagaaccgaacctgacatgtccaacctgctcacggttcaccagaaccttccggctcttccagtggacgcgacgtccgatgaagtcaggaagaacctcatggacatgttccgcgacaggcaagcgttcagcgagcacacctggaagatgctgctctccgtctgccgctcctgggctgcatggtgcaagctgaacaacaggaagtggttccccgctgagcccgaggacgtgagggattaccttctgtacctgcaagcgcgaggtttgtttctgcttctacctttgatatatatataataattatcattaattagtagtaatataatatttcaaatatttttttcaaaataaaagaatgtagtatatagcaattgcttttctgtagtttataagtgtgtatattttaatttataacttttctaatatatgaccaaaacatggtgatgcctaggtctggcagtgaagaccatccagcaacaccttggacaactgaacatgcttcacaggcgctccggcctcccgcgccccagcgactcgaacgccgtgagcctcgtcatgcgccgcatcaggaaggaaaacgtcgatgccggcgaaagggcaaagcaggccctcgcgttcgagaggaccgatttcgaccaggtccgcagcctgatggagaacagcgacaggtgccaggacattaggaacctggcgttcctcggaattgcatacaacacgctcctcaggatcgcggaaattgcccgcattcgcgtgaaggacattagccgcaccgacggcggcaggatgcttatccacattggcaggaccaagacgctcgtttccaccgcaggcgtcgaaaaggccctcagcctcggagtgaccaagctcgtcgaacgctggatctccgtgtccggcgtcgcggacgacccaaacaactacctcttctgccgcgtccgcaagaacggggtggctgcccctagcgccaccagccaactcagcacgagggccttggaaggtattttcgaggccacccaccgcctgatctacggcgcgaaggatgacagcggtcaacgctacctcgcatggtccgggcactccgcccgcgttggagctgctagggacatggcccgcgccggtgtttccatccccgaaatcatgcaggcgggtggatggacgaacgtgaacattgtcatgaactacattcgcaaccttgacagcgagacgggcgcaatggttcgcctcctggaagatggtgactgaggtacccaacctagacttgtccatcttctggattggccaacttaattaatgtatgaaataaaaggatgcacacatagtgacatgctaatcactataatgtgggcatcaaagttgtgtgttatgtgtaattactagttatctgaataaaagagaaagagatcatccatatttcttatcctaaatgaatgtcacgtgtctttataattctttgatgaaccagatgcatttcattaaccaaatccatatacatataaatattaatcatatataattaatatcaattgggttagcaaaacaaatctagtctaggtgtgttttgcgatccgatatcgacgtctaaaaacggcccctaactaacgcttagttgcccgctagattagtcccccgttagtgcctagttagacacacgacgaactaggggctagccccgggataacttcgtatagcatacattatacgaagttatgaattccggaccgggttaccgaattcctgcccttaaggccaattgttcaagattcattcaacaattgaaacatctcccatgattaaatcagtataaggttgctatggtcttgcttgacaaagtttttttttgagggaatttcaactaaatttttgagtgaaactatcaaatactgattttaaaaaatttttataaaaggaagcgcagagataaaaggccatctatgctacaaaagtacccaaaaatgtaatcctaaagtatgaattgcattttttttttgtttggacgaaaggaaaggagtattaccacaagaatgatatcatcttcatatttagatcttttttgggtaaagcttgagattctctaaatatagagaaatcagaagaaaaaaaaaccgtgttttggtggttttgatttctagcctccacaataactttgacggcgtcgacaagtctaacggacaccaagcagcgaaccaccagcgccgagccaagcgaagcagacggccgagacgttgacaccttcggcgcggcatctctcgagagttccgctccggcgctccacctccaccgctggcggtttcttattccgttccgttccgcctcctgctctgctcctctccacaccacacggcacgaaaccgttacggcaccggcagcacccagcacgggagaggggattcctttcccaccgttccttccctttccgccccgccgctataaatagccagccccatccccagcttttttccccaatctcatctcctctctcctgttgttcggagcacacgcacaatccgatcgatccccaaatccccttcgtctctcctcgcgagcctcgtggatcccagcttcaaggtacggcgatcgatcatcccccctccttctctctaccttcttttctctagactacatcggatggcgatccatggttagggcctgctagtttcccttcctgttttgtcgatggctgcgaggcacaatagatctgatggcgttatgacggctaacttgtcatgttgttgcgatttatagtccctttaggagatcagtttaatttctcggatggttcgagatcggtggtccatggttagtaccctaagatccgcgctgttagggttcgtagatggaggcgacctgttctgattgttaacttgtcagtacctgggaaatcctgggatggttctagctcgtccgcagatgagatcgatttcatgatcctctgtatcttgtttcgttgcctaggttccgtctaatctatccgtggtatgatgtagatgttttgatcgtgctaactacgtcttgtaaagttaattgtcaggtcataatttttagcatgcctttttttttgtttggttttgtctaattgggctgtcgttctagatcagagtagaagactgttccaaactacctgctggatttattgaacttggatctgtatgtgtgtcacatatcttcataaattcatgattaagatggattgaaatatcttttatctttttggtatggatagttctatatgttggtgtggctttgttagatgtatacatgcttagatacatgaagcaacgtgctgctactgtttagtaattgctgttcatttgtctaataaacagataaggatatgtatttatgttgctgttggttttgctggtactttgttggatacaaatgcttcaatacagaaaacagcatgctgctacgatttaccatttatctaatcttatcatatgtctaatctaataaacaaacatgcttttaaattatcttcatatgcttggatgatggcatacacagcggctatgtgtggttttttaaatacccagcatcatgggcatgcatgacactgctttaatatgctttttatttgcttgagactgtttcttttgtttatactgaccctttagttcggtgactcttctgcaggtcgactttaacttagcctaggatccatggcccagtccaagcacggcctgaccaaggagatgaccatgaagtaccgcatggagggctgcgtggacggccacaagttcgtgatcaccggcgagggcatcggctaccccttcaagggcaagcaggccatcaacctgtgcgtggtggagggcggccccttgcccttcgccgaggacatcttgtccgccgccttcatgtacggcaaccgcgtgttcaccgagtacccccaggacatcgtcgactacttcaagaactcctgccccgccggctacacctgggaccgctccttcctgttcgaggacggcgccgtgtgcatctgcaacgccgacatcaccgtgagcgtggaggagaactgcatgtaccacgagtccaagttctacggcgtgaacttccccgccgacggccccgtgatgaagaagatgaccgacaactgggagccctcctgcgagaagatcatccccgtgcccaagcagggcatcttgaagggcgacgtgagcatgtacctgctgctgaaggacggtggccgcttgcgctgccagttcgacaccgtgtacaaggccaagtccgtgccccgcaagatgcccgactggcacttcatccagcacaagctgacccgcgaggaccgcagcgacgccaagaaccagaagtggcacctgaccgagcacgccatcgcctccggctccgccttgccctccggactcagatctcgatagggtaccaatggccagttaacagatccagctgctgctgttctagggttcacaagtctgcctatttgtcttccccaatggagctatggttgtctggtctggtccttggtcgtgtcccgtttcattgtgtactatttacctgtaatgtgtatccttaagtctggtttgatggtgtctgaaacgttttgctgtggtagagcagcatggaagaactataatgaataagtgatccctaatcattgtgtccaaattttgcttctgctatacccttttgtgctgtttcttatgttttgcttaaaaatttgatctgacaaacaaatttgtctaaattatgctcttgttctgactgtgtactgtacacatttgtattgctaccggtttggcacatagttttctctttgattgcagatcaaacccttctgattgcagattgcttggctatggctgatgtgctcactgttcttctttagcttgtatattgctgatggtggcttggctacggctgaaaaagttgctgctgcgccgacttggcaactgttgctccagtaatgctttgtcctctcttcctagccgccgacttggcacttggcagctgttgctcctgtaatgcgttgttatctcttatctcttgagatgtactatgattttgaggctgtttgacttgtgccagattgccagtgctgatgctatattatctcaggtttttatgctagtatatgttttactgtgtgctgcctgtgtcgagttacgtaatctattgaaccgctatgcgtgttgatgccctgttgttgcttgccagattgatgcccctgttgcttgcagcttgcaagctgtagtgaaatcctaaaattcgaaaccaaatctattctgaacttttgaagatctgtgatgtccggaagaaaagattcaaacagataaacgggactctccagaatctataaaataaatgatcgacaaacgctttgctttggtaggcttcctagttagttagcggaccgaagcttcggtccgggcctagaaggccagcttcggccgcccctcggtaccctgggatctgcccttactttaacgcctctaaccaacacccctttatctttataaggaacaataaacagaatttgccccactgttctaaatcacctaataatatccccagctaaaaacaataaaggtttcctagaattaagacaagcatgactgttcctccaggagggtttggaacattgttgcagtcttgcagatacgggcgaagggtgagaaacagagcggagggctggaggtgacctcggtagtcgacgccggagttgagcttgacaacgacggggcggcccctgatggacttgaggaagtccgatggcgtcttcaccgtcccgccggcgcccgaggcgggcctgtcgctgccgccgccgccgctgctcatcttgcgcgctgtgcccccggcggtgtccctgtgttgcggatcgcgggtgggccaggtggatgcgagggcgacccgtttggactccggccggagccgccggatccctggtcggtgtcagtgccgtttactctgggccccacgtgtcagtaccgtctgtagatgacaacaacccgtcgtccacagtcatgtccaaaatatcctttcttcttttttttcgattcggatatctatcttccttttttttttccaaaaatcttcttgacgcaccagcgcgcacgtttgtggtaaacgccgacacgtcggtcccacgtcgatagaccccacccaccagtgagtagcgtgtacgtattcgggggtgacggacgtgtcgccgtcgtcttgctagtcccattcccatctgagccacacatctctgaacaaaaaaaaggagggaggcctccacgcacatccccctccgtgccacccgccccaaaccctcgcgccgcctccgagacagccgccgcaaccatggccaccgccgccgccgcgtctaccgcgctcactggcgccactaccgctgcgcccaaggcgaggcgccgggcgcacctcctggccacccgccgcgccctcgccgcgcccatcaggtgctcagcggcgtcacccgccatgccgatggctcccccggccaccccgctccggccgtggggccccaccgagccccgcaagggtgctgacatcctcgtcgagtccctcgagcgctgcggcgtccgcgacgtcttcgcctaccccggcggcgcgtccatggagatccaccaggcactcacccgctcccccgtcatcgccaaccacctcttccgccacgagcaaggggaggcctttgccgcctccggctacgcgcgctcctcgggccgcgtcggcgtctgcatcgccacctccggccccggcgccaccaacctagtctccgcgctcgccgacgcgctgctcgattccgtccccatggtcgccatcacgggacaggtggcgcgacgcatgattggcaccgacgccttccaggagacgcccatcgtcgaggtcacccgctccatcaccaagcacaactacctggtcctcgacgtcgacgacatcccccgcgtcgtgcaggaggctttcttcctcgcctcctctggtcgaccagggccggtgcttgtcgacatccccaaggacatccagcagcagatggcggtgcctgtctgggacaagcccatgagtctgcctgggtacattgcgcgccttcccaagccccctgcgactgagttgcttgagcaggtgctgcgtcttgttggtgaatcgcggcgccctgttctttatgtgggcggtggctgcgcagcatctggtgaggagttgcgacgctttgtggagctgactggaatcccggtcacaactactcttatgggcctcggcaacttccccagcgacgacccactgtctctgcgcatgctaggtatgcatgggacggtgtatgcaaattatgcagtggataaggccgatctgttgcttgcacttggtgtgcggtttgatgatcgcgtgacagggaagattgaggcttttgcaagcagggctaagattgtgcacgttgatattgatccggctgagattggcaagaacaagcagccacatgtgtccatctgtgcagatgttaagcttgctttgcagggcatgaatgctcttcttgaaggaagcacatcaaagaagagctttgactttggctcatggaacgatgagttggatcagcagaagagggaattcccccttgggtataaaacatctaatgaggagatccagccacaatatgctattcaggttcttgatgagctgacgaaaggcgaggccatcatcggcacaggtgttgggcagcaccagatgtgggcggcacagtactacacttacaagcggccaaggcagtggttgtcttcagctggtcttggggctatgggatttggtttgccggctgctgctggtgcttctgtggcaaacccaggtgtcactgttgttgacatcgatggagatggtagctttctcatgaacgttcaggagctagctatgatccgaattgagaacctcccagtgaaggtctttgtgctaaacaaccagcacctggggatggtggtgcagttggaggacaggttctataaggccaacagagcgcacacatacttgggaaacccagagaatgaaagtgagatatatccagatttcgtgacgatcgccaaagggttcaacattccagcggtccgtgtgacaaagaagaacgaagtccgcgcagcgataaagaagatgctcgagactccagggccgtacctcttggatataatcgtcccacaccaggagcatgtgttgcctatgatccctagtggtggggctttcaaggatatgatcctggatggtgatggcaggactgtgtactgactagctagtcagttaacagatcctctagtgccgtgggtcgtttaagctgccgctgtacctgtgtcgtctggtgccttctggtgtacctgggaggttgtcgtctatcaagtatctgtggttggtgtcatgagtcagtgagtcccaatactgttcgtgtcctgtgtgcattatacccaaaactgttatgggcaaatcatgaataagcttgatgttcgaacttaaaagtctctgctcaatatggtattatggttgtttttgttcgtctcctaatatttgcctgggatcaaattttattggctggtgttcatttgacctccatgttcttgctaggctccattttttactctacagccataatatgtttgattgtttggtttgttctttgttgtacacctggttctgtcgagcttagttttcgacactggcttacagcttaacatgttgctattttattgggttctgattgctattttattgggttctgattgctagtttttgctgaatccaaaaaccatgttatttatttaagcgatccaggttattattatgatggtggctaagtttttttttttccaagggtaaattttctggattctccagtgtttctgtggccgaattcaatcactagagtcgacctgcaggccggtccgggcctagaaggcccgcgccacttacgcttgattccgatgacttcgtaggttcctagctcaagccgctcgtgtccaagcgtcacttacgattagctaatgattacggcatctaggaccgactagttcttatgtgcttctagtctccaaatgtggttgatagttattttgctctaagatcaacagtaatgaagtataaatcatcgttgtggtgtgctactcggttaattgagcattaacacacacaaacatgacgaggatggtataatctccaaaaatgtgtactttgttaggtgggaccctatagccttgattaatgtgctatgttaggcatgcctggaaacgtgtgacgcatatgttttgtgaacctgttgatattatatgtgcttttatattaccatattttattaaaatactaatatttattactagtaagatataacattctatctagcttaaaaactaaccataaatattccataataactagatttaccaaactaatatactaaatatacataataaatacaaaattaacaagacaataatcaatatttatgagcttaatatatttagacattatggttggtcgacgataatcatgctaacttttcgtaattgcttgattgaaatatgcttagaataatgcctctttgttctacatggcaaatagggaccattatggtgtaacaccctgggaaccacaaacaccccgaaatgctactaaactacacaactaaccttcatatataaaatttcgacagcatctcctttgaaaatttgcatagacgtggaagcaacagagtataaacagatctgcgtttaaacgtgcaagcgctactagacaattcagtacattaaaaacgtccgcaatgtgttattaagttgtctaagcgtcaatttgtttacaccacaatatatcctgcca

SEQ ID NO: 249 - DNA, 22629 bp, Artificial Sequence
  PHP97452
gtttacccgccaatatatcctgtcaaacactgcggccgcacttgaccgcggatggagccggagctgtggtgaggccatcgacgggaggtgggggagaacacagtctcagtgttctttgtgagtccgcaaggtttttagcttttctgtattaattaaggttgctgttggctgtagaatacggtcgtggaagagctgtatcggtagctactacgtaagctattatatactggaagtctggagctcgtcgatctccggtcgtcttcctccatttctcctcgtcttgctttgactgctgctaccatttgcttctgttttctgatgaagcatgccatgtcggccaccagtgtttgtgtggtttttgcagggaatggctttcaagtgctgtgattgaatggccctcgtcgtcctcggctgagctcacatggacgcgtcatgtgagtgagatatatgatcatatgatgagtggggttcgggtgagtgcgtacttgaagtaggatcccgctttcactcattcattcattggcctttaaaccgggaaattttcgcgaggagatggagggaagcaagcagggtgacgagtgcagagtgccgcgagcgctttgtcaaaaggcaccgccgtaggcaaaaaaatcaatggccctgactgactcgatggtagtactactgtagagactagagagggttgctccccatatcttcgtgtgacttttactccagcattgcatttccgtcattgagacgttaattaatagcagctttcgggacagatgactgtggccatgtttcgtcacggccgcttcgtgccagctgggggtactatagtactgtgattttgttagtaaaaactttcattaggccaccattgacgaccgggccttcgcttttgctgcgctaattaaccatttcccggcgaccgaagggaacatgaacatgccccgacacatgagggcatgaggactagtgttctccctgtcgttcgttgacttgactagtgatagtttaaacgctcttcaactggaagagcggttacaccggttcactagctagctgctaatcgagctagttaccctatgaggtgacatgaagcgctcacggttactatgacggttagcttcacgactgttggtggcagtagcgtacgacttagctatagttccggacttacctagctaataacttcgtatagcatacattatacgaagttatggttaccgaattcgagctcggtatcctggcggaccgaagcttgcatgcctgcagtgcagcgtgacccggtcgtgcccctctctagagataatgagcattgcatgtctaagttataaaaaattaccacatattttttttgtcacacttgtttgaagtgcagtttatctatctttatacatatatttaaactttactctacgaataatataatctatagtactacaataatatcagtgttttagagaatcatataaatgaacagttagacatggtctaaaggacaattgagtattttgacaacaggactctacagttttatctttttagtgtgcatgtgttctcctttttttttgcaaatagcttcacctatataatacttcatccattttattagtacatccatttagggtttagggttaatggtttttatagactaatttttttagtacatctattttattctattttagcctctaaattaagaaaactaaaactctattttagtttttttatttaataatttagatataaaatagaataaaataaagtgactaaaaattaaacaaataccctttaagaaattaaaaaaactaaggaaacatttttcttgtttcgagtagataatgccagcctgttaaacgccgtcgacgagtctaacggacaccaaccagcgaaccagcagcgtcgcgtcgggccaagcgaagcagacggcacggcatctctgtcgctgcctctggacccctctcgagagttccgctccaccgttggacttgctccgctgtcggcatccagaaattgcgtggcggagcggcagacgtgagccggcacggcaggcggcctcctcctcctctcacggcaccggcagctacgggggattcctttcccaccgctccttcgcacgtaagcgcttacgcaccgaacaacgtaagcgcttacgcaccgaacaacgtaagcgcttacgctttcccttcctcgcccgccgtaataaatagacaccccctccacaccctctttccccaacctcgtgttgttcggagcgcacacacacacaaccagatctcccccaaatccacccgtcggcacctccgcttcaaggtacgccgctcgtcctcccccccccccctctctaccttctctagatcggcgttccggtccatgcatggttagggcccggtagttctacttctgttcatgtttgtgttagatccgtgtttgtgttagatccgtgctgctagcgttcgtacacggatgcgacctgtacgtcagacacgttctgattgctaacttgccagtgtttctctttggggaatcctgggatggctctagccgttccgcagacgggatcgatttcatgattttttttgtttcgttgcatagggtttggtttgcccttttcctttatttcaatatatgccgtgcacttgtttgtcgggtcatcttttcatgcttttttttgtcttggttgtgatgatgtggtctggttgggcggtcgttctagatcggagtagaattctgtttcaaactacctggtggatttattaattttggatctgtatgtgtgtgccatacatattcatagttacgaattgaagatgatggatggaaatatcgatctaggataggtatacatgttgatgcgggttttactgatgcatatacagagatgctttttgttcgcttggttgtgatgatgtggtgtggttgggcggtcgttcattcgttctagatcggagtagaatactgtttcaaactacctggtgtatttattaattttggaactgtatgtgtgtgtcatacatcttcatagttacgagtttaagatggatggaaatatcgatctaggataggtatacatgttgatgtgggttttactgatgcatatacatgatggcatatgcagcatctattcatatgctctaaccttgagtacctatctattataataaacaagtatgttttataattattttgatcttgatatacttggatgatggcatatgcagcagctatatgtggatttttttagccctgccttcatacgctatttatttgcttggtactgtttcttttgtcgatgctcaccctgttgtttggtgttacttctgcaggtcgactttaacttagcctaggatccgcccatggcggccaatgcgggcggcggtggagcgggaggaggcagcggcagcggcagcgtggctgcgccggcggtgtgccgccccagcggctcgcggtggacgccgacgccggagcagatcaggatgctgaaggagctctactacggctgcggcatccggtcgcccagctcggagcagatccagcgcatcaccgccatgctgcggcagcacggcaagatcgagggcaagaacgtcttctactggttccagaaccacaaggcccgcgagcgccagaagcgccgcctcaccagcctcgacgtcaacgtgcccgccgccggcgcggccgacgccaccaccagccaactcggcgtcctctcgctgtcgtcgccgccgccttcaggcgcggcgcctccctcgcccaccctcggcttctacgccgccggcaatggcggcggatcggctgtgctgctggacacgagttccgactggggcagcagcggcgctgctatggccaccgagacatgcttcctgcaggactacatgggcgtgacggacacgggcagctcgtcgcagtggccacgcttctcgtcgtcggacacgataatggcggcggccgcggcgcgggcggcgacgacgcgggcgcccgagacgctccctctcttcccgacctgcggcgacgacggcggcagcggtagcagcagctacttgccgttctggggtgccgcgtccacaactgccggcgccacttcttccgttgcgatccaacagcaacaccagctgcaggagcagtacagcttttacagcaacagcaacagcacccagctggccggcaccggcaaccaagacgtatcggcaacagcagcagcagccgccgccctggagctgagcctcagctcatggtgctccccttaccctgctgcagggagtatgtgagagcaacgcgagctgccactgctcttcactgatgtctctggaatggaaggaggaggaagtgagaacagatcattcgacaaagcagcattagtccgttgatcggtggaagaccactcgtcagtgttgagttgaatgtttgatcaataaaatacggcaatgctgtaagggttgttttttatgccattgataatacactgtactgttcagttgttgaactctatttcttagccatgccaagtgcttttcttattttgaataacattacagcaaaaagttgaaagacaaaaaaaaaaacccccgaacagagtgctttgggtcccaagcttctttagactgtgttcggcgttccccctaaatttctccccctatatctcactcacttgtcacatcagcgttctctttccccctatatctccacgctctacagcagttccacctatatcaaacctctataccccaccacaacaatattatatactttcatcttcaactaactcatgtaccttccaatttttttctactaataattatttacgtgcacagaaacttagcaaggagagagagagcgggaatttaaatgctcggcgttaggcttttagtccgctaggtggctagaccgaggttaggacgctagttcactaggggcctagtggtgttttaagacgtcacggtcaccacgcgtggaccgaagcttgcatgcctgcagtgcagcgtgacccggtcgtgcccctctctagagataatgagcattgcatgtctaagttataaaaaattaccacatattttttttgtcacacttgtttgaagtgcagtttatctatctttatacatatatttaaactttactctacgaataatataatctatagtactacaataatatcagtgttttagagaatcatataaatgaacagttagacatggtctaaaggacaattgagtattttgacaacaggactctacagttttatctttttagtgtgcatgtgttctcctttttttttgcaaatagcttcacctatataatacttcatccattttattagtacatccatttagggtttagggttaatggtttttatagactaatttttttagtacatctattttattctattttagcctctaaattaagaaaactaaaactctattttagtttttttatttaataatttagatataaaatagaataaaataaagtgactaaaaattaaacaaataccctttaagaaattaaaaaaactaaggaaacatttttcttgtttcgagtagataatgccagcctgttaaacgccgtcgacgagtctaacggacaccaaccagcgaaccagcagcgtcgcgtcgggccaagcgaagcagacggcacggcatctctgtcgctgcctctggacccctctcgagagttccgctccaccgttggacttgctccgctgtcggcatccagaaattgcgtggcggagcggcagacgtgagccggcacggcaggcggcctcctcctcctctcacggcaccggcagctacgggggattcctttcccaccgctccttcgctttcccttcctcgcccgccgtaataaatagacaccccctccacaccctctttccccaacctcgtgttgttcggagcgcacacacacacaaccagatctcccccaaatccacccgtcggcacctccgcttcaaggtacgccgctcgtcctcccccccccccctctctaccttctctagatcggcgttccggtccatgcatggttagggcccggtagttctacttctgttcatgtttgtgttagatccgtgtttgtgttagatccgtgctgctagcgttcgtacacggatgcgacctgtacgtcagacacgttctgattgctaacttgccagtgtttctctttggggaatcctgggatggctctagccgttccgcagacgggatcgatttcatgattttttttgtttcgttgcatagggtttggtttgcccttttcctttatttcaatatatgccgtgcacttgtttgtcgggtcatcttttcatgcttttttttgtcttggttgtgatgatgtggtctggttgggcggtcgttctagatcggagtagaattctgtttcaaactacctggtggatttattaattttggatctgtatgtgtgtgccatacatattcatagttacgaattgaagatgatggatggaaatatcgatctaggataggtatacatgttgatgcgggttttactgatgcatatacagagatgctttttgttcgcttggttgtgatgatgtggtgtggttgggcggtcgttcattcgttctagatcggagtagaatactgtttcaaactacctggtgtatttattaattttggaactgtatgtgtgtgtcatacatcttcatagttacgagtttaagatggatggaaatatcgatctaggataggtatacatgttgatgtgggttttactgatgcatatacatgatggcatatgcagcatctattcatatgctctaaccttgagtacctatctattataataaacaagtatgttttataattattttgatcttgatatacttggatgatggcatatgcagcagctatatgtggatttttttagcactgccttcatacgctatttatttgcttggtactgtttcttttgtcgatgctcaccctgttgtttggtgttacttctgcaggtcgactttaacttagcctaggatccatggccactgtgaacaactggctcgctttctccctctccccgcaggagctgccgccctcccagacgacggactccacactcatctcggccgccaccgccgaccatgtctccggcgatgtctgcttcaacatcccccaagattggagcatgaggggatcagagctttcggcgctcgtcgcggagccgaagctggaggacttcctcggcggcatctccttctccgagcagcatcacaaggccaactgcaacatgatacccagcactagcagcacagtttgctacgcgagctcaggtgctagcaccggctaccatcaccagctgtaccaccagcccaccagctcagcgctccacttcgcggactccgtaatggtggcttcctcggccggtgtccacgacggcggtgccatgctcagcgcggccgccgctaacggtgtcgctggcgctgccagtgccaacggcggcggcatcgggctgtccatgattaagaactggctgcggagccaaccggcgcccatgcagccgagggtggcggcggctgagggcgcgcaggggctctctttgtccatgaacatggcggggacgacccaaggcgctgctggcatgccacttctcgctggagagcgcgcacgggcgcccgagagtgtatcgacgtcagcacagggtggagccgtcgtcgtcacggcgccgaaggaggatagcggtggcagcggtgttgccggcgctctagtagccgtgagcacggacacgggtggcagcggcggcgcgtcggctgacaacacggcaaggaagacggtggacacgttcgggcagcgcacgtcgatttaccgtggcgtgacaaggcatagatggactgggagatatgaggcacatctttgggataacagttgcagaagggaagggcaaactcgtaagggtcgtcaagtctatttaggtggctatgataaagaggagaaagctgctagggcttatgatcttgctgctctgaagtactggggtgccacaacaacaacaaattttccagtgagtaactacgaaaaggagctcgaggacatgaagcacatgacaaggcaggagtttgtagcgtctctgagaaggaagagcagtggtttctccagaggtgcatccatttacaggggagtgactaggcatcaccaacatggaagatggcaagcacggattggacgagttgcagggaacaaggatctttacttgggcaccttcagcacccaggaggaggcagcggaggcgtacgacatcgcggcgatcaagttccgcggcctcaacgccgtcaccaacttcgacatgagccgctacgacgtgaagagcatcctggacagcagcgccctccccatcggcagcgccgccaagcgcctcaaggaggccgaggccgcagcgtccgcgcagcaccaccacgccggcgtggtgagctacgacgtcggccgcatcgcctcgcagctcggcgacggcggagccctggcggcggcgtacggcgcgcactaccacggcgccgcctggccgaccatcgcgttccagccgggcgccgccagcacaggcctgtaccacccgtacgcgcagcagccaatgcgcggcggcgggtggtgcaagcaggagcaggaccacgcggtgatcgcggccgcgcacagcctgcaggacctccaccacctgaacctgggcgcggccggcgcgcacgactttttctcggcagggcagcaggccgccgccgctgcgatgcacggcctgggtagcatcgacagtgcgtcgctcgagcacagcaccggctccaactccgtcgtctacaacggcggggtcggcgacagcaacggcgccagcgccgtcggcggcagtggcggtggctacatgatgccgatgagcgctgccggagcaaccactacatcggcaatggtgagccacgagcaggtgcatgcacgggcctacgacgaagccaagcaggctgctcagatggggtacgagagctacctggtgaacgcggagaacaatggtggcggaaggatgtctgcatgggggactgtcgtgtctgcagccgcggcggcagcagcaagcagcaacgacaacatggccgccgacgtcgggcatggcggcgcgcagctcttcagtgtctggaacgacacttaagcgtacctagtggtacctgacatcttatagtctgcaacctctcgtgtctgaattcctatctttatcaagtgttattgcttccacgactataggacagctttcgtcgaaagcttttgctcatgtgatctcgaaggattcatctagtctgatttttcgtgacttgtatcggttttattggattcatccaacatatatcaataaaaaatgagttgtgtttcctttcttcctagttcagttaaaattatttccctcctgcgcttgtgctgtaattgtctgtgtacctgttgtttgtgactgtgttagttcccttggatatgatttcgtatttgatatgtacatggagatagcttagcttcattattggagtatgaagttagtatgacatagtcactctcctggaaaattgacactgcaaaccatatttttattctgaaccacaaatcctagtcagtccgctggcatatgccgtccgtttgctgaatccagaacgtgggtttggagatgtacggctgagatgcctctatgcgaaggggatttcgtggtgaaacgagatgggagtagagcaacgcccgtggaagatgcttcaaacttccacacttttgagcaacgatcggcagtagtaaggtagacgatttcaagatcaaagcatatgaagataaacaacatcaacaacaaaatttgttggggttctatagagagaaacagagctacatacatacactgttttgtatctaccatctgagatgatgaaaagatgaaaaactaaagaatgccccggcgccaacgccaggacacgccgcgcgcgcgtcacccgagccatctcttgacccagccggcgctgtatatttacacacgttgcagcatcgatcaccacctgttcgatcgcgtcgccgtcaccggcgcgccgcgacttattgaactagtctagggcgcggctaacaacctagcttagattgccttgtctaaacccttaaggctaacgcgccactctagattcttatgtgcttctagtctccaaatgtggttgatagttattttgctctaagatcaacagtaatgaagtataaatcatcgttgtggtgtgctactcggttaattgagcattaacacacacaaacatgacgaggatggtataatctccaaaaatgtgtactttgttaggtgggaccctatagccttgattaatgtgctatgttaggcatgcctggaaacgtgtgacgcatatgttttgtgaacctgttgatattatatgtgcttttatattaccatattttattaaaatactaatatttattactagtaagatataacattctatctagcttaaaaactaaccataaatattccataataactagatttaccaaactaatatactaaatatacataataaatacaaaattaacaagacaataatcaatatttatgagcttaatatatttagacattatggttggtcgacgataatcatgctaacttttcgtaattgcttgattgaaatatgcttagaataatgcctctttgttctacatggcaaatagggaccattatggtgtaacaccctgggaaccacaaacaccccgaaatgctactaaactacacaactaaccttcatatataaaatttcgacagcatctcctttgaaaatttgcatagacgtggaagcaacagagtataaacagatatcatgataagaaaacatactagacattaataatctgctagaaatgggaagaatcgagctcggtaccctggttcacaaactcaatacaacacacagtggagtagggtattacgctccggcggcccgaaccactctaaatccttgtgtcctcgtgtgctcttccaccattaatgactgtaattgcagggacacgaagagttgtagcgcttttgccaacaagatccgctatatgctagtagagtggaacctgcacagcaacaagcatccaataatctgagaataagaattatgtgtggtgatggttctcatctctgcaactcgccattttcgcgagagaaccaaatccaagttggtgaagatcatgatttgggctcatgggctggcatagtagctattacctttgcaattgtggttcgaatctatccgatattctccttttcagggagagctaatgcttatgcttattgggtattttggtttgacactgcttcacgcccaaaaaaaggcaactatgtctgagttggatatggcccaaaaaaaggcagctatgtctgagttggatatggaagtcttctttcgtttagggtgaagtaagaccaagctcatgagcttattatcttaggtcggaacaaattagttgataggcatggcacatttatcaaattataatgattttaacagaaaagcaacacctctttttcagcagcaccagctttgcaagctgcaattgacactccaagcatagtatttgctccaaactcagcctgcatttcgcacaatatcatatctatttccatttggataaaatatattttccagaaatatgggaacagaatcaagatacagaaaaaagttgtggtagtagtggtaagtggaaacacaagtacagtgaaaagatagcattatttctgaacagtcaaattaaccgaaataagtagtatcacatactgcccctaaattgactacacccaatgtaaagaattgcttgagcatattgagccatcagttgtttgtttgtgtaacggatttgacaatgcagagttcaggagcaaaaaaccgcaaaggagagaaagagggaaaggatctcctagtatcccaccttgtggcgcgccctgtcaagtgcatgatggcctggtcgatctgcgtctgctgctgcggttccatcccaacgagtgcctccgacaccttgtcgttgatcacccgcaccgcgtaggcgacccccctggcgaggaacttccgcctctcggaggccccggccgcgtcggcggcggcgccctcgagcgcgcccacgctagccgtagatgctcggtgcacggccttgttggtgtgcaactcgacctcaacggccggtgcgctacgcccgtcaaggatctggcgcgcccgcaccctcgtgatcacggtgggcgcctcccgcctcatgtggccgacgatgaaaagcgccgggttaggggccttggcgcgcaccgccgtattcagggcctcctcgctcttgcgcgagagcaggtgcttccccaggtactcctgcactgacaaggctgccacagcggtggaatttgtcctcacgacttcgccacgtcgtcctcacctccctggcttcccacgactccgccgtatcgaggtgctcggtgggtcgtcttaatccgaagtccgaactaggaagacgagacagagaggtctgaggaatgggcctcgtttgatgttgagctgaattatttttccagcataagcccaggtcttggtccatgaacaaaattactagaaacccagcccagtactacgatctaaaagagggactgccactggatagctctctctagcattctccacgctccaatacagcggcgtcgtgtctatccgggtctatccgcgaacacgtgagaactctccagaaactgctttctcctccacttcatctctctcgctttccctctataaaaagaccccttctaggaattgagggagacagcaagcaccaagcagcgatccgaagctcaatcaattcactcaaacctcttccccaaatcttcgattagatcttcgttgacaagaagactagaaccgaacctgacatgtccaacctgctcacggttcaccagaaccttccggctcttccagtggacgcgacgtccgatgaagtcaggaagaacctcatggacatgttccgcgacaggcaagcgttcagcgagcacacctggaagatgctgctctccgtctgccgctcctgggctgcatggtgcaagctgaacaacaggaagtggttccccgctgagcccgaggacgtgagggattaccttctgtacctgcaagcgcgaggtttgtttctgcttctacctttgatatatatataataattatcattaattagtagtaatataatatttcaaatatttttttcaaaataaaagaatgtagtatatagcaattgcttttctgtagtttataagtgtgtatattttaatttataacttttctaatatatgaccaaaacatggtgatgcctaggtctggcagtgaagaccatccagcaacaccttggacaactgaacatgcttcacaggcgctccggcctcccgcgccccagcgactcgaacgccgtgagcctcgtcatgcgccgcatcaggaaggaaaacgtcgatgccggcgaaagggcaaagcaggccctcgcgttcgagaggaccgatttcgaccaggtccgcagcctgatggagaacagcgacaggtgccaggacattaggaacctggcgttcctcggaattgcatacaacacgctcctcaggatcgcggaaattgcccgcattcgcgtgaaggacattagccgcaccgacggcggcaggatgcttatccacattggcaggaccaagacgctcgtttccaccgcaggcgtcgaaaaggccctcagcctcggagtgaccaagctcgtcgaacgctggatctccgtgtccggcgtcgcggacgacccaaacaactacctcttctgccgcgtccgcaagaacggggtggctgcccctagcgccaccagccaactcagcacgagggccttggaaggtattttcgaggccacccaccgcctgatctacggcgcgaaggatgacagcggtcaacgctacctcgcatggtccgggcactccgcccgcgttggagctgctagggacatggcccgcgccggtgtttccatccccgaaatcatgcaggcgggtggatggacgaacgtgaacattgtcatgaactacattcgcaaccttgacagcgagacgggcgcaatggttcgcctcctggaagatggtgactgaggtacccaacctagacttgtccatcttctggattggccaacttaattaatgtatgaaataaaaggatgcacacatagtgacatgctaatcactataatgtgggcatcaaagttgtgtgttatgtgtaattactagttatctgaataaaagagaaagagatcatccatatttcttatcctaaatgaatgtcacgtgtctttataattctttgatgaaccagatgcatttcattaaccaaatccatatacatataaatattaatcatatataattaatatcaattgggttagcaaaacaaatctagtctaggtgtgttttgcgatccgatatcgacgtctaaaaacggcccctaactaacgcttagttgcccgctagattagtcccccgttagtgcctagttagacacacgacgaactaggggctagccccgggataacttcgtatagcatacattatacgaagttatgaattccggaccgggttaccgaattcctgcccttaaggccaattgttcaagattcattcaacaattgaaacatctcccatgattaaatcagtataaggttgctatggtcttgcttgacaaagtttttttttgagggaatttcaactaaatttttgagtgaaactatcaaatactgattttaaaaaatttttataaaaggaagcgcagagataaaaggccatctatgctacaaaagtacccaaaaatgtaatcctaaagtatgaattgcattttttttttgtttggacgaaaggaaaggagtattaccacaagaatgatatcatcttcatatttagatcttttttgggtaaagcttgagattctctaaatatagagaaatcagaagaaaaaaaaaccgtgttttggtggttttgatttctagcctccacaataactttgacggcgtcgacaagtctaacggacaccaagcagcgaaccaccagcgccgagccaagcgaagcagacggccgagacgttgacaccttcggcgcggcatctctcgagagttccgctccggcgctccacctccaccgctggcggtttcttattccgttccgttccgcctcctgctctgctcctctccacaccacacggcacgaaaccgttacggcaccggcagcacccagcacgggagaggggattcctttcccaccgttccttccctttccgccccgccgctataaatagccagccccatccccagcttttttccccaatctcatctcctctctcctgttgttcggagcacacgcacaatccgatcgatccccaaatccccttcgtctctcctcgcgagcctcgtggatcccagcttcaaggtacggcgatcgatcatcccccctccttctctctaccttcttttctctagactacatcggatggcgatccatggttagggcctgctagtttcccttcctgttttgtcgatggctgcgaggcacaatagatctgatggcgttatgacggctaacttgtcatgttgttgcgatttatagtccctttaggagatcagtttaatttctcggatggttcgagatcggtggtccatggttagtaccctaagatccgcgctgttagggttcgtagatggaggcgacctgttctgattgttaacttgtcagtacctgggaaatcctgggatggttctagctcgtccgcagatgagatcgatttcatgatcctctgtatcttgtttcgttgcctaggttccgtctaatctatccgtggtatgatgtagatgttttgatcgtgctaactacgtcttgtaaagttaattgtcaggtcataatttttagcatgcctttttttttgtttggttttgtctaattgggctgtcgttctagatcagagtagaagactgttccaaactacctgctggatttattgaacttggatctgtatgtgtgtcacatatcttcataaattcatgattaagatggattgaaatatcttttatctttttggtatggatagttctatatgttggtgtggctttgttagatgtatacatgcttagatacatgaagcaacgtgctgctactgtttagtaattgctgttcatttgtctaataaacagataaggatatgtatttatgttgctgttggttttgctggtactttgttggatacaaatgcttcaatacagaaaacagcatgctgctacgatttaccatttatctaatcttatcatatgtctaatctaataaacaaacatgcttttaaattatcttcatatgcttggatgatggcatacacagcggctatgtgtggttttttaaatacccagcatcatgggcatgcatgacactgctttaatatgctttttatttgcttgagactgtttcttttgtttatactgaccctttagttcggtgactcttctgcaggtcgactttaacttagcctaggatccatggcccagtccaagcacggcctgaccaaggagatgaccatgaagtaccgcatggagggctgcgtggacggccacaagttcgtgatcaccggcgagggcatcggctaccccttcaagggcaagcaggccatcaacctgtgcgtggtggagggcggccccttgcccttcgccgaggacatcttgtccgccgccttcatgtacggcaaccgcgtgttcaccgagtacccccaggacatcgtcgactacttcaagaactcctgccccgccggctacacctgggaccgctccttcctgttcgaggacggcgccgtgtgcatctgcaacgccgacatcaccgtgagcgtggaggagaactgcatgtaccacgagtccaagttctacggcgtgaacttccccgccgacggccccgtgatgaagaagatgaccgacaactgggagccctcctgcgagaagatcatccccgtgcccaagcagggcatcttgaagggcgacgtgagcatgtacctgctgctgaaggacggtggccgcttgcgctgccagttcgacaccgtgtacaaggccaagtccgtgccccgcaagatgcccgactggcacttcatccagcacaagctgacccgcgaggaccgcagcgacgccaagaaccagaagtggcacctgaccgagcacgccatcgcctccggctccgccttgccctccggactcagatctcgatagggtaccaatggccagttaacagatccagctgctgctgttctagggttcacaagtctgcctatttgtcttccccaatggagctatggttgtctggtctggtccttggtcgtgtcccgtttcattgtgtactatttacctgtaatgtgtatccttaagtctggtttgatggtgtctgaaacgttttgctgtggtagagcagcatggaagaactataatgaataagtgatccctaatcattgtgtccaaattttgcttctgctatacccttttgtgctgtttcttatgttttgcttaaaaatttgatctgacaaacaaatttgtctaaattatgctcttgttctgactgtgtactgtacacatttgtattgctaccggtttggcacatagttttctctttgattgcagatcaaacccttctgattgcagattgcttggctatggctgatgtgctcactgttcttctttagcttgtatattgctgatggtggcttggctacggctgaaaaagttgctgctgcgccgacttggcaactgttgctccagtaatgctttgtcctctcttcctagccgccgacttggcacttggcagctgttgctcctgtaatgcgttgttatctcttatctcttgagatgtactatgattttgaggctgtttgacttgtgccagattgccagtgctgatgctatattatctcaggtttttatgctagtatatgttttactgtgtgctgcctgtgtcgagttacgtaatctattgaaccgctatgcgtgttgatgccctgttgttgcttgccagattgatgcccctgttgcttgcagcttgcaagctgtagtgaaatcctaaaattcgaaaccaaatctattctgaacttttgaagatctgtgatgtccggaagaaaagattcaaacagataaacgggactctccagaatctataaaataaatgatcgacaaacgctttgctttggtaggcttcctagttagttagcggaccgaagcttcggtccgggcctagaaggccagcttcggccgcccctcggtaccctgggatctgcccttactttaacgcctctaaccaacacccctttatctttataaggaacaataaacagaatttgccccactgttctaaatcacctaataatatccccagctaaaaacaataaaggtttcctagaattaagacaagcatgactgttcctccaggagggtttggaacattgttgcagtcttgcagatacgggcgaagggtgagaaacagagcggagggctggaggtgacctcggtagtcgacgccggagttgagcttgacaacgacggggcggcccctgatggacttgaggaagtccgatggcgtcttcaccgtcccgccggcgcccgaggcgggcctgtcgctgccgccgccgccgctgctcatcttgcgcgctgtgcccccggcggtgtccctgtgttgcggatcgcgggtgggccaggtggatgcgagggcgacccgtttggactccggccggagccgccggatccctggtcggtgtcagtgccgtttactctgggccccacgtgtcagtaccgtctgtagatgacaacaacccgtcgtccacagtcatgtccaaaatatcctttcttcttttttttcgattcggatatctatcttccttttttttttccaaaaatcttcttgacgcaccagcgcgcacgtttgtggtaaacgccgacacgtcggtcccacgtcgatagaccccacccaccagtgagtagcgtgtacgtattcgggggtgacggacgtgtcgccgtcgtcttgctagtcccattcccatctgagccacacatctctgaacaaaaaaaaggagggaggcctccacgcacatccccctccgtgccacccgccccaaaccctcgcgccgcctccgagacagccgccgcaaccatggccaccgccgccgccgcgtctaccgcgctcactggcgccactaccgctgcgcccaaggcgaggcgccgggcgcacctcctggccacccgccgcgccctcgccgcgcccatcaggtgctcagcggcgtcacccgccatgccgatggctcccccggccaccccgctccggccgtggggccccaccgagccccgcaagggtgctgacatcctcgtcgagtccctcgagcgctgcggcgtccgcgacgtcttcgcctaccccggcggcgcgtccatggagatccaccaggcactcacccgctcccccgtcatcgccaaccacctcttccgccacgagcaaggggaggcctttgccgcctccggctacgcgcgctcctcgggccgcgtcggcgtctgcatcgccacctccggccccggcgccaccaacctagtctccgcgctcgccgacgcgctgctcgattccgtccccatggtcgccatcacgggacaggtggcgcgacgcatgattggcaccgacgccttccaggagacgcccatcgtcgaggtcacccgctccatcaccaagcacaactacctggtcctcgacgtcgacgacatcccccgcgtcgtgcaggaggctttcttcctcgcctcctctggtcgaccagggccggtgcttgtcgacatccccaaggacatccagcagcagatggcggtgcctgtctgggacaagcccatgagtctgcctgggtacattgcgcgccttcccaagccccctgcgactgagttgcttgagcaggtgctgcgtcttgttggtgaatcgcggcgccctgttctttatgtgggcggtggctgcgcagcatctggtgaggagttgcgacgctttgtggagctgactggaatcccggtcacaactactcttatgggcctcggcaacttccccagcgacgacccactgtctctgcgcatgctaggtatgcatgggacggtgtatgcaaattatgcagtggataaggccgatctgttgcttgcacttggtgtgcggtttgatgatcgcgtgacagggaagattgaggcttttgcaagcagggctaagattgtgcacgttgatattgatccggctgagattggcaagaacaagcagccacatgtgtccatctgtgcagatgttaagcttgctttgcagggcatgaatgctcttcttgaaggaagcacatcaaagaagagctttgactttggctcatggaacgatgagttggatcagcagaagagggaattcccccttgggtataaaacatctaatgaggagatccagccacaatatgctattcaggttcttgatgagctgacgaaaggcgaggccatcatcggcacaggtgttgggcagcaccagatgtgggcggcacagtactacacttacaagcggccaaggcagtggttgtcttcagctggtcttggggctatgggatttggtttgccggctgctgctggtgcttctgtggcaaacccaggtgtcactgttgttgacatcgatggagatggtagctttctcatgaacgttcaggagctagctatgatccgaattgagaacctcccagtgaaggtctttgtgctaaacaaccagcacctggggatggtggtgcagttggaggacaggttctataaggccaacagagcgcacacatacttgggaaacccagagaatgaaagtgagatatatccagatttcgtgacgatcgccaaagggttcaacattccagcggtccgtgtgacaaagaagaacgaagtccgcgcagcgataaagaagatgctcgagactccagggccgtacctcttggatataatcgtcccacaccaggagcatgtgttgcctatgatccctagtggtggggctttcaaggatatgatcctggatggtgatggcaggactgtgtactgactagctagtcagttaacagatcctctagtgccgtgggtcgtttaagctgccgctgtacctgtgtcgtctggtgccttctggtgtacctgggaggttgtcgtctatcaagtatctgtggttggtgtcatgagtcagtgagtcccaatactgttcgtgtcctgtgtgcattatacccaaaactgttatgggcaaatcatgaataagcttgatgttcgaacttaaaagtctctgctcaatatggtattatggttgtttttgttcgtctcctaatatttgcctgggatcaaattttattggctggtgttcatttgacctccatgttcttgctaggctccattttttactctacagccataatatgtttgattgtttggtttgttctttgttgtacacctggttctgtcgagcttagttttcgacactggcttacagcttaacatgttgctattttattgggttctgattgctattttattgggttctgattgctagtttttgctgaatccaaaaaccatgttatttatttaagcgatccaggttattattatgatggtggctaagtttttttttttccaagggtaaattttctggattctccagtgtttctgtggccgaattcaatcactagagtcgacctgcaggccggtccgggcctagaaggcccgcgccacttacgcttgattccgatgacttcgtaggttcctagctcaagccgctcgtgtccaagcgtcacttacgattagctaatgattacggcatctaggaccgactagttcttatgtgcttctagtctccaaatgtggttgatagttattttgctctaagatcaacagtaatgaagtataaatcatcgttgtggtgtgctactcggttaattgagcattaacacacacaaacatgacgaggatggtataatctccaaaaatgtgtactttgttaggtgggaccctatagccttgattaatgtgctatgttaggcatgcctggaaacgtgtgacgcatatgttttgtgaacctgttgatattatatgtgcttttatattaccatattttattaaaatactaatatttattactagtaagatataacattctatctagcttaaaaactaaccataaatattccataataactagatttaccaaactaatatactaaatatacataataaatacaaaattaacaagacaataatcaatatttatgagcttaatatatttagacattatggttggtcgacgataatcatgctaacttttcgtaattgcttgattgaaatatgcttagaataatgcctctttgttctacatggcaaatagggaccattatggtgtaacaccctgggaaccacaaacaccccgaaatgctactaaactacacaactaaccttcatatataaaatttcgacagcatctcctttgaaaatttgcatagacgtggaagcaacagagtataaacagatctgcgtttaaacgtgcaagcgctactagacaattcagtacattaaaaacgtccgcaatgtgttattaagttgtctaagcgtcaatttgtttacaccacaatatatcctgcca

SEQ ID NO: 250 - DNA, 22132 bp, Artificial Sequence
  PHP97456
gtttacccgccaatatatcctgtcaaacactgcggccgcacttgaccgcggatggagccggagctgtggtgaggccatcgacgggaggtgggggagaacacagtctcagtgttctttgtgagtccgcaaggtttttagcttttctgtattaattaaggttgctgttggctgtagaatacggtcgtggaagagctgtatcggtagctactacgtaagctattatatactggaagtctggagctcgtcgatctccggtcgtcttcctccatttctcctcgtcttgctttgactgctgctaccatttgcttctgttttctgatgaagcatgccatgtcggccaccagtgtttgtgtggtttttgcagggaatggctttcaagtgctgtgattgaatggccctcgtcgtcctcggctgagctcacatggacgcgtcatgtgagtgagatatatgatcatatgatgagtggggttcgggtgagtgcgtacttgaagtaggatcccgctttcactcattcattcattggcctttaaaccgggaaattttcgcgaggagatggagggaagcaagcagggtgacgagtgcagagtgccgcgagcgctttgtcaaaaggcaccgccgtaggcaaaaaaatcaatggccctgactgactcgatggtagtactactgtagagactagagagggttgctccccatatcttcgtgtgacttttactccagcattgcatttccgtcattgagacgttaattaatagcagctttcgggacagatgactgtggccatgtttcgtcacggccgcttcgtgccagctgggggtactatagtactgtgattttgttagtaaaaactttcattaggccaccattgacgaccgggccttcgcttttgctgcgctaattaaccatttcccggcgaccgaagggaacatgaacatgccccgacacatgagggcatgaggactagtgttctccctgtcgttcgttgacttgactagtgatagtttaaacgctcttcaactggaagagcggttactaccggttcactagctagctgctaatcgagctagttaccctatgaggtgacatgaagcgctcacggttactatgacggttagcttcacgactgttggtggcagtagcgtacgacttagctatagttccggacttacctagctaataacttcgtatagcatacattatacgaagttatggttaccgaattcgagctcggtaccctgcggaccgaagcttgcatgcctgcagtgcagcgtgacccggtcgtgcccctctctagagataatgagcattgcatgtctaagttataaaaaattaccacatattttttttgtcacacttgtttgaagtgcagtttatctatctttatacatatatttaaactttactctacgaataatataatctatagtactacaataatatcagtgttttagagaatcatataaatgaacagttagacatggtctaaaggacaattgagtattttgacaacaggactctacagttttatctttttagtgtgcatgtgttctcctttttttttgcaaatagcttcacctatataatacttcatccattttattagtacatccatttagggtttagggttaatggtttttatagactaatttttttagtacatctattttattctattttagcctctaaattaagaaaactaaaactctattttagtttttttatttaataatttagatataaaatagaataaaataaagtgactaaaaattaaacaaataccctttaagaaattaaaaaaactaaggaaacatttttcttgtttcgagtagataatgccagcctgttaaacgccgtcgacgagtctaacggacaccaaccagcgaaccagcagcgtcgcgtcgggccaagcgaagcagacggcacggcatctctgtcgctgcctctggacccctctcgagagttccgctccaccgttggacttgctccgctgtcggcatccagaaattgcgtggcggagcggcagacgtgagccggcacggcaggcggcctcctcctcctctcacggcaccggcagctacgggggattcctttcccaccgctccttcgcacgtaagcgcttacgcaccgaacaacgtaagcgcttacgcaccgaacaacgtaagcgcttacgctttcccttcctcgcccgccgtaataaatagacaccccctccacaccctctttccccaacctcgtgttgttcggagcgcacacacacacaaccagatctcccccaaatccacccgtcggcacctccgcttcaaggtacgccgctcgtcctcccccccccccctctctaccttctctagatcggcgttccggtccatgcatggttagggcccggtagttctacttctgttcatgtttgtgttagatccgtgtttgtgttagatccgtgctgctagcgttcgtacacggatgcgacctgtacgtcagacacgttctgattgctaacttgccagtgtttctctttggggaatcctgggatggctctagccgttccgcagacgggatcgatttcatgattttttttgtttcgttgcatagggtttggtttgcccttttcctttatttcaatatatgccgtgcacttgtttgtcgggtcatcttttcatgcttttttttgtcttggttgtgatgatgtggtctggttgggcggtcgttctagatcggagtagaattctgtttcaaactacctggtggatttattaattttggatctgtatgtgtgtgccatacatattcatagttacgaattgaagatgatggatggaaatatcgatctaggataggtatacatgttgatgcgggttttactgatgcatatacagagatgctttttgttcgcttggttgtgatgatgtggtgtggttgggcggtcgttcattcgttctagatcggagtagaatactgtttcaaactacctggtgtatttattaattttggaactgtatgtgtgtgtcatacatcttcatagttacgagtttaagatggatggaaatatcgatctaggataggtatacatgttgatgtgggttttactgatgcatatacatgatggcatatgcagcatctattcatatgctctaaccttgagtacctatctattataataaacaagtatgttttataattattttgatcttgatatacttggatgatggcatatgcagcagctatatgtggatttttttagccctgccttcatacgctatttatttgcttggtactgtttcttttgtcgatgctcaccctgttgtttggtgttacttctgcaggtcgactttaacttagcctaggatccgcccatggcggccaatgcgggcggcggtggagcgggaggaggcagcggcagcggcagcgtggctgcgccggcggtgtgccgccccagcggctcgcggtggacgccgacgccggagcagatcaggatgctgaaggagctctactacggctgcggcatccggtcgcccagctcggagcagatccagcgcatcaccgccatgctgcggcagcacggcaagatcgagggcaagaacgtcttctactggttccagaaccacaaggcccgcgagcgccagaagcgccgcctcaccagcctcgacgtcaacgtgcccgccgccggcgcggccgacgccaccaccagccaactcggcgtcctctcgctgtcgtcgccgccgccttcaggcgcggcgcctccctcgcccaccctcggcttctacgccgccggcaatggcggcggatcggctgtgctgctggacacgagttccgactggggcagcagcggcgctgctatggccaccgagacatgcttcctgcaggactacatgggcgtgacggacacgggcagctcgtcgcagtggccacgcttctcgtcgtcggacacgataatggcggcggccgcggcgcgggcggcgacgacgcgggcgcccgagacgctccctctcttcccgacctgcggcgacgacggcggcagcggtagcagcagctacttgccgttctggggtgccgcgtccacaactgccggcgccacttcttccgttgcgatccaacagcaacaccagctgcaggagcagtacagcttttacagcaacagcaacagcacccagctggccggcaccggcaaccaagacgtatcggcaacagcagcagcagccgccgccctggagctgagcctcagctcatggtgctccccttaccctgctgcagggagtatgtgagagcaacgcgagctgccactgctcttcactgatgtctctggaatggaaggaggaggaagtgagaacagatcattcgacaaagcagcattagtccgttgatcggtggaagaccactcgtcagtgttgagttgaatgtttgatcaataaaatacggcaatgctgtaagggttgttttttatgccattgataatacactgtactgttcagttgttgaactctatttcttagccatgccaagtgcttttcttattttgaataacattacagcaaaaagttgaaagacaaaaaaaaaaacccccgaacagagtgctttgggtcccaagcttctttagactgtgttcggcgttccccctaaatttctccccctatatctcactcacttgtcacatcagcgttctctttccccctatatctccacgctctacagcagttccacctatatcaaacctctataccccaccacaacaatattatatactttcatcttcaactaactcatgtaccttccaatttttttctactaataattatttacgtgcacagaaacttagcaaggagagagagagcgggaatttaaatgctcggcgttaggcttttagtccgctaggtggctagaccgaggttaggacgctagttcactaggggcctagtggtgttttaagacgtcacggtcaccacgcgtggaccgaagcttgcatgcctgcagtgcagcgtgacccggtcgtgcccctctctagagataatgagcattgcatgtctaagttataaaaaattaccacatattttttttgtcacacttgtttgaagtgcagtttatctatctttatacatatatttaaactttactctacgaataatataatctatagtactacaataatatcagtgttttagagaatcatataaatgaacagttagacatggtctaaaggacaattgagtattttgacaacaggactctacagttttatctttttagtgtgcatgtgttctcctttttttttgcaaatagcttcacctatataatacttcatccattttattagtacatccatttagggtttagggttaatggtttttatagactaatttttttagtacatctattttattctattttagcctctaaattaagaaaactaaaactctattttagtttttttatttaataatttagatataaaatagaataaaataaagtgactaaaaattaaacaaataccctttaagaaattaaaaaaactaaggaaacatttttcttgtttcgagtagataatgccagcctgttaaacgccgtcgacgagtctaacggacaccaaccagcgaaccagcagcgtcgcgtcgggccaagcgaagcagacggcacggcatctctgtcgctgcctctggacccctctcgagagttccgctccaccgttggacttgctccgctgtcggcatccagaaattgcgtggcggagcggcagacgtgagccggcacggcaggcggcctcctcctcctctcacggcaccggcagctacgggggattcctttcccaccgctccttcgctttcccttcctcgcccgccgtaataaatagacaccccctccacaccctctttccccaacctcgtgttgttcggagcgcacacacacacaaccagatctcccccaaatccacccgtcggcacctccgcttcaagaggtccgccttgtttctcctctgtctcttgatctgactaatcttggtttatgattcgttgagtaattttggggaaagcttcgtccacagttttttttcgatgaacagtgccgcagtggcgctgatcttgtatgctatcctgcaatcgtggtgaacttatttcttttatatcctttactcccatgaaaaggctagtaatctttctcgatgtaacatcgtccagcactgctattaccgtgtggtccatccgacagtctggctgaacacatcatacgatctatggagcaaaaatctatcttccctgttctttaatgaaggacgtcattttcattagtatgatctaggaatgttgcaacttgcaaggaggcgtttctttctttgaatttaactaactcgttgagtggccctgtttctcggacgtaaggcctttgctgctccacacatgtccattcgaattttaccgtgtttagcaagggcgaaaagtttgcatcttgatgatttagcttgactatgcgattgctttcctgaacccgtgcaggatccatggccactgtgaacaactggctcgctttctccctctccccgcaggagctgccgccctcccagacgacggactccacactcatctcggccgccaccgccgaccatgtctccggcgatgtctgcttcaacatcccccaagattggagcatgaggggatcagagctttcggcgctcgtcgcggagccgaagctggaggacttcctcggcggcatctccttctccgagcagcatcacaaggccaactgcaacatgatacccagcactagcagcacagtttgctacgcgagctcaggtgctagcaccggctaccatcaccagctgtaccaccagcccaccagctcagcgctccacttcgcggactccgtaatggtggcttcctcggccggtgtccacgacggcggtgccatgctcagcgcggccgccgctaacggtgtcgctggcgctgccagtgccaacggcggcggcatcgggctgtccatgattaagaactggctgcggagccaaccggcgcccatgcagccgagggtggcggcggctgagggcgcgcaggggctctctttgtccatgaacatggcggggacgacccaaggcgctgctggcatgccacttctcgctggagagcgcgcacgggcgcccgagagtgtatcgacgtcagcacagggtggagccgtcgtcgtcacggcgccgaaggaggatagcggtggcagcggtgttgccggcgctctagtagccgtgagcacggacacgggtggcagcggcggcgcgtcggctgacaacacggcaaggaagacggtggacacgttcgggcagcgcacgtcgatttaccgtggcgtgacaaggcatagatggactgggagatatgaggcacatctttgggataacagttgcagaagggaagggcaaactcgtaagggtcgtcaagtctatttaggtggctatgataaagaggagaaagctgctagggcttatgatcttgctgctctgaagtactggggtgccacaacaacaacaaattttccagtgagtaactacgaaaaggagctcgaggacatgaagcacatgacaaggcaggagtttgtagcgtctctgagaaggaagagcagtggtttctccagaggtgcatccatttacaggggagtgactaggcatcaccaacatggaagatggcaagcacggattggacgagttgcagggaacaaggatctttacttgggcaccttcagcacccaggaggaggcagcggaggcgtacgacatcgcggcgatcaagttccgcggcctcaacgccgtcaccaacttcgacatgagccgctacgacgtgaagagcatcctggacagcagcgccctccccatcggcagcgccgccaagcgcctcaaggaggccgaggccgcagcgtccgcgcagcaccaccacgccggcgtggtgagctacgacgtcggccgcatcgcctcgcagctcggcgacggcggagccctggcggcggcgtacggcgcgcactaccacggcgccgcctggccgaccatcgcgttccagccgggcgccgccagcacaggcctgtaccacccgtacgcgcagcagccaatgcgcggcggcgggtggtgcaagcaggagcaggaccacgcggtgatcgcggccgcgcacagcctgcaggacctccaccacctgaacctgggcgcggccggcgcgcacgactttttctcggcagggcagcaggccgccgccgctgcgatgcacggcctgggtagcatcgacagtgcgtcgctcgagcacagcaccggctccaactccgtcgtctacaacggcggggtcggcgacagcaacggcgccagcgccgtcggcggcagtggcggtggctacatgatgccgatgagcgctgccggagcaaccactacatcggcaatggtgagccacgagcaggtgcatgcacgggcctacgacgaagccaagcaggctgctcagatggggtacgagagctacctggtgaacgcggagaacaatggtggcggaaggatgtctgcatgggggactgtcgtgtctgcagccgcggcggcagcagcaagcagcaacgacaacatggccgccgacgtcgggcatggcggcgcgcagctcttcagtgtctggaacgacacttaagcgtacctagtggtacctgacatcttatagtctgcaacctctcgtgtctgaattcctatctttatcaagtgttattgcttccacgactataggacagctttcgtcgaaagcttttgctcatgtgatctcgaaggattcatctagtctgatttttcgtgacttgtatcggttttattggattcatccaacatatatcaataaaaaatgagttgtgtttcctttcttcctagttcagttaaaattatttccctcctgcgcttgtgctgtaattgtctgtgtacctgttgtttgtgactgtgttagttcccttggatatgatttcgtatttgatatgtacatggagatagcttagcttcattattggagtatgaagttagtatgacatagtcactctcctggaaaattgacactgcaaaccatatttttattctgaaccacaaatcctagtcagtccgctggcatatgccgtccgtttgctgaatccagaacgtgggtttggagatgtacggctgagatgcctctatgcgaaggggatttcgtggtgaaacgagatgggagtagagcaacgcccgtggaagatgcttcaaacttccacacttttgagcaacgatcggcagtagtaaggtagacgatttcaagatcaaagcatatgaagataaacaacatcaacaacaaaatttgttggggttctatagagagaaacagagctacatacatacactgttttgtatctaccatctgagatgatgaaaagatgaaaaactaaagaatgccccggcgccaacgccaggacacgccgcgcgcgcgtcacccgagccatctcttgacccagccggcgctgtatatttacacacgttgcagcatcgatcaccacctgttcgatcgcgtcgccgtcaccggcgcgccgcgacttattgaactagtctagggcgcggctaacaacctagcttagattgccttgtctaaacccttaaggctaacgcgccactctagattcttatgtgcttctagtctccaaatgtggttgatagttattttgctctaagatcaacagtaatgaagtataaatcatcgttgtggtgtgctactcggttaattgagcattaacacacacaaacatgacgaggatggtataatctccaaaaatgtgtactttgttaggtgggaccctatagccttgattaatgtgctatgttaggcatgcctggaaacgtgtgacgcatatgttttgtgaacctgttgatattatatgtgcttttatattaccatattttattaaaatactaatatttattactagtaagatataacattctatctagcttaaaaactaaccataaatattccataataactagatttaccaaactaatatactaaatatacataataaatacaaaattaacaagacaataatcaatatttatgagcttaatatatttagacattatggttggtcgacgataatcatgctaacttttcgtaattgcttgattgaaatatgcttagaataatgcctctttgttctacatggcaaatagggaccattatggtgtaacaccctgggaaccacaaacaccccgaaatgctactaaactacacaactaaccttcatatataaaatttcgacagcatctcctttgaaaatttgcatagacgtggaagcaacagagtataaacagatatcatgataagaaaacatactagacattaataatctgctagaaatgggaagaatcgagctcggtaccctggttcacaaactcaatacaacacacagtggagtagggtattacgctccggcggcccgaaccactctaaatccttgtgtcctcgtgtgctcttccaccattaatgactgtaattgcagggacacgaagagttgtagcgcttttgccaacaagatccgctatatgctagtagagtggaacctgcacagcaacaagcatccaataatctgagaataagaattatgtgtggtgatggttctcatctctgcaactcgccattttcgcgagagaaccaaatccaagttggtgaagatcatgatttgggctcatgggctggcatagtagctattacctttgcaattgtggttcgaatctatccgatattctccttttcagggagagctaatgcttatgcttattgggtattttggtttgacactgcttcacgcccaaaaaaaggcaactatgtctgagttggatatggcccaaaaaaaggcagctatgtctgagttggatatggaagtcttctttcgtttagggtgaagtaagaccaagctcatgagcttattatcttaggtcggaacaaattagttgataggcatggcacatttatcaaattataatgattttaacagaaaagcaacacctctttttcagcagcaccagctttgcaagctgcaattgacactccaagcatagtatttgctccaaactcagcctgcatttcgcacaatatcatatctatttccatttggataaaatatattttccagaaatatgggaacagaatcaagatacagaaaaaagttgtggtagtagtggtaagtggaaacacaagtacagtgaaaagatagcattatttctgaacagtcaaattaaccgaaataagtagtatcacatactgcccctaaattgactacacccaatgtaaagaattgcttgagcatattgagccatcagttgtttgtttgtgtaacggatttgacaatgcagagttcaggagcaaaaaaccgcaaaggagagaaagagggaaaggatctcctagtatcccaccttgtggcgcgccctgtcaagtgcatgatggcctggtcgatctgcgtctgctgctgcggttccatcccaacgagtgcctccgacaccttgtcgttgatcacccgcaccgcgtaggcgacccccctggcgaggaacttccgcctctcggaggccccggccgcgtcggcggcggcgccctcgagcgcgcccacgctagccgtagatgctcggtgcacggccttgttggtgtgcaactcgacctcaacggccggtgcgctacgcccgtcaaggatctggcgcgcccgcaccctcgtgatcacggtgggcgcctcccgcctcatgtggccgacgatgaaaagcgccgggttaggggccttggcgcgcaccgccgtattcagggcctcctcgctcttgcgcgagagcaggtgcttccccaggtactcctgcactgacaaggctgccacagcggtggaatttgtcctcacgacttcgccacgtcgtcctcacctccctggcttcccacgactccgccgtatcgaggtgctcggtgggtcgtcttaatccgaagtccgaactaggaagacgagacagagaggtctgaggaatgggcctcgtttgatgttgagctgaattatttttccagcataagcccaggtcttggtccatgaacaaaattactagaaacccagcccagtactacgatctaaaagagggactgccactggatagctctctctagcattctccacgctccaatacagcggcgtcgtgtctatccgggtctatccgcgaacacgtgagaactctccagaaactgctttctcctccacttcatctctctcgctttccctctataaaaagaccccttctaggaattgagggagacagcaagcaccaagcagcgatccgaagctcaatcaattcactcaaacctcttccccaaatcttcgattagatcttcgttgacaagaagactagaaccgaacctgacatgtccaacctgctcacggttcaccagaaccttccggctcttccagtggacgcgacgtccgatgaagtcaggaagaacctcatggacatgttccgcgacaggcaagcgttcagcgagcacacctggaagatgctgctctccgtctgccgctcctgggctgcatggtgcaagctgaacaacaggaagtggttccccgctgagcccgaggacgtgagggattaccttctgtacctgcaagcgcgaggtttgtttctgcttctacctttgatatatatataataattatcattaattagtagtaatataatatttcaaatatttttttcaaaataaaagaatgtagtatatagcaattgcttttctgtagtttataagtgtgtatattttaatttataacttttctaatatatgaccaaaacatggtgatgcctaggtctggcagtgaagaccatccagcaacaccttggacaactgaacatgcttcacaggcgctccggcctcccgcgccccagcgactcgaacgccgtgagcctcgtcatgcgccgcatcaggaaggaaaacgtcgatgccggcgaaagggcaaagcaggccctcgcgttcgagaggaccgatttcgaccaggtccgcagcctgatggagaacagcgacaggtgccaggacattaggaacctggcgttcctcggaattgcatacaacacgctcctcaggatcgcggaaattgcccgcattcgcgtgaaggacattagccgcaccgacggcggcaggatgcttatccacattggcaggaccaagacgctcgtttccaccgcaggcgtcgaaaaggccctcagcctcggagtgaccaagctcgtcgaacgctggatctccgtgtccggcgtcgcggacgacccaaacaactacctcttctgccgcgtccgcaagaacggggtggctgcccctagcgccaccagccaactcagcacgagggccttggaaggtattttcgaggccacccaccgcctgatctacggcgcgaaggatgacagcggtcaacgctacctcgcatggtccgggcactccgcccgcgttggagctgctagggacatggcccgcgccggtgtttccatccccgaaatcatgcaggcgggtggatggacgaacgtgaacattgtcatgaactacattcgcaaccttgacagcgagacgggcgcaatggttcgcctcctggaagatggtgactgaggtacccaacctagacttgtccatcttctggattggccaacttaattaatgtatgaaataaaaggatgcacacatagtgacatgctaatcactataatgtgggcatcaaagttgtgtgttatgtgtaattactagttatctgaataaaagagaaagagatcatccatatttcttatcctaaatgaatgtcacgtgtctttataattctttgatgaaccagatgcatttcattaaccaaatccatatacatataaatattaatcatatataattaatatcaattgggttagcaaaacaaatctagtctaggtgtgttttgcgatccgatatcgacgtctaaaaacggcccctaactaacgcttagttgcccgctagattagtcccccgttagtgcctagttagacacacgacgaactaggggctagccccgggataacttcgtatagcatacattatacgaagttatgaattccggaccgggttaccgaattcctgcccttaaggccaattgttcaagattcattcaacaattgaaacatctcccatgattaaatcagtataaggttgctatggtcttgcttgacaaagtttttttttgagggaatttcaactaaatttttgagtgaaactatcaaatactgattttaaaaaatttttataaaaggaagcgcagagataaaaggccatctatgctacaaaagtacccaaaaatgtaatcctaaagtatgaattgcattttttttttgtttggacgaaaggaaaggagtattaccacaagaatgatatcatcttcatatttagatcttttttgggtaaagcttgagattctctaaatatagagaaatcagaagaaaaaaaaaccgtgttttggtggttttgatttctagcctccacaataactttgacggcgtcgacaagtctaacggacaccaagcagcgaaccaccagcgccgagccaagcgaagcagacggccgagacgttgacaccttcggcgcggcatctctcgagagttccgctccggcgctccacctccaccgctggcggtttcttattccgttccgttccgcctcctgctctgctcctctccacaccacacggcacgaaaccgttacggcaccggcagcacccagcacgggagaggggattcctttcccaccgttccttccctttccgccccgccgctataaatagccagccccatccccagcttttttccccaatctcatctcctctctcctgttgttcggagcacacgcacaatccgatcgatccccaaatccccttcgtctctcctcgcgagcctcgtggatcccagcttcaaggtacggcgatcgatcatcccccctccttctctctaccttcttttctctagactacatcggatggcgatccatggttagggcctgctagtttcccttcctgttttgtcgatggctgcgaggcacaatagatctgatggcgttatgacggctaacttgtcatgttgttgcgatttatagtccctttaggagatcagtttaatttctcggatggttcgagatcggtggtccatggttagtaccctaagatccgcgctgttagggttcgtagatggaggcgacctgttctgattgttaacttgtcagtacctgggaaatcctgggatggttctagctcgtccgcagatgagatcgatttcatgatcctctgtatcttgtttcgttgcctaggttccgtctaatctatccgtggtatgatgtagatgttttgatcgtgctaactacgtcttgtaaagttaattgtcaggtcataatttttagcatgcctttttttttgtttggttttgtctaattgggctgtcgttctagatcagagtagaagactgttccaaactacctgctggatttattgaacttggatctgtatgtgtgtcacatatcttcataaattcatgattaagatggattgaaatatcttttatctttttggtatggatagttctatatgttggtgtggctttgttagatgtatacatgcttagatacatgaagcaacgtgctgctactgtttagtaattgctgttcatttgtctaataaacagataaggatatgtatttatgttgctgttggttttgctggtactttgttggatacaaatgcttcaatacagaaaacagcatgctgctacgatttaccatttatctaatcttatcatatgtctaatctaataaacaaacatgcttttaaattatcttcatatgcttggatgatggcatacacagcggctatgtgtggttttttaaatacccagcatcatgggcatgcatgacactgctttaatatgctttttatttgcttgagactgtttcttttgtttatactgaccctttagttcggtgactcttctgcaggtcgactttaacttagcctaggatccatggcccagtccaagcacggcctgaccaaggagatgaccatgaagtaccgcatggagggctgcgtggacggccacaagttcgtgatcaccggcgagggcatcggctaccccttcaagggcaagcaggccatcaacctgtgcgtggtggagggcggccccttgcccttcgccgaggacatcttgtccgccgccttcatgtacggcaaccgcgtgttcaccgagtacccccaggacatcgtcgactacttcaagaactcctgccccgccggctacacctgggaccgctccttcctgttcgaggacggcgccgtgtgcatctgcaacgccgacatcaccgtgagcgtggaggagaactgcatgtaccacgagtccaagttctacggcgtgaacttccccgccgacggccccgtgatgaagaagatgaccgacaactgggagccctcctgcgagaagatcatccccgtgcccaagcagggcatcttgaagggcgacgtgagcatgtacctgctgctgaaggacggtggccgcttgcgctgccagttcgacaccgtgtacaaggccaagtccgtgccccgcaagatgcccgactggcacttcatccagcacaagctgacccgcgaggaccgcagcgacgccaagaaccagaagtggcacctgaccgagcacgccatcgcctccggctccgccttgccctccggactcagatctcgatagggtaccaatggccagttaacagatccagctgctgctgttctagggttcacaagtctgcctatttgtcttccccaatggagctatggttgtctggtctggtccttggtcgtgtcccgtttcattgtgtactatttacctgtaatgtgtatccttaagtctggtttgatggtgtctgaaacgttttgctgtggtagagcagcatggaagaactataatgaataagtgatccctaatcattgtgtccaaattttgcttctgctatacccttttgtgctgtttcttatgttttgcttaaaaatttgatctgacaaacaaatttgtctaaattatgctcttgttctgactgtgtactgtacacatttgtattgctaccggtttggcacatagttttctctttgattgcagatcaaacccttctgattgcagattgcttggctatggctgatgtgctcactgttcttctttagcttgtatattgctgatggtggcttggctacggctgaaaaagttgctgctgcgccgacttggcaactgttgctccagtaatgctttgtcctctcttcctagccgccgacttggcacttggcagctgttgctcctgtaatgcgttgttatctcttatctcttgagatgtactatgattttgaggctgtttgacttgtgccagattgccagtgctgatgctatattatctcaggtttttatgctagtatatgttttactgtgtgctgcctgtgtcgagttacgtaatctattgaaccgctatgcgtgttgatgccctgttgttgcttgccagattgatgcccctgttgcttgcagcttgcaagctgtagtgaaatcctaaaattcgaaaccaaatctattctgaacttttgaagatctgtgatgtccggaagaaaagattcaaacagataaacgggactctccagaatctataaaataaatgatcgacaaacgctttgctttggtaggcttcctagttagttagcggaccgaagcttcggtccgggcctagaaggccagcttcggccgcccctcggtaccctgggatctgcccttactttaacgcctctaaccaacacccctttatctttataaggaacaataaacagaatttgccccactgttctaaatcacctaataatatccccagctaaaaacaataaaggtttcctagaattaagacaagcatgactgttcctccaggagggtttggaacattgttgcagtcttgcagatacgggcgaagggtgagaaacagagcggagggctggaggtgacctcggtagtcgacgccggagttgagcttgacaacgacggggcggcccctgatggacttgaggaagtccgatggcgtcttcaccgtcccgccggcgcccgaggcgggcctgtcgctgccgccgccgccgctgctcatcttgcgcgctgtgcccccggcggtgtccctgtgttgcggatcgcgggtgggccaggtggatgcgagggcgacccgtttggactccggccggagccgccggatccctggtcggtgtcagtgccgtttactctgggccccacgtgtcagtaccgtctgtagatgacaacaacccgtcgtccacagtcatgtccaaaatatcctttcttcttttttttcgattcggatatctatcttccttttttttttccaaaaatcttcttgacgcaccagcgcgcacgtttgtggtaaacgccgacacgtcggtcccacgtcgatagaccccacccaccagtgagtagcgtgtacgtattcgggggtgacggacgtgtcgccgtcgtcttgctagtcccattcccatctgagccacacatctctgaacaaaaaaaaggagggaggcctccacgcacatccccctccgtgccacccgccccaaaccctcgcgccgcctccgagacagccgccgcaaccatggccaccgccgccgccgcgtctaccgcgctcactggcgccactaccgctgcgcccaaggcgaggcgccgggcgcacctcctggccacccgccgcgccctcgccgcgcccatcaggtgctcagcggcgtcacccgccatgccgatggctcccccggccaccccgctccggccgtggggccccaccgagccccgcaagggtgctgacatcctcgtcgagtccctcgagcgctgcggcgtccgcgacgtcttcgcctaccccggcggcgcgtccatggagatccaccaggcactcacccgctcccccgtcatcgccaaccacctcttccgccacgagcaaggggaggcctttgccgcctccggctacgcgcgctcctcgggccgcgtcggcgtctgcatcgccacctccggccccggcgccaccaacctagtctccgcgctcgccgacgcgctgctcgattccgtccccatggtcgccatcacgggacaggtggcgcgacgcatgattggcaccgacgccttccaggagacgcccatcgtcgaggtcacccgctccatcaccaagcacaactacctggtcctcgacgtcgacgacatcccccgcgtcgtgcaggaggctttcttcctcgcctcctctggtcgaccagggccggtgcttgtcgacatccccaaggacatccagcagcagatggcggtgcctgtctgggacaagcccatgagtctgcctgggtacattgcgcgccttcccaagccccctgcgactgagttgcttgagcaggtgctgcgtcttgttggtgaatcgcggcgccctgttctttatgtgggcggtggctgcgcagcatctggtgaggagttgcgacgctttgtggagctgactggaatcccggtcacaactactcttatgggcctcggcaacttccccagcgacgacccactgtctctgcgcatgctaggtatgcatgggacggtgtatgcaaattatgcagtggataaggccgatctgttgcttgcacttggtgtgcggtttgatgatcgcgtgacagggaagattgaggcttttgcaagcagggctaagattgtgcacgttgatattgatccggctgagattggcaagaacaagcagccacatgtgtccatctgtgcagatgttaagcttgctttgcagggcatgaatgctcttcttgaaggaagcacatcaaagaagagctttgactttggctcatggaacgatgagttggatcagcagaagagggaattcccccttgggtataaaacatctaatgaggagatccagccacaatatgctattcaggttcttgatgagctgacgaaaggcgaggccatcatcggcacaggtgttgggcagcaccagatgtgggcggcacagtactacacttacaagcggccaaggcagtggttgtcttcagctggtcttggggctatgggatttggtttgccggctgctgctggtgcttctgtggcaaacccaggtgtcactgttgttgacatcgatggagatggtagctttctcatgaacgttcaggagctagctatgatccgaattgagaacctcccagtgaaggtctttgtgctaaacaaccagcacctggggatggtggtgcagttggaggacaggttctataaggccaacagagcgcacacatacttgggaaacccagagaatgaaagtgagatatatccagatttcgtgacgatcgccaaagggttcaacattccagcggtccgtgtgacaaagaagaacgaagtccgcgcagcgataaagaagatgctcgagactccagggccgtacctcttggatataatcgtcccacaccaggagcatgtgttgcctatgatccctagtggtggggctttcaaggatatgatcctggatggtgatggcaggactgtgtactgactagctagtcagttaacagatcctctagtgccgtgggtcgtttaagctgccgctgtacctgtgtcgtctggtgccttctggtgtacctgggaggttgtcgtctatcaagtatctgtggttggtgtcatgagtcagtgagtcccaatactgttcgtgtcctgtgtgcattatacccaaaactgttatgggcaaatcatgaataagcttgatgttcgaacttaaaagtctctgctcaatatggtattatggttgtttttgttcgtctcctaatatttgcctgggatcaaattttattggctggtgttcatttgacctccatgttcttgctaggctccattttttactctacagccataatatgtttgattgtttggtttgttctttgttgtacacctggttctgtcgagcttagttttcgacactggcttacagcttaacatgttgctattttattgggttctgattgctattttattgggttctgattgctagtttttgctgaatccaaaaaccatgttatttatttaagcgatccaggttattattatgatggtggctaagtttttttttttccaagggtaaattttctggattctccagtgtttctgtggccgaattcaatcactagagtcgacctgcaggccggtccgggcctagaaggcccgcgccacttacgcttgattccgatgacttcgtaggttcctagctcaagccgctcgtgtccaagcgtcacttacgattagctaatgattacggcatctaggaccgactagttcttatgtgcttctagtctccaaatgtggttgatagttattttgctctaagatcaacagtaatgaagtataaatcatcgttgtggtgtgctactcggttaattgagcattaacacacacaaacatgacgaggatggtataatctccaaaaatgtgtactttgttaggtgggaccctatagccttgattaatgtgctatgttaggcatgcctggaaacgtgtgacgcatatgttttgtgaacctgttgatattatatgtgcttttatattaccatattttattaaaatactaatatttattactagtaagatataacattctatctagcttaaaaactaaccataaatattccataataactagatttaccaaactaatatactaaatatacataataaatacaaaattaacaagacaataatcaatatttatgagcttaatatatttagacattatggttggtcgacgataatcatgctaacttttcgtaattgcttgattgaaatatgcttagaataatgcctctttgttctacatggcaaatagggaccattatggtgtaacaccctgggaaccacaaacaccccgaaatgctactaaactacacaactaaccttcatatataaaatttcgacagcatctcctttgaaaatttgcatagacgtggaagcaacagagtataaacagatctgcgtttaaacgtgcaagcgctactagacaattcagtacattaaaaacgtccgcaatgtgttattaagttgtctaagcgtcaatttgtttacaccacaatatatcctgcca

SEQ ID NO: 251 - DNA, 21544 bp, Artificial Sequence
  PHP97977
gtttacccgccaatatatcctgtcaaacactgcggccgcacttgaccgcggatggagccggagctgtggtgaggccatcgacgggaggtgggggagaacacagtctcagtgttctttgtgagtccgcaaggtttttagcttttctgtattaattaaggttgctgttggctgtagaatacggtcgtggaagagctgtatcggtagctactacgtaagctattatatactggaagtctggagctcgtcgatctccggtcgtcttcctccatttctcctcgtcttgctttgactgctgctaccatttgcttctgttttctgatgaagcatgccatgtcggccaccagtgtttgtgtggtttttgcagggaatggctttcaagtgctgtgattgaatggccctcgtcgtcctcggctgagctcacatggacgcgtcatgtgagtgagatatatgatcatatgatgagtggggttcgggtgagtgcgtacttgaagtaggatcccgctttcactcattcattcattggcctttaaaccgggaaattttcgcgaggagatggagggaagcaagcagggtgacgagtgcagagtgccgcgagcgctttgtcaaaaggcaccgccgtaggcaaaaaaatcaatggccctgactgactcgatggtagtactactgtagagactagagagggttgctccccatatcttcgtgtgacttttactccagcattgcatttccgtcattgagacgttaattaatagcagctttcgggacagatgactgtggccatgtttcgtcacggccgcttcgtgccagctgggggtactatagtactgtgattttgttagtaaaaactttcattaggccaccattgacgaccgggccttcgcttttgctgcgctaattaaccatttcccggcgaccgaagggaacatgaacatgccccgacacatgagggcatgaggactagtgttctccctgtcgttcgttgacttgactagtgatagtttaaacgctcttcaactggaagagcggttactaccggttcactagctagctgctaatcgagctagttaccctatgaggtgacatgaagcgctcacggttactatgacggttagcttcacgactgttggtggcagtagcgtacgacttagctatagttccggacttacctagctaataacttcgtatagcatacattatacgaagttatggttacctcgcgaatacatctagatatcaagcttgcatgcctgcagtgcagcgtgacccggtcgtgcccctctctagagataatgagcattgcatgtctaagttataaaaaattaccacatattttttttgtcacacttgtttgaagtgcagtttatctatctttatacatatatttaaactttactctacgaataatataatctatagtactacaataatatcagtgttttagagaatcatataaatgaacagttagacatggtctaaaggacaattgagtattttgacaacaggactctacagttttatctttttagtgtgcatgtgttctcctttttttttgcaaatagcttcacctatataatacttcatccattttattagtacatccatttagggtttagggttaatggtttttatagactaatttttttagtacatctattttattctattttagcctctaaattaagaaaactaaaactctattttagtttttttatttaataatttagatataaaatagaataaaataaagtgactaaaaattaaacaaataccctttaagaaattaaaaaaactaaggaaacatttttcttgtttcgagtagataatgccagcctgttaaacgccgtcgacgagtctaacggacaccaaccagcgaaccagcagcgtcgcgtcgggccaagcgaagcagacggcacggcatctctgtcgctgcctctggacccctctcgagagttccgctccaccgttggacttgctccgctgtcggcatccagaaattgcgtggcggagcggcagacgtgagccggcacggcaggcggcctcctcctcctctcacggcaccggcagctacgggggattcctttcccaccgctccttcgcacgtaagcgcttacgcaccgaacaacgtaagcgcttacgcaccgaacaacgtaagcgcttacgctttcccttcctcgcccgccgtaataaatagacaccccctccacaccctctttccccaacctcgtgttgttcggagcgcacacacacacaaccagatctcccccaaatccacccgtcggcacctccgcttcaaggtacgccgctcgtcctcccccccccccctctctaccttctctagatcggcgttccggtccatgcatggttagggcccggtagttctacttctgttcatgtttgtgttagatccgtgtttgtgttagatccgtgctgctagcgttcgtacacggatgcgacctgtacgtcagacacgttctgattgctaacttgccagtgtttctctttggggaatcctgggatggctctagccgttccgcagacgggatcgatttcatgattttttttgtttcgttgcatagggtttggtttgcccttttcctttatttcaatatatgccgtgcacttgtttgtcgggtcatcttttcatgcttttttttgtcttggttgtgatgatgtggtctggttgggcggtcgttctagatcggagtagaattctgtttcaaactacctggtggatttattaattttggatctgtatgtgtgtgccatacatattcatagttacgaattgaagatgatggatggaaatatcgatctaggataggtatacatgttgatgcgggttttactgatgcatatacagagatgctttttgttcgcttggttgtgatgatgtggtgtggttgggcggtcgttcattcgttctagatcggagtagaatactgtttcaaactacctggtgtatttattaattttggaactgtatgtgtgtgtcatacatcttcatagttacgagtttaagatggatggaaatatcgatctaggataggtatacatgttgatgtgggttttactgatgcatatacatgatggcatatgcagcatctattcatatgctctaaccttgagtacctatctattataataaacaagtatgttttataattattttgatcttgatatacttggatgatggcatatgcagcagctatatgtggatttttttagccctgccttcatacgctatttatttgcttggtactgtttcttttgtcgatgctcaccctgttgtttggtgttacttctgcaggtcgactttaacttagcctaggatccatggcggccaatgcgggcggcggtggagcgggaggaggcagcggcagcggcagcgtggctgcgccggcggtgtgccgccccagcggctcgcggtggacgccgacgccggagcagatcaggatgctgaaggagctctactacggctgcggcatccggtcgcccagctcggagcagatccagcgcatcaccgccatgctgcggcagcacggcaagatcgagggcaagaacgtcttctactggttccagaaccacaaggcccgcgagcgccagaagcgccgcctcaccagcctcgacgtcaacgtgcccgccgccggcgcggccgacgccaccaccagccaactcggcgtcctctcgctgtcgtcgccgccgccttcaggcgcggcgcctccctcgcccaccctcggcttctacgccgccggcaatggcggcggatcggctgtgctgctggacacgagttccgactggggcagcagcggcgctgctatggccaccgagacatgcttcctgcaggactacatgggcgtgacggacacgggcagctcgtcgcagtggccacgcttctcgtcgtcggacacgataatggcggcggccgcggcgcgggcggcgacgacgcgggcgcccgagacgctccctctcttcccgacctgcggcgacgacggcggcagcggtagcagcagctacttgccgttctggggtgccgcgtccacaactgccggcgccacttcttccgttgcgatccaacagcaacaccagctgcaggagcagtacagcttttacagcaacagcaacagcacccagctggccggcaccggcaaccaagacgtatcggcaacagcagcagcagccgccgccctggagctgagcctcagctcatggtgctccccttaccctgctgcagggagtatgtgagagcaacgcgagctgccactgctcttcactgatgtctctggaatggaaggaggaggaagtgagaacagatcattcgacaaagcagcattagtccgttgatcggtggaagaccactcgtcagtgttgagttgaatgtttgatcaataaaatacggcaatgctgtaagggttgttttttatgccattgataatacactgtactgttcagttgttgaactctatttcttagccatgccaagtgcttttcttattttgaataacattacagcaaaaagttgaaagacaaaaaaaaaaacccccgaacagagtgctttgggtcccaagcttctttagactgtgttcggcgttccccctaaatttctccccctatatctcactcacttgtcacatcagcgttctctttccccctatatctccacgctctacagcagttccacctatatcaaacctctataccccaccacaacaatattatatactttcatcttcaactaactcatgtaccttccaatttttttctactaataattatttacgtgcacagaaacttagcaaggagagagagagcgggaatttaaatgctcggcgttaggcttttagtccgctaggtggctagaccgaggttaggacgctagttcactaggggcctagtggtgttttaagacgtcacggtcaccacgcgtggaccgaagcttgcatgcctgcagtgcagcgtgacccggtcgtgcccctctctagagataatgagcattgcatgtctaagttataaaaaattaccacatattttttttgtcacacttgtttgaagtgcagtttatctatctttatacatatatttaaactttactctacgaataatataatctatagtactacaataatatcagtgttttagagaatcatataaatgaacagttagacatggtctaaaggacaattgagtattttgacaacaggactctacagttttatctttttagtgtgcatgtgttctcctttttttttgcaaatagcttcacctatataatacttcatccattttattagtacatccatttagggtttagggttaatggtttttatagactaatttttttagtacatctattttattctattttagcctctaaattaagaaaactaaaactctattttagtttttttatttaataatttagatataaaatagaataaaataaagtgactaaaaattaaacaaataccctttaagaaattaaaaaaactaaggaaacatttttcttgtttcgagtagataatgccagcctgttaaacgccgtcgacgagtctaacggacaccaaccagcgaaccagcagcgtcgcgtcgggccaagcgaagcagacggcacggcatctctgtcgctgcctctggacccctctcgagagttccgctccaccgttggacttgctccgctgtcggcatccagaaattgcgtggcggagcggcagacgtgagccggcacggcaggcggcctcctcctcctctcacggcaccggcagctacgggggattcctttcccaccgctccttcgctttcccttcctcgcccgccgtaataaatagacaccccctccacaccctctttccccaacctcgtgttgttcggagcgcacacacacacaaccagatccatggccactgtgaacaactggctcgctttctccctctccccgcaggagctgccgccctcccagacgacggactccacactcatctcggccgccaccgccgaccatgtctccggcgatgtctgcttcaacatcccccaagattggagcatgaggggatcagagctttcggcgctcgtcgcggagccgaagctggaggacttcctcggcggcatctccttctccgagcagcatcacaaggccaactgcaacatgatacccagcactagcagcacagtttgctacgcgagctcaggtgctagcaccggctaccatcaccagctgtaccaccagcccaccagctcagcgctccacttcgcggactccgtaatggtggcttcctcggccggtgtccacgacggcggtgccatgctcagcgcggccgccgctaacggtgtcgctggcgctgccagtgccaacggcggcggcatcgggctgtccatgattaagaactggctgcggagccaaccggcgcccatgcagccgagggtggcggcggctgagggcgcgcaggggctctctttgtccatgaacatggcggggacgacccaaggcgctgctggcatgccacttctcgctggagagcgcgcacgggcgcccgagagtgtatcgacgtcagcacagggtggagccgtcgtcgtcacggcgccgaaggaggatagcggtggcagcggtgttgccggcgctctagtagccgtgagcacggacacgggtggcagcggcggcgcgtcggctgacaacacggcaaggaagacggtggacacgttcgggcagcgcacgtcgatttaccgtggcgtgacaaggcatagatggactgggagatatgaggcacatctttgggataacagttgcagaagggaagggcaaactcgtaagggtcgtcaagtctatttaggtggctatgataaagaggagaaagctgctagggcttatgatcttgctgctctgaagtactggggtgccacaacaacaacaaattttccagtgagtaactacgaaaaggagctcgaggacatgaagcacatgacaaggcaggagtttgtagcgtctctgagaaggaagagcagtggtttctccagaggtgcatccatttacaggggagtgactaggcatcaccaacatggaagatggcaagcacggattggacgagttgcagggaacaaggatctttacttgggcaccttcagcacccaggaggaggcagcggaggcgtacgacatcgcggcgatcaagttccgcggcctcaacgccgtcaccaacttcgacatgagccgctacgacgtgaagagcatcctggacagcagcgccctccccatcggcagcgccgccaagcgcctcaaggaggccgaggccgcagcgtccgcgcagcaccaccacgccggcgtggtgagctacgacgtcggccgcatcgcctcgcagctcggcgacggcggagccctggcggcggcgtacggcgcgcactaccacggcgccgcctggccgaccatcgcgttccagccgggcgccgccagcacaggcctgtaccacccgtacgcgcagcagccaatgcgcggcggcgggtggtgcaagcaggagcaggaccacgcggtgatcgcggccgcgcacagcctgcaggacctccaccacctgaacctgggcgcggccggcgcgcacgactttttctcggcagggcagcaggccgccgccgctgcgatgcacggcctgggtagcatcgacagtgcgtcgctcgagcacagcaccggctccaactccgtcgtctacaacggcggggtcggcgacagcaacggcgccagcgccgtcggcggcagtggcggtggctacatgatgccgatgagcgctgccggagcaaccactacatcggcaatggtgagccacgagcaggtgcatgcacgggcctacgacgaagccaagcaggctgctcagatggggtacgagagctacctggtgaacgcggagaacaatggtggcggaaggatgtctgcatgggggactgtcgtgtctgcagccgcggcggcagcagcaagcagcaacgacaacatggccgccgacgtcgggcatggcggcgcgcagctcttcagtgtctggaacgacacttaagcgtacctagtggtacctgacatcttatagtctgcaacctctcgtgtctgaattcctatctttatcaagtgttattgcttccacgactataggacagctttcgtcgaaagcttttgctcatgtgatctcgaaggattcatctagtctgatttttcgtgacttgtatcggttttattggattcatccaacatatatcaataaaaaatgagttgtgtttcctttcttcctagttcagttaaaattatttccctcctgcgcttgtgctgtaattgtctgtgtacctgttgtttgtgactgtgttagttcccttggatatgatttcgtatttgatatgtacatggagatagcttagcttcattattggagtatgaagttagtatgacatagtcactctcctggaaaattgacactgcaaaccatatttttattctgaaccacaaatcctagtcagtccgctggcatatgccgtccgtttgctgaatccagaacgtgggtttggagatgtacggctgagatgcctctatgcgaaggggatttcgtggtgaaacgagatgggagtagagcaacgcccgtggaagatgcttcaaacttccacacttttgagcaacgatcggcagtagtaaggtagacgatttcaagatcaaagcatatgaagataaacaacatcaacaacaaaatttgttggggttctatagagagaaacagagctacatacatacactgttttgtatctaccatctgagatgatgaaaagatgaaaaactaaagaatgccccggcgccaacgccaggacacgccgcgcgcgcgtcacccgagccatctcttgacccagccggcgctgtatatttacacacgttgcagcatcgatcaccacctgttcgatcgcgtcgccgtcaccggcgcgccgcgacttattgaactagtctagggcgcggctaacaacctagcttagattgccttgtctaaacccttaaggctaacgcgccactctagattcttatgtgcttctagtctccaaatgtggttgatagttattttgctctaagatcaacagtaatgaagtataaatcatcgttgtggtgtgctactcggttaattgagcattaacacacacaaacatgacgaggatggtataatctccaaaaatgtgtactttgttaggtgggaccctatagccttgattaatgtgctatgttaggcatgcctggaaacgtgtgacgcatatgttttgtgaacctgttgatattatatgtgcttttatattaccatattttattaaaatactaatatttattactagtaagatataacattctatctagcttaaaaactaaccataaatattccataataactagatttaccaaactaatatactaaatatacataataaatacaaaattaacaagacaataatcaatatttatgagcttaatatatttagacattatggttggtcgacgataatcatgctaacttttcgtaattgcttgattgaaatatgcttagaataatgcctctttgttctacatggcaaatagggaccattatggtgtaacaccctgggaaccacaaacaccccgaaatgctactaaactacacaactaaccttcatatataaaatttcgacagcatctcctttgaaaatttgcatagacgtggaagcaacagagtataaacagatatcatgataagaaaacatactagacattaataatctgctagaaatgggaagaatcgagctcggtaccctggttcacaaactcaatacaacacacagtggagtagggtattacgctccggcggcccgaaccactctaaatccttgtgtcctcgtgtgctcttccaccattaatgactgtaattgcagggacacgaagagttgtagcgcttttgccaacaagatccgctatatgctagtagagtggaacctgcacagcaacaagcatccaataatctgagaataagaattatgtgtggtgatggttctcatctctgcaactcgccattttcgcgagagaaccaaatccaagttggtgaagatcatgatttgggctcatgggctggcatagtagctattacctttgcaattgtggttcgaatctatccgatattctccttttcagggagagctaatgcttatgcttattgggtattttggtttgacactgcttcacgcccaaaaaaaggcaactatgtctgagttggatatggcccaaaaaaaggcagctatgtctgagttggatatggaagtcttctttcgtttagggtgaagtaagaccaagctcatgagcttattatcttaggtcggaacaaattagttgataggcatggcacatttatcaaattataatgattttaacagaaaagcaacacctctttttcagcagcaccagctttgcaagctgcaattgacactccaagcatagtatttgctccaaactcagcctgcatttcgcacaatatcatatctatttccatttggataaaatatattttccagaaatatgggaacagaatcaagatacagaaaaaagttgtggtagtagtggtaagtggaaacacaagtacagtgaaaagatagcattatttctgaacagtcaaattaaccgaaataagtagtatcacatactgcccctaaattgactacacccaatgtaaagaattgcttgagcatattgagccatcagttgtttgtttgtgtaacggatttgacaatgcagagttcaggagcaaaaaaccgcaaaggagagaaagagggaaaggatctcctagtatcccaccttgtggcgcgccctgtcaagtgcatgatggcctggtcgatctgcgtctgctgctgcggttccatcccaacgagtgcctccgacaccttgtcgttgatcacccgcaccgcgtaggcgacccccctggcgaggaacttccgcctctcggaggccccggccgcgtcggcggcggcgccctcgagcgcgcccacgctagccgtagatgctcggtgcacggccttgttggtgtgcaactcgacctcaacggccggtgcgctacgcccgtcaaggatctggcgcgcccgcaccctcgtgatcacggtgggcgcctcccgcctcatgtggccgacgatgaaaagcgccgggttaggggccttggcgcgcaccgccgtattcagggcctcctcgctcttgcgcgagagcaggtgcttccccaggtactcctgcactgacaaggctgccacagcggtggaatttgtcctcacgacttcgccacgtcgtcctcacctccctggcttcccacgactccgccgtatcgaggtgctcggtgggtcgtcttaatccgaagtccgaactaggaagacgagacagagaggtctgaggaatgggcctcgtttgatgttgagctgaattatttttccagcataagcccaggtcttggtccatgaacaaaattactagaaacccagcccagtactacgatctaaaagagggactgccactggatagctctctctagcattctccacgctccaatacagcggcgtcgtgtctatccgggtctatccgcgaacacgtgagaactctccagaaactgctttctcctccacttcatctctctcgctttccctctataaaaagaccccttctaggaattgagggagacagcaagcaccaagcagcgatccgaagctcaatcaattcactcaaacctcttccccaaatcttcgattagatcttcgttgacaagaagactagaaccgaacctgacatgtccaacctgctcacggttcaccagaaccttccggctcttccagtggacgcgacgtccgatgaagtcaggaagaacctcatggacatgttccgcgacaggcaagcgttcagcgagcacacctggaagatgctgctctccgtctgccgctcctgggctgcatggtgcaagctgaacaacaggaagtggttccccgctgagcccgaggacgtgagggattaccttctgtacctgcaagcgcgaggtttgtttctgcttctacctttgatatatatataataattatcattaattagtagtaatataatatttcaaatatttttttcaaaataaaagaatgtagtatatagcaattgcttttctgtagtttataagtgtgtatattttaatttataacttttctaatatatgaccaaaacatggtgatgcctaggtctggcagtgaagaccatccagcaacaccttggacaactgaacatgcttcacaggcgctccggcctcccgcgccccagcgactcgaacgccgtgagcctcgtcatgcgccgcatcaggaaggaaaacgtcgatgccggcgaaagggcaaagcaggccctcgcgttcgagaggaccgatttcgaccaggtccgcagcctgatggagaacagcgacaggtgccaggacattaggaacctggcgttcctcggaattgcatacaacacgctcctcaggatcgcggaaattgcccgcattcgcgtgaaggacattagccgcaccgacggcggcaggatgcttatccacattggcaggaccaagacgctcgtttccaccgcaggcgtcgaaaaggccctcagcctcggagtgaccaagctcgtcgaacgctggatctccgtgtccggcgtcgcggacgacccaaacaactacctcttctgccgcgtccgcaagaacggggtggctgcccctagcgccaccagccaactcagcacgagggccttggaaggtattttcgaggccacccaccgcctgatctacggcgcgaaggatgacagcggtcaacgctacctcgcatggtccgggcactccgcccgcgttggagctgctagggacatggcccgcgccggtgtttccatccccgaaatcatgcaggcgggtggatggacgaacgtgaacattgtcatgaactacattcgcaaccttgacagcgagacgggcgcaatggttcgcctcctggaagatggtgactgaggtacccaacctagacttgtccatcttctggattggccaacttaattaatgtatgaaataaaaggatgcacacatagtgacatgctaatcactataatgtgggcatcaaagttgtgtgttatgtgtaattactagttatctgaataaaagagaaagagatcatccatatttcttatcctaaatgaatgtcacgtgtctttataattctttgatgaaccagatgcatttcattaaccaaatccatatacatataaatattaatcatatataattaatatcaattgggttagcaaaacaaatctagtctaggtgtgttttgcgatccgatatcgacgtctaaaaacggcccctaactaacgcttagttgcccgctagattagtcccccgttagtgcctagttagacacacgacgaactaggggctagccccgggataacttcgtatagcatacattatacgaagttatgaattccggaccgggttaccgaattcctgcccttaaggccaattgttcaagattcattcaacaattgaaacatctcccatgattaaatcagtataaggttgctatggtcttgcttgacaaagtttttttttgagggaatttcaactaaatttttgagtgaaactatcaaatactgattttaaaaaatttttataaaaggaagcgcagagataaaaggccatctatgctacaaaagtacccaaaaatgtaatcctaaagtatgaattgcattttttttttgtttggacgaaaggaaaggagtattaccacaagaatgatatcatcttcatatttagatcttttttgggtaaagcttgagattctctaaatatagagaaatcagaagaaaaaaaaaccgtgttttggtggttttgatttctagcctccacaataactttgacggcgtcgacaagtctaacggacaccaagcagcgaaccaccagcgccgagccaagcgaagcagacggccgagacgttgacaccttcggcgcggcatctctcgagagttccgctccggcgctccacctccaccgctggcggtttcttattccgttccgttccgcctcctgctctgctcctctccacaccacacggcacgaaaccgttacggcaccggcagcacccagcacgggagaggggattcctttcccaccgttccttccctttccgccccgccgctataaatagccagccccatccccagcttttttccccaatctcatctcctctctcctgttgttcggagcacacgcacaatccgatcgatccccaaatccccttcgtctctcctcgcgagcctcgtggatcccagcttcaaggtacggcgatcgatcatcccccctccttctctctaccttcttttctctagactacatcggatggcgatccatggttagggcctgctagtttcccttcctgttttgtcgatggctgcgaggcacaatagatctgatggcgttatgacggctaacttgtcatgttgttgcgatttatagtccctttaggagatcagtttaatttctcggatggttcgagatcggtggtccatggttagtaccctaagatccgcgctgttagggttcgtagatggaggcgacctgttctgattgttaacttgtcagtacctgggaaatcctgggatggttctagctcgtccgcagatgagatcgatttcatgatcctctgtatcttgtttcgttgcctaggttccgtctaatctatccgtggtatgatgtagatgttttgatcgtgctaactacgtcttgtaaagttaattgtcaggtcataatttttagcatgcctttttttttgtttggttttgtctaattgggctgtcgttctagatcagagtagaagactgttccaaactacctgctggatttattgaacttggatctgtatgtgtgtcacatatcttcataaattcatgattaagatggattgaaatatcttttatctttttggtatggatagttctatatgttggtgtggctttgttagatgtatacatgcttagatacatgaagcaacgtgctgctactgtttagtaattgctgttcatttgtctaataaacagataaggatatgtatttatgttgctgttggttttgctggtactttgttggatacaaatgcttcaatacagaaaacagcatgctgctacgatttaccatttatctaatcttatcatatgtctaatctaataaacaaacatgcttttaaattatcttcatatgcttggatgatggcatacacagcggctatgtgtggttttttaaatacccagcatcatgggcatgcatgacactgctttaatatgctttttatttgcttgagactgtttcttttgtttatactgaccctttagttcggtgactcttctgcaggtcgactttaacttagcctaggatccatggcccagtccaagcacggcctgaccaaggagatgaccatgaagtaccgcatggagggctgcgtggacggccacaagttcgtgatcaccggcgagggcatcggctaccccttcaagggcaagcaggccatcaacctgtgcgtggtggagggcggccccttgcccttcgccgaggacatcttgtccgccgccttcatgtacggcaaccgcgtgttcaccgagtacccccaggacatcgtcgactacttcaagaactcctgccccgccggctacacctgggaccgctccttcctgttcgaggacggcgccgtgtgcatctgcaacgccgacatcaccgtgagcgtggaggagaactgcatgtaccacgagtccaagttctacggcgtgaacttccccgccgacggccccgtgatgaagaagatgaccgacaactgggagccctcctgcgagaagatcatccccgtgcccaagcagggcatcttgaagggcgacgtgagcatgtacctgctgctgaaggacggtggccgcttgcgctgccagttcgacaccgtgtacaaggccaagtccgtgccccgcaagatgcccgactggcacttcatccagcacaagctgacccgcgaggaccgcagcgacgccaagaaccagaagtggcacctgaccgagcacgccatcgcctccggctccgccttgccctccggactcagatctcgatagggtaccaatggccagttaacagatccagctgctgctgttctagggttcacaagtctgcctatttgtcttccccaatggagctatggttgtctggtctggtccttggtcgtgtcccgtttcattgtgtactatttacctgtaatgtgtatccttaagtctggtttgatggtgtctgaaacgttttgctgtggtagagcagcatggaagaactataatgaataagtgatccctaatcattgtgtccaaattttgcttctgctatacccttttgtgctgtttcttatgttttgcttaaaaatttgatctgacaaacaaatttgtctaaattatgctcttgttctgactgtgtactgtacacatttgtattgctaccggtttggcacatagttttctctttgattgcagatcaaacccttctgattgcagattgcttggctatggctgatgtgctcactgttcttctttagcttgtatattgctgatggtggcttggctacggctgaaaaagttgctgctgcgccgacttggcaactgttgctccagtaatgctttgtcctctcttcctagccgccgacttggcacttggcagctgttgctcctgtaatgcgttgttatctcttatctcttgagatgtactatgattttgaggctgtttgacttgtgccagattgccagtgctgatgctatattatctcaggtttttatgctagtatatgttttactgtgtgctgcctgtgtcgagttacgtaatctattgaaccgctatgcgtgttgatgccctgttgttgcttgccagattgatgcccctgttgcttgcagcttgcaagctgtagtgaaatcctaaaattcgaaaccaaatctattctgaacttttgaagatctgtgatgtccggaagaaaagattcaaacagataaacgggactctccagaatctataaaataaatgatcgacaaacgctttgctttggtaggcttcctagttagttagcggaccgaagcttcggtccgggcctagaaggccagcttcggccgcccctcggtaccctgggatctgcccttactttaacgcctctaaccaacacccctttatctttataaggaacaataaacagaatttgccccactgttctaaatcacctaataatatccccagctaaaaacaataaaggtttcctagaattaagacaagcatgactgttcctccaggagggtttggaacattgttgcagtcttgcagatacgggcgaagggtgagaaacagagcggagggctggaggtgacctcggtagtcgacgccggagttgagcttgacaacgacggggcggcccctgatggacttgaggaagtccgatggcgtcttcaccgtcccgccggcgcccgaggcgggcctgtcgctgccgccgccgccgctgctcatcttgcgcgctgtgcccccggcggtgtccctgtgttgcggatcgcgggtgggccaggtggatgcgagggcgacccgtttggactccggccggagccgccggatccctggtcggtgtcagtgccgtttactctgggccccacgtgtcagtaccgtctgtagatgacaacaacccgtcgtccacagtcatgtccaaaatatcctttcttcttttttttcgattcggatatctatcttccttttttttttccaaaaatcttcttgacgcaccagcgcgcacgtttgtggtaaacgccgacacgtcggtcccacgtcgatagaccccacccaccagtgagtagcgtgtacgtattcgggggtgacggacgtgtcgccgtcgtcttgctagtcccattcccatctgagccacacatctctgaacaaaaaaaaggagggaggcctccacgcacatccccctccgtgccacccgccccaaaccctcgcgccgcctccgagacagccgccgcaaccatggccaccgccgccgccgcgtctaccgcgctcactggcgccactaccgctgcgcccaaggcgaggcgccgggcgcacctcctggccacccgccgcgccctcgccgcgcccatcaggtgctcagcggcgtcacccgccatgccgatggctcccccggccaccccgctccggccgtggggccccaccgagccccgcaagggtgctgacatcctcgtcgagtccctcgagcgctgcggcgtccgcgacgtcttcgcctaccccggcggcgcgtccatggagatccaccaggcactcacccgctcccccgtcatcgccaaccacctcttccgccacgagcaaggggaggcctttgccgcctccggctacgcgcgctcctcgggccgcgtcggcgtctgcatcgccacctccggccccggcgccaccaacctagtctccgcgctcgccgacgcgctgctcgattccgtccccatggtcgccatcacgggacaggtggcgcgacgcatgattggcaccgacgccttccaggagacgcccatcgtcgaggtcacccgctccatcaccaagcacaactacctggtcctcgacgtcgacgacatcccccgcgtcgtgcaggaggctttcttcctcgcctcctctggtcgaccagggccggtgcttgtcgacatccccaaggacatccagcagcagatggcggtgcctgtctgggacaagcccatgagtctgcctgggtacattgcgcgccttcccaagccccctgcgactgagttgcttgagcaggtgctgcgtcttgttggtgaatcgcggcgccctgttctttatgtgggcggtggctgcgcagcatctggtgaggagttgcgacgctttgtggagctgactggaatcccggtcacaactactcttatgggcctcggcaacttccccagcgacgacccactgtctctgcgcatgctaggtatgcatgggacggtgtatgcaaattatgcagtggataaggccgatctgttgcttgcacttggtgtgcggtttgatgatcgcgtgacagggaagattgaggcttttgcaagcagggctaagattgtgcacgttgatattgatccggctgagattggcaagaacaagcagccacatgtgtccatctgtgcagatgttaagcttgctttgcagggcatgaatgctcttcttgaaggaagcacatcaaagaagagctttgactttggctcatggaacgatgagttggatcagcagaagagggaattcccccttgggtataaaacatctaatgaggagatccagccacaatatgctattcaggttcttgatgagctgacgaaaggcgaggccatcatcggcacaggtgttgggcagcaccagatgtgggcggcacagtactacacttacaagcggccaaggcagtggttgtcttcagctggtcttggggctatgggatttggtttgccggctgctgctggtgcttctgtggcaaacccaggtgtcactgttgttgacatcgatggagatggtagctttctcatgaacgttcaggagctagctatgatccgaattgagaacctcccagtgaaggtctttgtgctaaacaaccagcacctggggatggtggtgcagttggaggacaggttctataaggccaacagagcgcacacatacttgggaaacccagagaatgaaagtgagatatatccagatttcgtgacgatcgccaaagggttcaacattccagcggtccgtgtgacaaagaagaacgaagtccgcgcagcgataaagaagatgctcgagactccagggccgtacctcttggatataatcgtcccacaccaggagcatgtgttgcctatgatccctagtggtggggctttcaaggatatgatcctggatggtgatggcaggactgtgtactgactagctagtcagttaacagatcctctagtgccgtgggtcgtttaagctgccgctgtacctgtgtcgtctggtgccttctggtgtacctgggaggttgtcgtctatcaagtatctgtggttggtgtcatgagtcagtgagtcccaatactgttcgtgtcctgtgtgcattatacccaaaactgttatgggcaaatcatgaataagcttgatgttcgaacttaaaagtctctgctcaatatggtattatggttgtttttgttcgtctcctaatatttgcctgggatcaaattttattggctggtgttcatttgacctccatgttcttgctaggctccattttttactctacagccataatatgtttgattgtttggtttgttctttgttgtacacctggttctgtcgagcttagttttcgacactggcttacagcttaacatgttgctattttattgggttctgattgctattttattgggttctgattgctagtttttgctgaatccaaaaaccatgttatttatttaagcgatccaggttattattatgatggtggctaagtttttttttttccaagggtaaattttctggattctccagtgtttctgtggccgaattcaatcactagagtcgacctgcaggccggtccgggcctagaaggcccgcgccacttacgcttgattccgatgacttcgtaggttcctagctcaagccgctcgtgtccaagcgtcacttacgattagctaatgattacggcatctaggaccgactagttcttatgtgcttctagtctccaaatgtggttgatagttattttgctctaagatcaacagtaatgaagtataaatcatcgttgtggtgtgctactcggttaattgagcattaacacacacaaacatgacgaggatggtataatctccaaaaatgtgtactttgttaggtgggaccctatagccttgattaatgtgctatgttaggcatgcctggaaacgtgtgacgcatatgttttgtgaacctgttgatattatatgtgcttttatattaccatattttattaaaatactaatatttattactagtaagatataacattctatctagcttaaaaactaaccataaatattccataataactagatttaccaaactaatatactaaatatacataataaatacaaaattaacaagacaataatcaatatttatgagcttaatatatttagacattatggttggtcgacgataatcatgctaacttttcgtaattgcttgattgaaatatgcttagaataatgcctctttgttctacatggcaaatagggaccattatggtgtaacaccctgggaaccacaaacaccccgaaatgctactaaactacacaactaaccttcatatataaaatttcgacagcatctcctttgaaaatttgcatagacgtggaagcaacagagtataaacagatctgcgtttaaacgtgcaagcgctactagacaattcagtacattaaaaacgtccgcaatgtgttattaagttgtctaagcgtcaatttgtttacaccacaatatatcctgcca

SEQ ID NO: 252 - DNA, 21556 bp, Artificial Sequence
  PHP97449
gtttacccgccaatatatcctgtcaaacactgcggccgcacttgaccgcggatggagccggagctgtggtgaggccatcgacgggaggtgggggagaacacagtctcagtgttctttgtgagtccgcaaggtttttagcttttctgtattaattaaggttgctgttggctgtagaatacggtcgtggaagagctgtatcggtagctactacgtaagctattatatactggaagtctggagctcgtcgatctccggtcgtcttcctccatttctcctcgtcttgctttgactgctgctaccatttgcttctgttttctgatgaagcatgccatgtcggccaccagtgtttgtgtggtttttgcagggaatggctttcaagtgctgtgattgaatggccctcgtcgtcctcggctgagctcacatggacgcgtcatgtgagtgagatatatgatcatatgatgagtggggttcgggtgagtgcgtacttgaagtaggatcccgctttcactcattcattcattggcctttaaaccgggaaattttcgcgaggagatggagggaagcaagcagggtgacgagtgcagagtgccgcgagcgctttgtcaaaaggcaccgccgtaggcaaaaaaatcaatggccctgactgactcgatggtagtactactgtagagactagagagggttgctccccatatcttcgtgtgacttttactccagcattgcatttccgtcattgagacgttaattaatagcagctttcgggacagatgactgtggccatgtttcgtcacggccgcttcgtgccagctgggggtactatagtactgtgattttgttagtaaaaactttcattaggccaccattgacgaccgggccttcgcttttgctgcgctaattaaccatttcccggcgaccgaagggaacatgaacatgccccgacacatgagggcatgaggactagtgttctccctgtcgttcgttgacttgactagtgatagtttaaacgctcttcaactggaagagcggttactaccggttcactagctagctgctaatcgagctagttaccctatgaggtgacatgaagcgctcacggttactatgacggttagcttcacgactgttggtggcagtagcgtacgacttagctatagttccggacttacctagctaataacttcgtatagcatacattatacgaagttatggttaccgaattcgagctcggtaccctggcggaccgaagcttgcatgcctgcagtgcagcgtgacccggtcgtgcccctctctagagataatgagcattgcatgtctaagttataaaaaattaccacatattttttttgtcacacttgtttgaagtgcagtttatctatctttatacatatatttaaactttactctacgaataatataatctatagtactacaataatatcagtgttttagagaatcatataaatgaacagttagacatggtctaaaggacaattgagtattttgacaacaggactctacagttttatctttttagtgtgcatgtgttctcctttttttttgcaaatagcttcacctatataatacttcatccattttattagtacatccatttagggtttagggttaatggtttttatagactaatttttttagtacatctattttattctattttagcctctaaattaagaaaactaaaactctattttagtttttttatttaataatttagatataaaatagaataaaataaagtgactaaaaattaaacaaataccctttaagaaattaaaaaaactaaggaaacatttttcttgtttcgagtagataatgccagcctgttaaacgccgtcgacgagtctaacggacaccaaccagcgaaccagcagcgtcgcgtcgggccaagcgaagcagacggcacggcatctctgtcgctgcctctggacccctctcgagagttccgctccaccgttggacttgctccgctgtcggcatccagaaattgcgtggcggagcggcagacgtgagccggcacggcaggcggcctcctcctcctctcacggcaccggcagctacgggggattcctttcccaccgctccttcgctttcccttcctcgcccgccgtaataaatagacaccccctccacaccctctttccccaacctcgtgttgttcggagcgcacacacacacaaccagatccgcccatggcggccaatgcgggcggcggtggagcgggaggaggcagcggcagcggcagcgtggctgcgccggcggtgtgccgccccagcggctcgcggtggacgccgacgccggagcagatcaggatgctgaaggagctctactacggctgcggcatccggtcgcccagctcggagcagatccagcgcatcaccgccatgctgcggcagcacggcaagatcgagggcaagaacgtcttctactggttccagaaccacaaggcccgcgagcgccagaagcgccgcctcaccagcctcgacgtcaacgtgcccgccgccggcgcggccgacgccaccaccagccaactcggcgtcctctcgctgtcgtcgccgccgccttcaggcgcggcgcctccctcgcccaccctcggcttctacgccgccggcaatggcggcggatcggctgtgctgctggacacgagttccgactggggcagcagcggcgctgctatggccaccgagacatgcttcctgcaggactacatgggcgtgacggacacgggcagctcgtcgcagtggccacgcttctcgtcgtcggacacgataatggcggcggccgcggcgcgggcggcgacgacgcgggcgcccgagacgctccctctcttcccgacctgcggcgacgacggcggcagcggtagcagcagctacttgccgttctggggtgccgcgtccacaactgccggcgccacttcttccgttgcgatccaacagcaacaccagctgcaggagcagtacagcttttacagcaacagcaacagcacccagctggccggcaccggcaaccaagacgtatcggcaacagcagcagcagccgccgccctggagctgagcctcagctcatggtgctccccttaccctgctgcagggagtatgtgagagcaacgcgagctgccactgctcttcactgatgtctctggaatggaaggaggaggaagtgagaacagatcattcgacaaagcagcattagtccgttgatcggtggaagaccactcgtcagtgttgagttgaatgtttgatcaataaaatacggcaatgctgtaagggttgttttttatgccattgataatacactgtactgttcagttgttgaactctatttcttagccatgccaagtgcttttcttattttgaataacattacagcaaaaagttgaaagacaaaaaaaaaaacccccgaacagagtgctttgggtcccaagcttctttagactgtgttcggcgttccccctaaatttctccccctatatctcactcacttgtcacatcagcgttctctttccccctatatctccacgctctacagcagttccacctatatcaaacctctataccccaccacaacaatattatatactttcatcttcaactaactcatgtaccttccaatttttttctactaataattatttacgtgcacagaaacttagcaaggagagagagagcgggaatttaaatgctcggcgttaggcttttagtccgctaggtggctagaccgaggttaggacgctagttcactaggggcctagtggtgttttaagacgtcacggtcaccacgcgtggaccgaagcttgcatgcctgcagtgcagcgtgacccggtcgtgcccctctctagagataatgagcattgcatgtctaagttataaaaaattaccacatattttttttgtcacacttgtttgaagtgcagtttatctatctttatacatatatttaaactttactctacgaataatataatctatagtactacaataatatcagtgttttagagaatcatataaatgaacagttagacatggtctaaaggacaattgagtattttgacaacaggactctacagttttatctttttagtgtgcatgtgttctcctttttttttgcaaatagcttcacctatataatacttcatccattttattagtacatccatttagggtttagggttaatggtttttatagactaatttttttagtacatctattttattctattttagcctctaaattaagaaaactaaaactctattttagtttttttatttaataatttagatataaaatagaataaaataaagtgactaaaaattaaacaaataccctttaagaaattaaaaaaactaaggaaacatttttcttgtttcgagtagataatgccagcctgttaaacgccgtcgacgagtctaacggacaccaaccagcgaaccagcagcgtcgcgtcgggccaagcgaagcagacggcacggcatctctgtcgctgcctctggacccctctcgagagttccgctccaccgttggacttgctccgctgtcggcatccagaaattgcgtggcggagcggcagacgtgagccggcacggcaggcggcctcctcctcctctcacggcaccggcagctacgggggattcctttcccaccgctccttcgcacgtaagcgcttacgcaccgaacaacgtaagcgcttacgcaccgaacaacgtaagcgcttacgctttcccttcctcgcccgccgtaataaatagacaccccctccacaccctctttccccaacctcgtgttgttcggagcgcacacacacacaaccagatctcccccaaatccacccgtcggcacctccgcttcaaggtacgccgctcgtcctcccccccccccctctctaccttctctagatcggcgttccggtccatgcatggttagggcccggtagttctacttctgttcatgtttgtgttagatccgtgtttgtgttagatccgtgctgctagcgttcgtacacggatgcgacctgtacgtcagacacgttctgattgctaacttgccagtgtttctctttggggaatcctgggatggctctagccgttccgcagacgggatcgatttcatgattttttttgtttcgttgcatagggtttggtttgcccttttcctttatttcaatatatgccgtgcacttgtttgtcgggtcatcttttcatgcttttttttgtcttggttgtgatgatgtggtctggttgggcggtcgttctagatcggagtagaattctgtttcaaactacctggtggatttattaattttggatctgtatgtgtgtgccatacatattcatagttacgaattgaagatgatggatggaaatatcgatctaggataggtatacatgttgatgcgggttttactgatgcatatacagagatgctttttgttcgcttggttgtgatgatgtggtgtggttgggcggtcgttcattcgttctagatcggagtagaatactgtttcaaactacctggtgtatttattaattttggaactgtatgtgtgtgtcatacatcttcatagttacgagtttaagatggatggaaatatcgatctaggataggtatacatgttgatgtgggttttactgatgcatatacatgatggcatatgcagcatctattcatatgctctaaccttgagtacctatctattataataaacaagtatgttttataattattttgatcttgatatacttggatgatggcatatgcagcagctatatgtggatttttttagccctgccttcatacgctatttatttgcttggtactgtttcttttgtcgatgctcaccctgttgtttggtgttacttctgcaggtcgactttaacttagcctaggatccatggccactgtgaacaactggctcgctttctccctctccccgcaggagctgccgccctcccagacgacggactccacactcatctcggccgccaccgccgaccatgtctccggcgatgtctgcttcaacatcccccaagattggagcatgaggggatcagagctttcggcgctcgtcgcggagccgaagctggaggacttcctcggcggcatctccttctccgagcagcatcacaaggccaactgcaacatgatacccagcactagcagcacagtttgctacgcgagctcaggtgctagcaccggctaccatcaccagctgtaccaccagcccaccagctcagcgctccacttcgcggactccgtaatggtggcttcctcggccggtgtccacgacggcggtgccatgctcagcgcggccgccgctaacggtgtcgctggcgctgccagtgccaacggcggcggcatcgggctgtccatgattaagaactggctgcggagccaaccggcgcccatgcagccgagggtggcggcggctgagggcgcgcaggggctctctttgtccatgaacatggcggggacgacccaaggcgctgctggcatgccacttctcgctggagagcgcgcacgggcgcccgagagtgtatcgacgtcagcacagggtggagccgtcgtcgtcacggcgccgaaggaggatagcggtggcagcggtgttgccggcgctctagtagccgtgagcacggacacgggtggcagcggcggcgcgtcggctgacaacacggcaaggaagacggtggacacgttcgggcagcgcacgtcgatttaccgtggcgtgacaaggcatagatggactgggagatatgaggcacatctttgggataacagttgcagaagggaagggcaaactcgtaagggtcgtcaagtctatttaggtggctatgataaagaggagaaagctgctagggcttatgatcttgctgctctgaagtactggggtgccacaacaacaacaaattttccagtgagtaactacgaaaaggagctcgaggacatgaagcacatgacaaggcaggagtttgtagcgtctctgagaaggaagagcagtggtttctccagaggtgcatccatttacaggggagtgactaggcatcaccaacatggaagatggcaagcacggattggacgagttgcagggaacaaggatctttacttgggcaccttcagcacccaggaggaggcagcggaggcgtacgacatcgcggcgatcaagttccgcggcctcaacgccgtcaccaacttcgacatgagccgctacgacgtgaagagcatcctggacagcagcgccctccccatcggcagcgccgccaagcgcctcaaggaggccgaggccgcagcgtccgcgcagcaccaccacgccggcgtggtgagctacgacgtcggccgcatcgcctcgcagctcggcgacggcggagccctggcggcggcgtacggcgcgcactaccacggcgccgcctggccgaccatcgcgttccagccgggcgccgccagcacaggcctgtaccacccgtacgcgcagcagccaatgcgcggcggcgggtggtgcaagcaggagcaggaccacgcggtgatcgcggccgcgcacagcctgcaggacctccaccacctgaacctgggcgcggccggcgcgcacgactttttctcggcagggcagcaggccgccgccgctgcgatgcacggcctgggtagcatcgacagtgcgtcgctcgagcacagcaccggctccaactccgtcgtctacaacggcggggtcggcgacagcaacggcgccagcgccgtcggcggcagtggcggtggctacatgatgccgatgagcgctgccggagcaaccactacatcggcaatggtgagccacgagcaggtgcatgcacgggcctacgacgaagccaagcaggctgctcagatggggtacgagagctacctggtgaacgcggagaacaatggtggcggaaggatgtctgcatgggggactgtcgtgtctgcagccgcggcggcagcagcaagcagcaacgacaacatggccgccgacgtcgggcatggcggcgcgcagctcttcagtgtctggaacgacacttaagcgtacctagtggtacctgacatcttatagtctgcaacctctcgtgtctgaattcctatctttatcaagtgttattgcttccacgactataggacagctttcgtcgaaagcttttgctcatgtgatctcgaaggattcatctagtctgatttttcgtgacttgtatcggttttattggattcatccaacatatatcaataaaaaatgagttgtgtttcctttcttcctagttcagttaaaattatttccctcctgcgcttgtgctgtaattgtctgtgtacctgttgtttgtgactgtgttagttcccttggatatgatttcgtatttgatatgtacatggagatagcttagcttcattattggagtatgaagttagtatgacatagtcactctcctggaaaattgacactgcaaaccatatttttattctgaaccacaaatcctagtcagtccgctggcatatgccgtccgtttgctgaatccagaacgtgggtttggagatgtacggctgagatgcctctatgcgaaggggatttcgtggtgaaacgagatgggagtagagcaacgcccgtggaagatgcttcaaacttccacacttttgagcaacgatcggcagtagtaaggtagacgatttcaagatcaaagcatatgaagataaacaacatcaacaacaaaatttgttggggttctatagagagaaacagagctacatacatacactgttttgtatctaccatctgagatgatgaaaagatgaaaaactaaagaatgccccggcgccaacgccaggacacgccgcgcgcgcgtcacccgagccatctcttgacccagccggcgctgtatatttacacacgttgcagcatcgatcaccacctgttcgatcgcgtcgccgtcaccggcgcgccgcgacttattgaactagtctagggcgcggctaacaacctagcttagattgccttgtctaaacccttaaggctaacgcgccactctagattcttatgtgcttctagtctccaaatgtggttgatagttattttgctctaagatcaacagtaatgaagtataaatcatcgttgtggtgtgctactcggttaattgagcattaacacacacaaacatgacgaggatggtataatctccaaaaatgtgtactttgttaggtgggaccctatagccttgattaatgtgctatgttaggcatgcctggaaacgtgtgacgcatatgttttgtgaacctgttgatattatatgtgcttttatattaccatattttattaaaatactaatatttattactagtaagatataacattctatctagcttaaaaactaaccataaatattccataataactagatttaccaaactaatatactaaatatacataataaatacaaaattaacaagacaataatcaatatttatgagcttaatatatttagacattatggttggtcgacgataatcatgctaacttttcgtaattgcttgattgaaatatgcttagaataatgcctctttgttctacatggcaaatagggaccattatggtgtaacaccctgggaaccacaaacaccccgaaatgctactaaactacacaactaaccttcatatataaaatttcgacagcatctcctttgaaaatttgcatagacgtggaagcaacagagtataaacagatatcatgataagaaaacatactagacattaataatctgctagaaatgggaagaatcgagctcggtaccctggttcacaaactcaatacaacacacagtggagtagggtattacgctccggcggcccgaaccactctaaatccttgtgtcctcgtgtgctcttccaccattaatgactgtaattgcagggacacgaagagttgtagcgcttttgccaacaagatccgctatatgctagtagagtggaacctgcacagcaacaagcatccaataatctgagaataagaattatgtgtggtgatggttctcatctctgcaactcgccattttcgcgagagaaccaaatccaagttggtgaagatcatgatttgggctcatgggctggcatagtagctattacctttgcaattgtggttcgaatctatccgatattctccttttcagggagagctaatgcttatgcttattgggtattttggtttgacactgcttcacgcccaaaaaaaggcaactatgtctgagttggatatggcccaaaaaaaggcagctatgtctgagttggatatggaagtcttctttcgtttagggtgaagtaagaccaagctcatgagcttattatcttaggtcggaacaaattagttgataggcatggcacatttatcaaattataatgattttaacagaaaagcaacacctctttttcagcagcaccagctttgcaagctgcaattgacactccaagcatagtatttgctccaaactcagcctgcatttcgcacaatatcatatctatttccatttggataaaatatattttccagaaatatgggaacagaatcaagatacagaaaaaagttgtggtagtagtggtaagtggaaacacaagtacagtgaaaagatagcattatttctgaacagtcaaattaaccgaaataagtagtatcacatactgcccctaaattgactacacccaatgtaaagaattgcttgagcatattgagccatcagttgtttgtttgtgtaacggatttgacaatgcagagttcaggagcaaaaaaccgcaaaggagagaaagagggaaaggatctcctagtatcccaccttgtggcgcgccctgtcaagtgcatgatggcctggtcgatctgcgtctgctgctgcggttccatcccaacgagtgcctccgacaccttgtcgttgatcacccgcaccgcgtaggcgacccccctggcgaggaacttccgcctctcggaggccccggccgcgtcggcggcggcgccctcgagcgcgcccacgctagccgtagatgctcggtgcacggccttgttggtgtgcaactcgacctcaacggccggtgcgctacgcccgtcaaggatctggcgcgcccgcaccctcgtgatcacggtgggcgcctcccgcctcatgtggccgacgatgaaaagcgccgggttaggggccttggcgcgcaccgccgtattcagggcctcctcgctcttgcgcgagagcaggtgcttccccaggtactcctgcactgacaaggctgccacagcggtggaatttgtcctcacgacttcgccacgtcgtcctcacctccctggcttcccacgactccgccgtatcgaggtgctcggtgggtcgtcttaatccgaagtccgaactaggaagacgagacagagaggtctgaggaatgggcctcgtttgatgttgagctgaattatttttccagcataagcccaggtcttggtccatgaacaaaattactagaaacccagcccagtactacgatctaaaagagggactgccactggatagctctctctagcattctccacgctccaatacagcggcgtcgtgtctatccgggtctatccgcgaacacgtgagaactctccagaaactgctttctcctccacttcatctctctcgctttccctctataaaaagaccccttctaggaattgagggagacagcaagcaccaagcagcgatccgaagctcaatcaattcactcaaacctcttccccaaatcttcgattagatcttcgttgacaagaagactagaaccgaacctgacatgtccaacctgctcacggttcaccagaaccttccggctcttccagtggacgcgacgtccgatgaagtcaggaagaacctcatggacatgttccgcgacaggcaagcgttcagcgagcacacctggaagatgctgctctccgtctgccgctcctgggctgcatggtgcaagctgaacaacaggaagtggttccccgctgagcccgaggacgtgagggattaccttctgtacctgcaagcgcgaggtttgtttctgcttctacctttgatatatatataataattatcattaattagtagtaatataatatttcaaatatttttttcaaaataaaagaatgtagtatatagcaattgcttttctgtagtttataagtgtgtatattttaatttataacttttctaatatatgaccaaaacatggtgatgcctaggtctggcagtgaagaccatccagcaacaccttggacaactgaacatgcttcacaggcgctccggcctcccgcgccccagcgactcgaacgccgtgagcctcgtcatgcgccgcatcaggaaggaaaacgtcgatgccggcgaaagggcaaagcaggccctcgcgttcgagaggaccgatttcgaccaggtccgcagcctgatggagaacagcgacaggtgccaggacattaggaacctggcgttcctcggaattgcatacaacacgctcctcaggatcgcggaaattgcccgcattcgcgtgaaggacattagccgcaccgacggcggcaggatgcttatccacattggcaggaccaagacgctcgtttccaccgcaggcgtcgaaaaggccctcagcctcggagtgaccaagctcgtcgaacgctggatctccgtgtccggcgtcgcggacgacccaaacaactacctcttctgccgcgtccgcaagaacggggtggctgcccctagcgccaccagccaactcagcacgagggccttggaaggtattttcgaggccacccaccgcctgatctacggcgcgaaggatgacagcggtcaacgctacctcgcatggtccgggcactccgcccgcgttggagctgctagggacatggcccgcgccggtgtttccatccccgaaatcatgcaggcgggtggatggacgaacgtgaacattgtcatgaactacattcgcaaccttgacagcgagacgggcgcaatggttcgcctcctggaagatggtgactgaggtacccaacctagacttgtccatcttctggattggccaacttaattaatgtatgaaataaaaggatgcacacatagtgacatgctaatcactataatgtgggcatcaaagttgtgtgttatgtgtaattactagttatctgaataaaagagaaagagatcatccatatttcttatcctaaatgaatgtcacgtgtctttataattctttgatgaaccagatgcatttcattaaccaaatccatatacatataaatattaatcatatataattaatatcaattgggttagcaaaacaaatctagtctaggtgtgttttgcgatccgatatcgacgtctaaaaacggcccctaactaacgcttagttgcccgctagattagtcccccgttagtgcctagttagacacacgacgaactaggggctagccccgggataacttcgtatagcatacattatacgaagttatgaattccggaccgggttaccgaattcctgcccttaaggccaattgttcaagattcattcaacaattgaaacatctcccatgattaaatcagtataaggttgctatggtcttgcttgacaaagtttttttttgagggaatttcaactaaatttttgagtgaaactatcaaatactgattttaaaaaatttttataaaaggaagcgcagagataaaaggccatctatgctacaaaagtacccaaaaatgtaatcctaaagtatgaattgcattttttttttgtttggacgaaaggaaaggagtattaccacaagaatgatatcatcttcatatttagatcttttttgggtaaagcttgagattctctaaatatagagaaatcagaagaaaaaaaaaccgtgttttggtggttttgatttctagcctccacaataactttgacggcgtcgacaagtctaacggacaccaagcagcgaaccaccagcgccgagccaagcgaagcagacggccgagacgttgacaccttcggcgcggcatctctcgagagttccgctccggcgctccacctccaccgctggcggtttcttattccgttccgttccgcctcctgctctgctcctctccacaccacacggcacgaaaccgttacggcaccggcagcacccagcacgggagaggggattcctttcccaccgttccttccctttccgccccgccgctataaatagccagccccatccccagcttttttccccaatctcatctcctctctcctgttgttcggagcacacgcacaatccgatcgatccccaaatccccttcgtctctcctcgcgagcctcgtggatcccagcttcaaggtacggcgatcgatcatcccccctccttctctctaccttcttttctctagactacatcggatggcgatccatggttagggcctgctagtttcccttcctgttttgtcgatggctgcgaggcacaatagatctgatggcgttatgacggctaacttgtcatgttgttgcgatttatagtccctttaggagatcagtttaatttctcggatggttcgagatcggtggtccatggttagtaccctaagatccgcgctgttagggttcgtagatggaggcgacctgttctgattgttaacttgtcagtacctgggaaatcctgggatggttctagctcgtccgcagatgagatcgatttcatgatcctctgtatcttgtttcgttgcctaggttccgtctaatctatccgtggtatgatgtagatgttttgatcgtgctaactacgtcttgtaaagttaattgtcaggtcataatttttagcatgcctttttttttgtttggttttgtctaattgggctgtcgttctagatcagagtagaagactgttccaaactacctgctggatttattgaacttggatctgtatgtgtgtcacatatcttcataaattcatgattaagatggattgaaatatcttttatctttttggtatggatagttctatatgttggtgtggctttgttagatgtatacatgcttagatacatgaagcaacgtgctgctactgtttagtaattgctgttcatttgtctaataaacagataaggatatgtatttatgttgctgttggttttgctggtactttgttggatacaaatgcttcaatacagaaaacagcatgctgctacgatttaccatttatctaatcttatcatatgtctaatctaataaacaaacatgcttttaaattatcttcatatgcttggatgatggcatacacagcggctatgtgtggttttttaaatacccagcatcatgggcatgcatgacactgctttaatatgctttttatttgcttgagactgtttcttttgtttatactgaccctttagttcggtgactcttctgcaggtcgactttaacttagcctaggatccatggcccagtccaagcacggcctgaccaaggagatgaccatgaagtaccgcatggagggctgcgtggacggccacaagttcgtgatcaccggcgagggcatcggctaccccttcaagggcaagcaggccatcaacctgtgcgtggtggagggcggccccttgcccttcgccgaggacatcttgtccgccgccttcatgtacggcaaccgcgtgttcaccgagtacccccaggacatcgtcgactacttcaagaactcctgccccgccggctacacctgggaccgctccttcctgttcgaggacggcgccgtgtgcatctgcaacgccgacatcaccgtgagcgtggaggagaactgcatgtaccacgagtccaagttctacggcgtgaacttccccgccgacggccccgtgatgaagaagatgaccgacaactgggagccctcctgcgagaagatcatccccgtgcccaagcagggcatcttgaagggcgacgtgagcatgtacctgctgctgaaggacggtggccgcttgcgctgccagttcgacaccgtgtacaaggccaagtccgtgccccgcaagatgcccgactggcacttcatccagcacaagctgacccgcgaggaccgcagcgacgccaagaaccagaagtggcacctgaccgagcacgccatcgcctccggctccgccttgccctccggactcagatctcgatagggtaccaatggccagttaacagatccagctgctgctgttctagggttcacaagtctgcctatttgtcttccccaatggagctatggttgtctggtctggtccttggtcgtgtcccgtttcattgtgtactatttacctgtaatgtgtatccttaagtctggtttgatggtgtctgaaacgttttgctgtggtagagcagcatggaagaactataatgaataagtgatccctaatcattgtgtccaaattttgcttctgctatacccttttgtgctgtttcttatgttttgcttaaaaatttgatctgacaaacaaatttgtctaaattatgctcttgttctgactgtgtactgtacacatttgtattgctaccggtttggcacatagttttctctttgattgcagatcaaacccttctgattgcagattgcttggctatggctgatgtgctcactgttcttctttagcttgtatattgctgatggtggcttggctacggctgaaaaagttgctgctgcgccgacttggcaactgttgctccagtaatgctttgtcctctcttcctagccgccgacttggcacttggcagctgttgctcctgtaatgcgttgttatctcttatctcttgagatgtactatgattttgaggctgtttgacttgtgccagattgccagtgctgatgctatattatctcaggtttttatgctagtatatgttttactgtgtgctgcctgtgtcgagttacgtaatctattgaaccgctatgcgtgttgatgccctgttgttgcttgccagattgatgcccctgttgcttgcagcttgcaagctgtagtgaaatcctaaaattcgaaaccaaatctattctgaacttttgaagatctgtgatgtccggaagaaaagattcaaacagataaacgggactctccagaatctataaaataaatgatcgacaaacgctttgctttggtaggcttcctagttagttagcggaccgaagcttcggtccgggcctagaaggccagcttcggccgcccctcggtaccctgggatctgcccttactttaacgcctctaaccaacacccctttatctttataaggaacaataaacagaatttgccccactgttctaaatcacctaataatatccccagctaaaaacaataaaggtttcctagaattaagacaagcatgactgttcctccaggagggtttggaacattgttgcagtcttgcagatacgggcgaagggtgagaaacagagcggagggctggaggtgacctcggtagtcgacgccggagttgagcttgacaacgacggggcggcccctgatggacttgaggaagtccgatggcgtcttcaccgtcccgccggcgcccgaggcgggcctgtcgctgccgccgccgccgctgctcatcttgcgcgctgtgcccccggcggtgtccctgtgttgcggatcgcgggtgggccaggtggatgcgagggcgacccgtttggactccggccggagccgccggatccctggtcggtgtcagtgccgtttactctgggccccacgtgtcagtaccgtctgtagatgacaacaacccgtcgtccacagtcatgtccaaaatatcctttcttcttttttttcgattcggatatctatcttccttttttttttccaaaaatcttcttgacgcaccagcgcgcacgtttgtggtaaacgccgacacgtcggtcccacgtcgatagaccccacccaccagtgagtagcgtgtacgtattcgggggtgacggacgtgtcgccgtcgtcttgctagtcccattcccatctgagccacacatctctgaacaaaaaaaaggagggaggcctccacgcacatccccctccgtgccacccgccccaaaccctcgcgccgcctccgagacagccgccgcaaccatggccaccgccgccgccgcgtctaccgcgctcactggcgccactaccgctgcgcccaaggcgaggcgccgggcgcacctcctggccacccgccgcgccctcgccgcgcccatcaggtgctcagcggcgtcacccgccatgccgatggctcccccggccaccccgctccggccgtggggccccaccgagccccgcaagggtgctgacatcctcgtcgagtccctcgagcgctgcggcgtccgcgacgtcttcgcctaccccggcggcgcgtccatggagatccaccaggcactcacccgctcccccgtcatcgccaaccacctcttccgccacgagcaaggggaggcctttgccgcctccggctacgcgcgctcctcgggccgcgtcggcgtctgcatcgccacctccggccccggcgccaccaacctagtctccgcgctcgccgacgcgctgctcgattccgtccccatggtcgccatcacgggacaggtggcgcgacgcatgattggcaccgacgccttccaggagacgcccatcgtcgaggtcacccgctccatcaccaagcacaactacctggtcctcgacgtcgacgacatcccccgcgtcgtgcaggaggctttcttcctcgcctcctctggtcgaccagggccggtgcttgtcgacatccccaaggacatccagcagcagatggcggtgcctgtctgggacaagcccatgagtctgcctgggtacattgcgcgccttcccaagccccctgcgactgagttgcttgagcaggtgctgcgtcttgttggtgaatcgcggcgccctgttctttatgtgggcggtggctgcgcagcatctggtgaggagttgcgacgctttgtggagctgactggaatcccggtcacaactactcttatgggcctcggcaacttccccagcgacgacccactgtctctgcgcatgctaggtatgcatgggacggtgtatgcaaattatgcagtggataaggccgatctgttgcttgcacttggtgtgcggtttgatgatcgcgtgacagggaagattgaggcttttgcaagcagggctaagattgtgcacgttgatattgatccggctgagattggcaagaacaagcagccacatgtgtccatctgtgcagatgttaagcttgctttgcagggcatgaatgctcttcttgaaggaagcacatcaaagaagagctttgactttggctcatggaacgatgagttggatcagcagaagagggaattcccccttgggtataaaacatctaatgaggagatccagccacaatatgctattcaggttcttgatgagctgacgaaaggcgaggccatcatcggcacaggtgttgggcagcaccagatgtgggcggcacagtactacacttacaagcggccaaggcagtggttgtcttcagctggtcttggggctatgggatttggtttgccggctgctgctggtgcttctgtggcaaacccaggtgtcactgttgttgacatcgatggagatggtagctttctcatgaacgttcaggagctagctatgatccgaattgagaacctcccagtgaaggtctttgtgctaaacaaccagcacctggggatggtggtgcagttggaggacaggttctataaggccaacagagcgcacacatacttgggaaacccagagaatgaaagtgagatatatccagatttcgtgacgatcgccaaagggttcaacattccagcggtccgtgtgacaaagaagaacgaagtccgcgcagcgataaagaagatgctcgagactccagggccgtacctcttggatataatcgtcccacaccaggagcatgtgttgcctatgatccctagtggtggggctttcaaggatatgatcctggatggtgatggcaggactgtgtactgactagctagtcagttaacagatcctctagtgccgtgggtcgtttaagctgccgctgtacctgtgtcgtctggtgccttctggtgtacctgggaggttgtcgtctatcaagtatctgtggttggtgtcatgagtcagtgagtcccaatactgttcgtgtcctgtgtgcattatacccaaaactgttatgggcaaatcatgaataagcttgatgttcgaacttaaaagtctctgctcaatatggtattatggttgtttttgttcgtctcctaatatttgcctgggatcaaattttattggctggtgttcatttgacctccatgttcttgctaggctccattttttactctacagccataatatgtttgattgtttggtttgttctttgttgtacacctggttctgtcgagcttagttttcgacactggcttacagcttaacatgttgctattttattgggttctgattgctattttattgggttctgattgctagtttttgctgaatccaaaaaccatgttatttatttaagcgatccaggttattattatgatggtggctaagtttttttttttccaagggtaaattttctggattctccagtgtttctgtggccgaattcaatcactagagtcgacctgcaggccggtccgggcctagaaggcccgcgccacttacgcttgattccgatgacttcgtaggttcctagctcaagccgctcgtgtccaagcgtcacttacgattagctaatgattacggcatctaggaccgactagttcttatgtgcttctagtctccaaatgtggttgatagttattttgctctaagatcaacagtaatgaagtataaatcatcgttgtggtgtgctactcggttaattgagcattaacacacacaaacatgacgaggatggtataatctccaaaaatgtgtactttgttaggtgggaccctatagccttgattaatgtgctatgttaggcatgcctggaaacgtgtgacgcatatgttttgtgaacctgttgatattatatgtgcttttatattaccatattttattaaaatactaatatttattactagtaagatataacattctatctagcttaaaaactaaccataaatattccataataactagatttaccaaactaatatactaaatatacataataaatacaaaattaacaagacaataatcaatatttatgagcttaatatatttagacattatggttggtcgacgataatcatgctaacttttcgtaattgcttgattgaaatatgcttagaataatgcctctttgttctacatggcaaatagggaccattatggtgtaacaccctgggaaccacaaacaccccgaaatgctactaaactacacaactaaccttcatatataaaatttcgacagcatctcctttgaaaatttgcatagacgtggaagcaacagagtataaacagatctgcgtttaaacgtgcaagcgctactagacaattcagtacattaaaaacgtccgcaatgtgttattaagttgtctaagcgtcaatttgtttacaccacaatatatcctgcca

SEQ ID NO: 253 - DNA, 19703 bp, Artificial Sequence
  PHP98680
gtttacccgccaatatatcctgtcaaacactgcggccgcacttgaccgcggatggagccggagctgtggtgaggccatcgacgggaggtgggggagaacacagtctcagtgttctttgtgagtccgcaaggtttttagcttttctgtattaattaaggttgctgttggctgtagaatacggtcgtggaagagctgtatcggtagctactacgtaagctattatatactggaagtctggagctcgtcgatctccggtcgtcttcctccatttctcctcgtcttgctttgactgctgctaccatttgcttctgttttctgatgaagcatgccatgtcggccaccagtgtttgtgtggtttttgcagggaatggctttcaagtgctgtgattgaatggccctcgtcgtcctcggctgagctcacatggacgcgtcatgtgagtgagatatatgatcatatgatgagtggggttcgggtgagtgcgtacttgaagtaggatcccgctttcactcattcattcattggcctttaaaccgggaaattttcgcgaggagatggagggaagcaagcagggtgacgagtgcagagtgccgcgagcgctttgtcaaaaggcaccgccgtaggcaaaaaaatcaatggccctgactgactcgatggtagtactactgtagagactagagagggttgctccccatatcttcgtgtgacttttactccagcattgcatttccgtcattgagacgttaattaatagcagctttcgggacagatgactgtggccatgtttcgtcacggccgcttcgtgccagctgggggtactatagtactgtgattttgttagtaaaaactttcattaggccaccattgacgaccgggccttcgcttttgctgcgctaattaaccatttcccggcgaccgaagggaacatgaacatgccccgacacatgagggcatgaggactagtgttctccctgtcgttcgttgacttgactagtgatagtttaaacgctcttcaactggaagagcggttactaccggttcactagctagctgctaatcgagctagttaccctatgaggtgacatgaagcgctcacggttactatgacggttagcttcacgactgttggtggcagtagcgtacgacttagctatagttccggacttacctagcatcgagcagctggcttgtggggaccagacaaaaaaggaatggtgcagaattgttaggcgcacctaccaaaagcatctttgcctttattgcaaagataaagcagattcctctagtacaagtggggaacaaaataacgtggaaaagagctgtcctgacagcccactcactaatgcgtatgacgaacgcagtgacgaccacaaaactcgagcaacgagatcatgagccaatcaaagaggagtgatgtagacctaaagcaataatggagccatgacgtaagggcttacgcccatacgaaataattaaaggctgatgtgacctgtcggtctctcagaacctttactttttatgtttggcgtgtatttttaaatttccacggcaatgacgatgtgaccgtcgacccactaaaacattgctttgtcaaaagctaaaaaagatgatgcccgacagccacttgtgtgaagcatgagaagccggtccctccactaagaaaattagtgaagcatcttccagtggtccctccactcacagctcaatcagtgagcaacaggacgaaggaaatgacgtaagccatgacgtctaatcccagggccagcttgcatgcctgcagtgcagcgtgacccggtcgtgcccctctctagagataatgagcattgcatgtctaagttataaaaaattaccacatattttttttgtcacacttgtttgaagtgcagtttatctatctttatacatatatttaaactttactctacgaataatataatctatagtactacaataatatcagtgttttagagaatcatataaatgaacagttagacatggtctaaaggacaattgagtattttgacaacaggactctacagttttatctttttagtgtgcatgtgttctcctttttttttgcaaatagcttcacctatataatacttcatccattttattagtacatccatttagggtttagggttaatggtttttatagactaatttttttagtacatctattttattctattttagcctctaaattaagaaaactaaaactctattttagtttttttatttaataatttagatataaaatagaataaaataaagtgactaaaaattaaacaaataccctttaagaaattaaaaaaactaaggaaacatttttcttgtttcgagtagataatgccagcctgttaaacgccgtcgacgagtctaacggacaccaaccagcgaaccagcagcgtcgcgtcgggccaagcgaagcagacggcacggcatctctgtcgctgcctctggacccctctcgagagttccgctccaccgttggacttgctccgctgtcggcatccagaaattgcgtggcggagcggcagacgtgagccggcacggcaggcggcctcctcctcctctcacggcaccggcagctacgggggattcctttcccaccgctccttcgctttcccttcctcgcccgccgtaataaatagacaccccctccacaccctctttccccaacctcgtgttgttcggagcgcacacacacacaaccagatctcccccaaatccacccgtcggcacctccgcttcaaggtacgccgctcgtcctcccccccccccctctctaccttctctagatcggcgttccggtccatgcatggttagggcccggtagttctacttctgttcatgtttgtgttagatccgtgtttgtgttagatccgtgctgctagcgttcgtacacggatgcgacctgtacgtcagacacgttctgattgctaacttgccagtgtttctctttggggaatcctgggatggctctagccgttccgcagacgggatcgatttcatgattttttttgtttcgttgcatagggtttggtttgcccttttcctttatttcaatatatgccgtgcacttgtttgtcgggtcatcttttcatgcttttttttgtcttggttgtgatgatgtggtctggttgggcggtcgttctagatcggagtagaattctgtttcaaactacctggtggatttattaattttggatctgtatgtgtgtgccatacatattcatagttacgaattgaagatgatggatggaaatatcgatctaggataggtatacatgttgatgcgggttttactgatgcatatacagagatgctttttgttcgcttggttgtgatgatgtggtgtggttgggcggtcgttcattcgttctagatcggagtagaatactgtttcaaactacctggtgtatttattaattttggaactgtatgtgtgtgtcatacatcttcatagttacgagtttaagatggatggaaatatcgatctaggataggtatacatgttgatgtgggttttactgatgcatatacatgatggcatatgcagcatctattcatatgctctaaccttgagtacctatctattataataaacaagtatgttttataattattttgatcttgatatacttggatgatggcatatgcagcagctatatgtggatttttttagccctgccttcatacgctatttatttgcttggtactgtttcttttgtcgatgctcaccctgttgtttggtgttacttctgcaggtcgactctagaggatcaattcgctagcataacttcgtatagcatacattatacgaagttatccagatccaccatggccactgtgaacaactggctcgctttctccctctccccgcaggagctgccgccctcccagacgacggactccacactcatctcggccgccaccgccgaccatgtctccggcgatgtctgcttcaacatcccccaagattggagcatgaggggatcagagctttcggcgctcgtcgcggagccgaagctggaggacttcctcggcggcatctccttctccgagcagcatcacaaggccaactgcaacatgatacccagcactagcagcacagtttgctacgcgagctcaggtgctagcaccggctaccatcaccagctgtaccaccagcccaccagctcagcgctccacttcgcggactccgtaatggtggcttcctcggccggtgtccacgacggcggtgccatgctcagcgcggccgccgctaacggtgtcgctggcgctgccagtgccaacggcggcggcatcgggctgtccatgattaagaactggctgcggagccaaccggcgcccatgcagccgagggtggcggcggctgagggcgcgcaggggctctctttgtccatgaacatggcggggacgacccaaggcgctgctggcatgccacttctcgctggagagcgcgcacgggcgcccgagagtgtatcgacgtcagcacagggtggagccgtcgtcgtcacggcgccgaaggaggatagcggtggcagcggtgttgccggcgctctagtagccgtgagcacggacacgggtggcagcggcggcgcgtcggctgacaacacggcaaggaagacggtggacacgttcgggcagcgcacgtcgatttaccgtggcgtgacaaggcatagatggactgggagatatgaggcacatctttgggataacagttgcagaagggaagggcaaactcgtaagggtcgtcaagtctatttaggtggctatgataaagaggagaaagctgctagggcttatgatcttgctgctctgaagtactggggtgccacaacaacaacaaattttccagtgagtaactacgaaaaggagctcgaggacatgaagcacatgacaaggcaggagtttgtagcgtctctgagaaggaagagcagtggtttctccagaggtgcatccatttacaggggagtgactaggcatcaccaacatggaagatggcaagcacggattggacgagttgcagggaacaaggatctttacttgggcaccttcagcacccaggaggaggcagcggaggcgtacgacatcgcggcgatcaagttccgcggcctcaacgccgtcaccaacttcgacatgagccgctacgacgtgaagagcatcctggacagcagcgccctccccatcggcagcgccgccaagcgcctcaaggaggccgaggccgcagcgtccgcgcagcaccaccacgccggcgtggtgagctacgacgtcggccgcatcgcctcgcagctcggcgacggcggagccctggcggcggcgtacggcgcgcactaccacggcgccgcctggccgaccatcgcgttccagccgggcgccgccagcacaggcctgtaccacccgtacgcgcagcagccaatgcgcggcggcgggtggtgcaagcaggagcaggaccacgcggtgatcgcggccgcgcacagcctgcaggacctccaccacctgaacctgggcgcggccggcgcgcacgactttttctcggcagggcagcaggccgccgccgctgcgatgcacggcctgggtagcatcgacagtgcgtcgctcgagcacagcaccggctccaactccgtcgtctacaacggcggggtcggcgacagcaacggcgccagcgccgtcggcggcagtggcggtggctacatgatgccgatgagcgctgccggagcaaccactacatcggcaatggtgagccacgagcaggtgcatgcacgggcctacgacgaagccaagcaggctgctcagatggggtacgagagctacctggtgaacgcggagaacaatggtggcggaaggatgtctgcatgggggactgtcgtgtctgcagccgcggcggcagcagcaagcagcaacgacaacatggccgccgacgtcgggcatggcggcgcgcagctcttcagtgtctggaacgacactggctccggcgagggtcgcggttccctcctgacctgcggcgacgtggaggaaaaccccggtccgatggcggccaatgcgggcggcggtggagcgggaggaggcagcggcagcggcagcgtggctgcgccggcggtgtgccgccccagcggctcgcggtggacgccgacgccggagcagatcaggatgctgaaggagctctactacggctgcggcatccggtcgcccagctcggagcagatccagcgcatcaccgccatgctgcggcagcacggcaagatcgagggcaagaacgtcttctactggttccagaaccacaaggcccgcgagcgccagaagcgccgcctcaccagcctcgacgtcaacgtgcccgccgccggcgcggccgacgccaccaccagccaactcggcgtcctctcgctgtcgtcgccgccgccttcaggcgcggcgcctccctcgcccaccctcggcttctacgccgccggcaatggcggcggatcggctgtgctgctggacacgagttccgactggggcagcagcggcgctgctatggccaccgagacatgcttcctgcaggactacatgggcgtgacggacacgggcagctcgtcgcagtggccacgcttctcgtcgtcggacacgataatggcggcggccgcggcgcgggcggcgacgacgcgggcgcccgagacgctccctctcttcccgacctgcggcgacgacggcggcagcggtagcagcagctacttgccgttctggggtgccgcgtccacaactgccggcgccacttcttccgttgcgatccaacagcaacaccagctgcaggagcagtacagcttttacagcaacagcaacagcacccagctggccggcaccggcaaccaagacgtatcggcaacagcagcagcagccgccgccctggagctgagcctcagctcatggtgctccccttaccctgctgcagggagtatgtgagaggtaccgacaaagcagcattagtccgttgatcggtggaagaccactcgtcagtgttgagttgaatgtttgatcaataaaatacggcaatgctgtaagggttgttttttatgccattgataatacactgtactgttcagttgttgaactctatttcttagccatgccaagtgcttttcttattttgaataacattacagcaaaaagttgaaagacaaaaaaaaaaacccccgaacagagtgctttgggtcccaagcttctttagactgtgttcggcgttccccctaaatttctccccctatatctcactcacttgtcacatcagcgttctctttccccctatatctccacgctctacagcagttccacctatatcaaacctctataccccaccacaacaatattatatactttcatcttcaactaactcatgtaccttccaatttttttctactaataattatttacgtgcacagaaacttagcaaggagagagagagcgggaatttaaatgctcggcgttaggcttttagtccgctaggtggctagaccgaggttaggacgctagttcactaggggcctagtggtgttttaagagtcaccaccttgctagttggatattacctcttctcttcaaagtatccttgaacgctcaccggttatcaaatctctacactatagctctgtagtcttgctagatagttagttctttagctctctctagaggttcacaaactcaatacaacacacagtggagtagggtattacgctccggcggcccgaaccactctaaatccttgtgtcctcgtgtgctcttccaccattaatgactgtaattgcagggacacgaagagttgtagcgcttttgccaacaagatccgctatatgctagtagagtggaacctgcacagcaacaagcatccaataatctgagaataagaattatgtgtggtgatggttctcatctctgcaactcgccattttcgcgagagaaccaaatccaagttggtgaagatcatgatttgggctcatgggctggcatagtagctattacctttgcaattgtggttcgaatctatccgatattctccttttcagggagagctaatgcttatgcttattgggtattttggtttgacactgcttcacgcccaaaaaaaggcaactatgtctgagttggatatggcccaaaaaaaggcagctatgtctgagttggatatggaagtcttctttcgtttagggtgaagtaagaccaagctcatgagcttattatcttaggtcggaacaaattagttgataggcatggcacatttatcaaattataatgattttaacagaaaagcaacacctctttttcagcagcaccagctttgcaagctgcaattgacactccaagcatagtatttgctccaaactcagcctgcatttcgcacaatatcatatctatttccatttggataaaatatattttccagaaatatgggaacagaatcaagatacagaaaaaagttgtggtagtagtggtaagtggaaacacaagtacagtgaaaagatagcattatttctgaacagtcaaattaaccgaaataagtagtatcacatactgcccctaaattgactacacccaatgtaaagaattgcttgagcatattgagccatcagttgtttgtttgtgtaacggatttgacaatgcagagttcaggagcaaaaaaccgcaaaggagagaaagagggaaaggatctcctagtatcccaccttgtggcgcgccctgtcaagtgcatgatggcctggtcgatctgcgtctgctgctgcggttccatcccaacgagtgcctccgacaccttgtcgttgatcacccgcaccgcgtaggcgacccccctggcgaggaacttccgcctctcggaggccccggccgcgtcggcggcggcgccctcgagcgcgcccacgctagccgtagatgctcggtgcacggccttgttggtgtgcaactcgacctcaacggccggtgcgctacgcccgtcaaggatctggcgcgcccgcaccctcgtgatcacggtgggcgcctcccgcctcatgtggccgacgatgaaaagcgccgggttaggggccttggcgcgcaccgccgtattcagggcctcctcgctcttgcgcgagagcaggtgcttccccaggtactcctgcactgacaaggctgccacagcggtggaatttgtcctcacgacttcgccacgtcgtcctcacctccctggcttcccacgactccgccgtatcgaggtgctcggtgggtcgtcttaatccgaagtccgaactaggaagacgagacagagaggtctgaggaatgggcctcgtttgatgttgagctgaattatttttccagcataagcccaggtcttggtccatgaacaaaattactagaaacccagcccagtactacgatctaaaagagggactgccactggatagctctctctagcattctccacgctccaatacagcggcgtcgtgtctatccgggtctatccgcgaacacgtgagaactctccagaaactgctttctcctccacttcatctctctcgctttccctctataaaaagaccccttctaggaattgagggagacagcaagcaccaagcagcgatccgaagctcaatcaattcactcaaacctcttccccaaatcttcgattagatcttcgttgacaagaagactagaaccgaacctgacatgtccaacctgctcacggttcaccagaaccttccggctcttccagtggacgcgacgtccgatgaagtcaggaagaacctcatggacatgttccgcgacaggcaagcgttcagcgagcacacctggaagatgctgctctccgtctgccgctcctgggctgcatggtgcaagctgaacaacaggaagtggttccccgctgagcccgaggacgtgagggattaccttctgtacctgcaagcgcgaggtttgtttctgcttctacctttgatatatatataataattatcattaattagtagtaatataatatttcaaatatttttttcaaaataaaagaatgtagtatatagcaattgcttttctgtagtttataagtgtgtatattttaatttataacttttctaatatatgaccaaaacatggtgatgcctaggtctggcagtgaagaccatccagcaacaccttggacaactgaacatgcttcacaggcgctccggcctcccgcgccccagcgactcgaacgccgtgagcctcgtcatgcgccgcatcaggaaggaaaacgtcgatgccggcgaaagggcaaagcaggccctcgcgttcgagaggaccgatttcgaccaggtccgcagcctgatggagaacagcgacaggtgccaggacattaggaacctggcgttcctcggaattgcatacaacacgctcctcaggatcgcggaaattgcccgcattcgcgtgaaggacattagccgcaccgacggcggcaggatgcttatccacattggcaggaccaagacgctcgtttccaccgcaggcgtcgaaaaggccctcagcctcggagtgaccaagctcgtcgaacgctggatctccgtgtccggcgtcgcggacgacccaaacaactacctcttctgccgcgtccgcaagaacggggtggctgcccctagcgccaccagccaactcagcacgagggccttggaaggtattttcgaggccacccaccgcctgatctacggcgcgaaggatgacagcggtcaacgctacctcgcatggtccgggcactccgcccgcgttggagctgctagggacatggcccgcgccggtgtttccatccccgaaatcatgcaggcgggtggatggacgaacgtgaacattgtcatgaactacattcgcaaccttgacagcgagacgggcgcaatggttcgcctcctggaagatggtgactgaggtacccaacctagacttgtccatcttctggattggccaacttaattaatgtatgaaataaaaggatgcacacatagtgacatgctaatcactataatgtgggcatcaaagttgtgtgttatgtgtaattactagttatctgaataaaagagaaagagatcatccatatttcttatcctaaatgaatgtcacgtgtctttataattctttgatgaaccagatgcatttcattaaccaaatccatatacatataaatattaatcatatataattaatatcaattgggttagcaaaacaaatctagtctaggtgtgttttgcgatccgatatcgacgtctaaaaacggcccctaactaacgcttagttgcccgctagattagtcccccgttagtgcctagttagacacacgacgaactaggggctagtgccaccttgctagttggatattacctcttctcttcaaagtatccttgaacgctcaccggttatcaaatctctacactatagctctgtagtcttgctagatagttagttctttagctctcgcacgataacttcgtatagcatacattatacgaagttataacagcggaccgggttacgatctgcctcatcaacagctgcagtatttgctagccacatatatatacacagttcgacacgtagttataacggaagagagaagcaaagagagaggcagagtgactgcaaccatcagtagttctatgattttattttttaccgttttgttgctgtttcatggtgtttatttgattgtagggtggaggagaggtgaaagctgacagaagagagtgagcacacatggtgcctttcttgcatgatgtatgatcgagagagttcatgctcgaagctatgcgtgctcacttctctctctgtcagccattagaactcctctatctctcaatctcgatctccctctttctttgttgatctctcccatggtgatatttatttgcttcctacgtgttgtgttctctttcttcagcacacacacaacctgttcatgttaccttagggttaaagtttttgcactttgcgtgaagatggaaagacaaacagtagatgagttttttgaaggtttgacagaagagagtgagcacacacggtggtttcttaccatgagtgtcatgctaggagctgtgcgtgctcaccctctatctgtcagtcactcatcaagcccatctgtcttattagcttgtttccgctgctaataaatattctagaggtaccgttaacagatctactaactatctatactgtaataatgttgtatagccgccggatagctagctagtttagtcattcagcggcgatgggtaataataaagtgtcatccatccatcaccatgcgtggcaacgtgagcaatgacctgattgaacaaattgaaatgaaaagaagaaatatgttatatgtcaacgagatttcctcataatgccactgacgacgtgtgtccaagaaatgtatcagtgatacgtatattcacaatttttttatgacttatactcacaatttgtttttttactacttatactcacaatttgttgtgcgtaccataacaatttcgatcgaatatatatcagaaagttgacgaaagtaagctcactcaaaaagttaaatgggctgcggaagctgcgtcaggcccaagttttggctattctatccggtatccacgattttgatggctgagggacatatgttcgcttcgaattcctgcccttaaggccaattgttcaagattcattcaacaattgaaacatctcccatgattaaatcagtataaggttgctatggtcttgcttgacaaagtttttttttgagggaatttcaactaaatttttgagtgaaactatcaaatactgattttaaaaaatttttataaaaggaagcgcagagataaaaggccatctatgctacaaaagtacccaaaaatgtaatcctaaagtatgaattgcattttttttttgtttggacgaaaggaaaggagtattaccacaagaatgatatcatcttcatatttagatcttttttgggtaaagcttgagattctctaaatatagagaaatcagaagaaaaaaaaaccgtgttttggtggttttgatttctagcctccacaataactttgacggcgtcgacaagtctaacggacaccaagcagcgaaccaccagcgccgagccaagcgaagcagacggccgagacgttgacaccttcggcgcggcatctctcgagagttccgctccggcgctccacctccaccgctggcggtttcttattccgttccgttccgcctcctgctctgctcctctccacaccacacggcacgaaaccgttacggcaccggcagcacccagcacgggagaggggattcctttcccaccgttccttccctttccgccccgccgctataaatagccagccccatccccagcttttttccccaatctcatctcctctctcctgttgttcggagcacacgcacaatccgatcgatccccaaatccccttcgtctctcctcgcgagcctcgtggatcccagcttcaaggtacggcgatcgatcatcccccctccttctctctaccttcttttctctagactacatcggatggcgatccatggttagggcctgctagtttcccttcctgttttgtcgatggctgcgaggcacaatagatctgatggcgttatgacggctaacttgtcatgttgttgcgatttatagtccctttaggagatcagtttaatttctcggatggttcgagatcggtggtccatggttagtaccctaagatccgcgctgttagggttcgtagatggaggcgacctgttctgattgttaacttgtcagtacctgggaaatcctgggatggttctagctcgtccgcagatgagatcgatttcatgatcctctgtatcttgtttcgttgcctaggttccgtctaatctatccgtggtatgatgtagatgttttgatcgtgctaactacgtcttgtaaagttaattgtcaggtcataatttttagcatgcctttttttttgtttggttttgtctaattgggctgtcgttctagatcagagtagaagactgttccaaactacctgctggatttattgaacttggatctgtatgtgtgtcacatatcttcataaattcatgattaagatggattgaaatatcttttatctttttggtatggatagttctatatgttggtgtggctttgttagatgtatacatgcttagatacatgaagcaacgtgctgctactgtttagtaattgctgttcatttgtctaataaacagataaggatatgtatttatgttgctgttggttttgctggtactttgttggatacaaatgcttcaatacagaaaacagcatgctgctacgatttaccatttatctaatcttatcatatgtctaatctaataaacaaacatgcttttaaattatcttcatatgcttggatgatggcatacacagcggctatgtgtggttttttaaatacccagcatcatgggcatgcatgacactgctttaatatgctttttatttgcttgagactgtttcttttgtttatactgaccctttagttcggtgactcttctgcaggtcgactttaacttagcctaggatccatggcccagtccaagcacggcctgaccaaggagatgaccatgaagtaccgcatggagggctgcgtggacggccacaagttcgtgatcaccggcgagggcatcggctaccccttcaagggcaagcaggccatcaacctgtgcgtggtggagggcggccccttgcccttcgccgaggacatcttgtccgccgccttcatgtacggcaaccgcgtgttcaccgagtacccccaggacatcgtcgactacttcaagaactcctgccccgccggctacacctgggaccgctccttcctgttcgaggacggcgccgtgtgcatctgcaacgccgacatcaccgtgagcgtggaggagaactgcatgtaccacgagtccaagttctacggcgtgaacttccccgccgacggccccgtgatgaagaagatgaccgacaactgggagccctcctgcgagaagatcatccccgtgcccaagcagggcatcttgaagggcgacgtgagcatgtacctgctgctgaaggacggtggccgcttgcgctgccagttcgacaccgtgtacaaggccaagtccgtgccccgcaagatgcccgactggcacttcatccagcacaagctgacccgcgaggaccgcagcgacgccaagaaccagaagtggcacctgaccgagcacgccatcgcctccggctccgccttgccctccggactcagatctcgatagggtaccaatggccagttaacagatccagctgctgctgttctagggttcacaagtctgcctatttgtcttccccaatggagctatggttgtctggtctggtccttggtcgtgtcccgtttcattgtgtactatttacctgtaatgtgtatccttaagtctggtttgatggtgtctgaaacgttttgctgtggtagagcagcatggaagaactataatgaataagtgatccctaatcattgtgtccaaattttgcttctgctatacccttttgtgctgtttcttatgttttgcttaaaaatttgatctgacaaacaaatttgtctaaattatgctcttgttctgactgtgtactgtacacatttgtattgctaccggtttggcacatagttttctctttgattgcagatcaaacccttctgattgcagattgcttggctatggctgatgtgctcactgttcttctttagcttgtatattgctgatggtggcttggctacggctgaaaaagttgctgctgcgccgacttggcaactgttgctccagtaatgctttgtcctctcttcctagccgccgacttggcacttggcagctgttgctcctgtaatgcgttgttatctcttatctcttgagatgtactatgattttgaggctgtttgacttgtgccagattgccagtgctgatgctatattatctcaggtttttatgctagtatatgttttactgtgtgctgcctgtgtcgagttacgtaatctattgaaccgctatgcgtgttgatgccctgttgttgcttgccagattgatgcccctgttgcttgcagcttgcaagctgtagtgaaatcctaaaattcgaaaccaaatctattctgaacttttgaagatctgtgatgtccggaagaaaagattcaaacagataaacgggactctccagaatctataaaataaatgatcgacaaacgctttgctttggtaggcttcctagttagttagcggaccgaagcttcggtgaattcaggtgactcttagcgatccgacggcgtcttcaccgccccgccgccgcccgagccggacttgtcgctgccgccgccgctgctcatcttgcgcgcttgtgtccctccctcagtccctgcgttcgcggatcgcgggcgggtgcgacccgtttggactccggccggtagccttcgtgccgacctcgctcggtccaccggtttgtcggggacccacatgtcagtgaaggtacgcgtccacgtccacagaccctactaccccagacgagtccaaatcgctgttccctcacactctcgtgtaccagcgcgcggcggaaagcacctttccaacaaccgccgacacgtcggtcccacgtcggcatgctccaccggtcagtgtttggcgtgtacggctcccggcgacgaacgagtgtggcctaagctttcctactcccatcccatctgagccacacatctctctcacgccacgcgcacaaaacagccaggctcccacgcgcatcaaccggctctccctttccgtgccactcgcccccaagccccaaaccctcgccgccgcctccgagacagccgccgccacctaggccatggccaccgccgccgccgcgtctaccgcgctcactggcgccactaccgctgcgcccaaggcgaggcgccgggcgcacctcctggccacccgccgcgccctcgccgcgcccatcaggtgctcagcggcgtcacccgccatgccgatggctcccccggccaccccgctccggccgtggggccccaccgagccccgcaagggtgctgacatcctcgtcgagtccctcgagcgctgcggcgtccgcgacgtcttcgcctaccccggcggcgcgtcgatggagatccaccaggcactcacccgctcccccgtcatcgccaaccacctcttccgccacgagcaaggggaggcctttgccgcctccggctacgcgcgctcctcgggccgcgtcggcgtctgcatcgccacctccggccccggcgccaccaacctagtctccgcgctcgccgacgcgctgctcgattccgtcccgatggtcgccatcacgggacaggtggcgcgacgcatgattggcaccgacgccttccaggagacgcccatcgtcgaggtcacgcgctccatcaccaagcacaactacctggtcctcgacgtcgacgacatcccccgcgtcgtgcaggaggctttcttcctcgcctcctctggtcgaccagggccggtgcttgtcgacatccccaaggacatccagcagcagatggcggtgcctgtctgggacaagcccatgagtctgcctgggtacattgcgcgccttcccaagccccctgcgactgagttgcttgagcaggtgctgcgtcttgttggtgaatcgcggcgccctgttctttatgtgggcggtggctgcgcagcatctggtgaggagttgcgacgctttgtggagctgactggaatcccggtcacaactactcttatgggcctcggcaacttccccagcgacgacccactgtctctgcgcatgctaggtatgcatgggacggtgtatgcaaattatgcagtggataaggccgatctgttgcttgcacttggtgtgcggtttgatgatcgcgtgacagggaagattgaggcttttgcaagcagggctaagattgtgcacgttgatattgatccggctgagattggcaagaacaagcagccacatgtgtccatctgtgcagatgttaagcttgctttgcagggcatgaatgctcttcttgaaggaagcacatcaaagaagagctttgactttggctcatggaacgatgagttggatcagcagaagagggaattcccccttgggtataaaacatctaatgaggagatccagccacaatatgctattcaggttcttgatgagctgacgaaaggcgaggccatcatcggcacaggtgttgggcagcaccagatgtgggcggcacagtactacacttacaagcggccaaggcagtggttgtcttcagctggtcttggggctatgggatttggtttgccggctgctgctggtgcttctgtggcaaacccaggtgtcactgttgttgacatcgatggagatggtagctttctcatgaacgttcaggagctagctatgatccgaattgagaacctcccagtgaaggtctttgtgctaaacaaccagcacctggggatggtggtgcagttggaggacaggttctataaggccaacagagcgcacacatacttgggaaacccagagaatgaaagtgagatatatccagatttcgtgacgatcgccaaagggttcaacattccagccgtccgtgtgacaaagaagaacgaagtccgcgcagcgataaagaagatgctcgagactccagggccgtacctcttggatataatcgtcccacaccaggagcatgtgttgcctatgatccctagtggtggggctttcaaggatatgatcctggatggtgatggcaggactgtgtactgacttcgaataggtacccggggatcctctagtgccgtgggtcgtttaagctgccgctgtacctgtgtcgtctggtgccttctggtgtacctgggaggttgtcgtctatcaagtatctgtggttggtgtcatgagtcagtgagtcccaatactgttcgtgtcctgtgtgcattatacccaaaactgttatgggcaaatcatgaataagcttgatgttcgaacttaaaagtctctgctcaatatggtattatggttgtttttgttcgtctcctaatatttgcctgggatcaaattttattggctggtgttcatttgacctccatgttcttgctaggctccattttttactctacagccataatatgtttgattgtttggtttgttctttgttgtacacctggttctgtcgagcttagttttcgacactggcttacagcttaacatgttgctattttattgggttctgattgctattttattgggttctgattgctagtttttgctgaatccaaaaaccatgttatttatttaagcgatccaggttattattatgatggtggctaagtttttttttttccaagggtaaattttctggattctccagtgtttctgtggcctgtttctgtggccgaattcaatcactagagtcgacctgcatgattccgatgacttcgtaggttcctagctcaagccgctcgtgtccaagcgtcacttacgattagctaatgattacggcatctaggaccgactagctagctagctaagagctcggtaccgagctcgaattcattccgattaatcgtggcctcttgctcttcaggatgaagagctatgtttaaacgtgcaagcgctactagacaattcagtacattaaaaacgtccgcaatgtgttattaagttgtctaagcgtcaatttgtttacaccacaatatatcctgcca

SEQ ID NO: 254 - DNA, 23160 bp, Artificial Sequence
  PHP98681
gtttacccgccaatatatcctgtcaaacactgcggccgcacttgaccgcggatggagccggagctgtggtgaggccatcgacgggaggtgggggagaacacagtctcagtgttctttgtgagtccgcaaggtttttagcttttctgtattaattaaggttgctgttggctgtagaatacggtcgtggaagagctgtatcggtagctactacgtaagctattatatactggaagtctggagctcgtcgatctccggtcgtcttcctccatttctcctcgtcttgctttgactgctgctaccatttgcttctgttttctgatgaagcatgccatgtcggccaccagtgtttgtgtggtttttgcagggaatggctttcaagtgctgtgattgaatggccctcgtcgtcctcggctgagctcacatggacgcgtcatgtgagtgagatatatgatcatatgatgagtggggttcgggtgagtgcgtacttgaagtaggatcccgctttcactcattcattcattggcctttaaaccgggaaattttcgcgaggagatggagggaagcaagcagggtgacgagtgcagagtgccgcgagcgctttgtcaaaaggcaccgccgtaggcaaaaaaatcaatggccctgactgactcgatggtagtactactgtagagactagagagggttgctccccatatcttcgtgtgacttttactccagcattgcatttccgtcattgagacgttaattaatagcagctttcgggacagatgactgtggccatgtttcgtcacggccgcttcgtgccagctgggggtactatagtactgtgattttgttagtaaaaactttcattaggccaccattgacgaccgggccttcgcttttgctgcgctaattaaccatttcccggcgaccgaagggaacatgaacatgccccgacacatgagggcatgaggactagtgttctccctgtcgttcgttgacttgactagtgatagtttaaacgctcttcaactggaagagcggttactaccggttcactagctagctgctaatcgagctagttaccctatgaggtgacatgaagcgctcacggttactatgacggttagcttcacgactgttggtggcagtagcgtacgacttagctatagttccggacttacctagcgtgcagcgtgacccggtcgtgcccctctctagagataatgagcattgcatgtctaagttataaaaaattaccacatattttttttgtcacacttgtttgaagtgcagtttatctatctttatacatatatttaaactttactctacgaataatataatctatagtactacaataatatcagtgttttagagaatcatataaatgaacagttagacatggtctaaaggacaattgagtattttgacaacaggactctacagttttatctttttagtgtgcatgtgttctcctttttttttgcaaatagcttcacctatataatacttcatccattttattagtacatccatttagggtttagggttaatggtttttatagactaatttttttagtacatctattttattctattttagcctctaaattaagaaaactaaaactctattttagtttttttatttaataatttagatataaaatagaataaaataaagtgactaaaaattaaacaaataccctttaagaaattaaaaaaactaaggaaacatttttcttgtttcgagtagataatgccagcctgttaaacgccgtcgacgagtctaacggacaccaaccagcgaaccagcagcgtcgcgtcgggccaagcgaagcagacggcacggcatctctgtcgctgcctctggacccctctcgagagttccgctccaccgttggacttgctccgctgtcggcatccagaaattgcgtggcggagcggcagacgtgagccggcacggcaggcggcctcctcctcctctcacggcaccggcagctacgggggattcctttcccaccgctccttcgctttcccttcctcgcccgccgtaataaatagacaccccctccacaccctctttccccaacctcgtgttgttcggagcgcacacacacacaaccagatctcccccaaatccacccgtcggcacctccgcttcaaggtacgccgctcgtcctcccccccccccctctctaccttctctagatcggcgttccggtccatgcatggttagggcccggtagttctacttctgttcatgtttgtgttagatccgtgtttgtgttagatccgtgctgctagcgttcgtacacggatgcgacctgtacgtcagacacgttctgattgctaacttgccagtgtttctctttggggaatcctgggatggctctagccgttccgcagacgggatcgatttcatgattttttttgtttcgttgcatagggtttggtttgcccttttcctttatttcaatatatgccgtgcacttgtttgtcgggtcatcttttcatgcttttttttgtcttggttgtgatgatgtggtctggttgggcggtcgttctagatcggagtagaattctgtttcaaactacctggtggatttattaattttggatctgtatgtgtgtgccatacatattcatagttacgaattgaagatgatggatggaaatatcgatctaggataggtatacatgttgatgcgggttttactgatgcatatacagagatgctttttgttcgcttggttgtgatgatgtggtgtggttgggcggtcgttcattcgttctagatcggagtagaatactgtttcaaactacctggtgtatttattaattttggaactgtatgtgtgtgtcatacatcttcatagttacgagtttaagatggatggaaatatcgatctaggataggtatacatgttgatgtgggttttactgatgcatatacatgatggcatatgcagcatctattcatatgctctaaccttgagtacctatctattataataaacaagtatgttttataattattttgatcttgatatacttggatgatggcatatgcagcagctatatgtggatttttttagccctgccttcatacgctatttatttgcttggtactgtttcttttgtcgatgctcaccctgttgtttggtgttacttctgcaggtcgactctagaggatcaattcgctagcataacttcgtatagcatacattatacgaagttatccagatccacgttaccaagcggccgcacactgatagtttaaactgaaggcgggaaacgacaatctgatcatgagcggagaattaagggagtcacgttatgacccccgccgatgacgcgggacaagccgttttacgtttggaactgacagaaccgcaacgattgaaggagccactcagccgcgggtttctggagtttaatgagctaagcacatacgtcagaaaccattattgcgcgttcaaaagtcgcctaaggtcactatcagctagcaaatatttcttgtcaaaaatgctccactgacgttccataaattcccctcggtatccaattagagtctcatattcactcccatggcggccaatgcgggcggcggtggagcgggaggaggcagcggcagcggcagcgtggctgcgccggcggtgtgccgccccagcggctcgcggtggacgccgacgccggagcagatcaggatgctgaaggagctctactacggctgcggcatccggtcgcccagctcggagcagatccagcgcatcaccgccatgctgcggcagcacggcaagatcgagggcaagaacgtcttctactggttccagaaccacaaggcccgcgagcgccagaagcgccgcctcaccagcctcgacgtcaacgtgcccgccgccggcgcggccgacgccaccaccagccaactcggcgtcctctcgctgtcgtcgccgccgccttcaggcgcggcgcctccctcgcccaccctcggcttctacgccgccggcaatggcggcggatcggctgtgctgctggacacgagttccgactggggcagcagcggcgctgctatggccaccgagacatgcttcctgcaggactacatgggcgtgacggacacgggcagctcgtcgcagtggccacgcttctcgtcgtcggacacgataatggcggcggccgcggcgcgggcggcgacgacgcgggcgcccgagacgctccctctcttcccgacctgcggcgacgacggcggcagcggtagcagcagctacttgccgttctggggtgccgcgtccacaactgccggcgccacttcttccgttgcgatccaacagcaacaccagctgcaggagcagtacagcttttacagcaacagcaacagcacccagctggccggcaccggcaaccaagacgtatcggcaacagcagcagcagccgccgccctggagctgagcctcagctcatggtgctccccttaccctgctgcagggagtatgtgagagcaacgcgagctgccactgctcttcactgatgtctctggaatggaaggaggaggaagtgagaacagatcattcgacaaagcagcattagtccgttgatcggtggaagaccactcgtcagtgttgagttgaatgtttgatcaataaaatacggcaatgctgtaagggttgttttttatgccattgataatacactgtactgttcagttgttgaactctatttcttagccatgccaagtgcttttcttattttgaataacattacagcaaaaagttgaaagacaaaaaaaaaaacccccgaacagagtgctttgggtcccaagcttctttagactgtgttcggcgttccccctaaatttctccccctatatctcactcacttgtcacatcagcgttctctttccccctatatctccacgctctacagcagttccacctatatcaaacctctataccccaccacaacaatattatatactttcatcttcaactaactcatgtaccttccaatttttttctactaataattatttacgtgcacagaaacttagcaaggagagagagagcgggaatttaaatgctcggcgttaggcttttagtccgctaggtggctagaccgaggttaggacgctagttcactaggggcctagtggtgttttaagacgtcacggtcactacgaatcgaccgaagcttgcatgggccgcatcgagcagctggcttgtggggaccagacaaaaaaggaatggtgcagaattgttaggcgcacctaccaaaagcatctttgcctttattgcaaagataaagcagattcctctagtacaagtggggaacaaaataacgtggaaaagagctgtcctgacagcccactcactaatgcgtatgacgaacgcagtgacgaccacaaaactcgagcaacgagatcatgagccaatcaaagaggagtgatgtagacctaaagcaataatggagccatgacgtaagggcttacgcccatacgaaataattaaaggctgatgtgacctgtcggtctctcagaacctttactttttatgtttggcgtgtatttttaaatttccacggcaatgacgatgtgaccgtcgacccactaaaacattgctttgtcaaaagctaaaaaagatgatgcccgacagccacttgtgtgaagcatgagaagccggtccctccactaagaaaattagtgaagcatcttccagtggtccctccactcacagctcaatcagtgagcaacaggacgaaggaaatgacgtaagccatgacgtctaatcccagggccagcttgcatgcctgcagtgcagcgtgacccggtcgtgcccctctctagagataatgagcattgcatgtctaagttataaaaaattaccacatattttttttgtcacacttgtttgaagtgcagtttatctatctttatacatatatttaaactttactctacgaataatataatctatagtactacaataatatcagtgttttagagaatcatataaatgaacagttagacatggtctaaaggacaattgagtattttgacaacaggactctacagttttatctttttagtgtgcatgtgttctcctttttttttgcaaatagcttcacctatataatacttcatccattttattagtacatccatttagggtttagggttaatggtttttatagactaatttttttagtacatctattttattctattttagcctctaaattaagaaaactaaaactctattttagtttttttatttaataatttagatataaaatagaataaaataaagtgactaaaaattaaacaaataccctttaagaaattaaaaaaactaaggaaacatttttcttgtttcgagtagataatgccagcctgttaaacgccgtcgacgagtctaacggacaccaaccagcgaaccagcagcgtcgcgtcgggccaagcgaagcagacggcacggcatctctgtcgctgcctctggacccctctcgagagttccgctccaccgttggacttgctccgctgtcggcatccagaaattgcgtggcggagcggcagacgtgagccggcacggcaggcggcctcctcctcctctcacggcaccggcagctacgggggattcctttcccaccgctccttcgctttcccttcctcgcccgccgtaataaatagacaccccctccacaccctctttccccaacctcgtgttgttcggagcgcacacacacacaaccagatctcccccaaatccacccgtcggcacctccgcttcaaggtacgccgctcgtcctcccccccccccctctctaccttctctagatcggcgttccggtccatgcatggttagggcccggtagttctacttctgttcatgtttgtgttagatccgtgtttgtgttagatccgtgctgctagcgttcgtacacggatgcgacctgtacgtcagacacgttctgattgctaacttgccagtgtttctctttggggaatcctgggatggctctagccgttccgcagacgggatcgatttcatgattttttttgtttcgttgcatagggtttggtttgcccttttcctttatttcaatatatgccgtgcacttgtttgtcgggtcatcttttcatgcttttttttgtcttggttgtgatgatgtggtctggttgggcggtcgttctagatcggagtagaattctgtttcaaactacctggtggatttattaattttggatctgtatgtgtgtgccatacatattcatagttacgaattgaagatgatggatggaaatatcgatctaggataggtatacatgttgatgcgggttttactgatgcatatacagagatgctttttgttcgcttggttgtgatgatgtggtgtggttgggcggtcgttcattcgttctagatcggagtagaatactgtttcaaactacctggtgtatttattaattttggaactgtatgtgtgtgtcatacatcttcatagttacgagtttaagatggatggaaatatcgatctaggataggtatacatgttgatgtgggttttactgatgcatatacatgatggcatatgcagcatctattcatatgctctaaccttgagtacctatctattataataaacaagtatgttttataattattttgatcttgatatacttggatgatggcatatgcagcagctatatgtggatttttttagccctgccttcatacgctatttatttgcttggtactgtttcttttgtcgatgctcaccctgttgtttggtgttacttctgcaggtcgactttaacttagcctaggatccatggccactgtgaacaactggctcgctttctccctctccccgcaggagctgccgccctcccagacgacggactccacactcatctcggccgccaccgccgaccatgtctccggcgatgtctgcttcaacatcccccaagattggagcatgaggggatcagagctttcggcgctcgtcgcggagccgaagctggaggacttcctcggcggcatctccttctccgagcagcatcacaaggccaactgcaacatgatacccagcactagcagcacagtttgctacgcgagctcaggtgctagcaccggctaccatcaccagctgtaccaccagcccaccagctcagcgctccacttcgcggactccgtaatggtggcttcctcggccggtgtccacgacggcggtgccatgctcagcgcggccgccgctaacggtgtcgctggcgctgccagtgccaacggcggcggcatcgggctgtccatgattaagaactggctgcggagccaaccggcgcccatgcagccgagggtggcggcggctgagggcgcgcaggggctctctttgtccatgaacatggcggggacgacccaaggcgctgctggcatgccacttctcgctggagagcgcgcacgggcgcccgagagtgtatcgacgtcagcacagggtggagccgtcgtcgtcacggcgccgaaggaggatagcggtggcagcggtgttgccggcgctctagtagccgtgagcacggacacgggtggcagcggcggcgcgtcggctgacaacacggcaaggaagacggtggacacgttcgggcagcgcacgtcgatttaccgtggcgtgacaaggcatagatggactgggagatatgaggcacatctttgggataacagttgcagaagggaagggcaaactcgtaagggtcgtcaagtctatttaggtggctatgataaagaggagaaagctgctagggcttatgatcttgctgctctgaagtactggggtgccacaacaacaacaaattttccagtgagtaactacgaaaaggagctcgaggacatgaagcacatgacaaggcaggagtttgtagcgtctctgagaaggaagagcagtggtttctccagaggtgcatccatttacaggggagtgactaggcatcaccaacatggaagatggcaagcacggattggacgagttgcagggaacaaggatctttacttgggcaccttcagcacccaggaggaggcagcggaggcgtacgacatcgcggcgatcaagttccgcggcctcaacgccgtcaccaacttcgacatgagccgctacgacgtgaagagcatcctggacagcagcgccctccccatcggcagcgccgccaagcgcctcaaggaggccgaggccgcagcgtccgcgcagcaccaccacgccggcgtggtgagctacgacgtcggccgcatcgcctcgcagctcggcgacggcggagccctggcggcggcgtacggcgcgcactaccacggcgccgcctggccgaccatcgcgttccagccgggcgccgccagcacaggcctgtaccacccgtacgcgcagcagccaatgcgcggcggcgggtggtgcaagcaggagcaggaccacgcggtgatcgcggccgcgcacagcctgcaggacctccaccacctgaacctgggcgcggccggcgcgcacgactttttctcggcagggcagcaggccgccgccgctgcgatgcacggcctgggtagcatcgacagtgcgtcgctcgagcacagcaccggctccaactccgtcgtctacaacggcggggtcggcgacagcaacggcgccagcgccgtcggcggcagtggcggtggctacatgatgccgatgagcgctgccggagcaaccactacatcggcaatggtgagccacgagcaggtgcatgcacgggcctacgacgaagccaagcaggctgctcagatggggtacgagagctacctggtgaacgcggagaacaatggtggcggaaggatgtctgcatgggggactgtcgtgtctgcagccgcggcggcagcagcaagcagcaacgacaacatggccgccgacgtcgggcatggcggcgcgcagctcttcagtgtctggaacgacacttaagcgtacctagtggtacctgacatcttatagtctgcaacctctcgtgtctgaattcctatctttatcaagtgttattgcttccacgactataggacagctttcgtcgaaagcttttgctcatgtgatctcgaaggattcatctagtctgatttttcgtgacttgtatcggttttattggattcatccaacatatatcaataaaaaatgagttgtgtttcctttcttcctagttcagttaaaattatttccctcctgcgcttgtgctgtaattgtctgtgtacctgttgtttgtgactgtgttagttcccttggatatgatttcgtatttgatatgtacatggagatagcttagcttcattattggagtatgaagttagtatgacatagtcactctcctggaaaattgacactgcaaaccatatttttattctgaaccacaaatcctagtcagtccgctggcatatgccgtccgtttgctgaatccagaacgtgggtttggagatgtacggctgagatgcctctatgcgaaggggatttcgtggtgaaacgagatgggagtagagcaacgcccgtggaagatgcttcaaacttccacacttttgagcaacgatcggcagtagtaaggtagacgatttcaagatcaaagcatatgaagataaacaacatcaacaacaaaatttgttggggttctatagagagaaacagagctacatacatacactgttttgtatctaccatctgagatgatgaaaagatgaaaaactaaagaatgccccggcgccaacgccaggacacgccgcgcgcgcgtcacccgagccatctcttgacccagccggcgctgtatatttacacacgttgcagcatcgatcaccacctgttcgatcgcgtcgccgtcaccggcgcgccgcgacttattgaactagtctagggcgcggctaacaacctagcttagattgccttgtctaaacccttaggctaacgcgccactctagaaggccgatctcccccgaacgcgccagatccgatatcgatgggccctggccgaagcttggtcacccgcaccttgctagttggatattacctcttctcttcaaagtatccttgaacgctcaccggttatcaaatctctacactatagctctgtagtcttgctagatagttagttctttagctctctctagaggttcacaaactcaatacaacacacagtggagtagggtattacgctccggcggcccgaaccactctaaatccttgtgtcctcgtgtgctcttccaccattaatgactgtaattgcagggacacgaagagttgtagcgcttttgccaacaagatccgctatatgctagtagagtggaacctgcacagcaacaagcatccaataatctgagaataagaattatgtgtggtgatggttctcatctctgcaactcgccattttcgcgagagaaccaaatccaagttggtgaagatcatgatttgggctcatgggctggcatagtagctattacctttgcaattgtggttcgaatctatccgatattctccttttcagggagagctaatgcttatgcttattgggtattttggtttgacactgcttcacgcccaaaaaaaggcaactatgtctgagttggatatggcccaaaaaaaggcagctatgtctgagttggatatggaagtcttctttcgtttagggtgaagtaagaccaagctcatgagcttattatcttaggtcggaacaaattagttgataggcatggcacatttatcaaattataatgattttaacagaaaagcaacacctctttttcagcagcaccagctttgcaagctgcaattgacactccaagcatagtatttgctccaaactcagcctgcatttcgcacaatatcatatctatttccatttggataaaatatattttccagaaatatgggaacagaatcaagatacagaaaaaagttgtggtagtagtggtaagtggaaacacaagtacagtgaaaagatagcattatttctgaacagtcaaattaaccgaaataagtagtatcacatactgcccctaaattgactacacccaatgtaaagaattgcttgagcatattgagccatcagttgtttgtttgtgtaacggatttgacaatgcagagttcaggagcaaaaaaccgcaaaggagagaaagagggaaaggatctcctagtatcccaccttgtggcgcgccctgtcaagtgcatgatggcctggtcgatctgcgtctgctgctgcggttccatcccaacgagtgcctccgacaccttgtcgttgatcacccgcaccgcgtaggcgacccccctggcgaggaacttccgcctctcggaggccccggccgcgtcggcggcggcgccctcgagcgcgcccacgctagccgtagatgctcggtgcacggccttgttggtgtgcaactcgacctcaacggccggtgcgctacgcccgtcaaggatctggcgcgcccgcaccctcgtgatcacggtgggcgcctcccgcctcatgtggccgacgatgaaaagcgccgggttaggggccttggcgcgcaccgccgtattcagggcctcctcgctcttgcgcgagagcaggtgcttccccaggtactcctgcactgacaaggctgccacagcggtggaatttgtcctcacgacttcgccacgtcgtcctcacctccctggcttcccacgactccgccgtatcgaggtgctcggtgggtcgtcttaatccgaagtccgaactaggaagacgagacagagaggtctgaggaatgggcctcgtttgatgttgagctgaattatttttccagcataagcccaggtcttggtccatgaacaaaattactagaaacccagcccagtactacgatctaaaagagggactgccactggatagctctctctagcattctccacgctccaatacagcggcgtcgtgtctatccgggtctatccgcgaacacgtgagaactctccagaaactgctttctcctccacttcatctctctcgctttccctctataaaaagaccccttctaggaattgagggagacagcaagcaccaagcagcgatccgaagctcaatcaattcactcaaacctcttccccaaatcttcgattagatcttcgttgacaagaagactagaaccgaacctgacatgtccaacctgctcacggttcaccagaaccttccggctcttccagtggacgcgacgtccgatgaagtcaggaagaacctcatggacatgttccgcgacaggcaagcgttcagcgagcacacctggaagatgctgctctccgtctgccgctcctgggctgcatggtgcaagctgaacaacaggaagtggttccccgctgagcccgaggacgtgagggattaccttctgtacctgcaagcgcgaggtttgtttctgcttctacctttgatatatatataataattatcattaattagtagtaatataatatttcaaatatttttttcaaaataaaagaatgtagtatatagcaattgcttttctgtagtttataagtgtgtatattttaatttataacttttctaatatatgaccaaaacatggtgatgcctaggtctggcagtgaagaccatccagcaacaccttggacaactgaacatgcttcacaggcgctccggcctcccgcgccccagcgactcgaacgccgtgagcctcgtcatgcgccgcatcaggaaggaaaacgtcgatgccggcgaaagggcaaagcaggccctcgcgttcgagaggaccgatttcgaccaggtccgcagcctgatggagaacagcgacaggtgccaggacattaggaacctggcgttcctcggaattgcatacaacacgctcctcaggatcgcggaaattgcccgcattcgcgtgaaggacattagccgcaccgacggcggcaggatgcttatccacattggcaggaccaagacgctcgtttccaccgcaggcgtcgaaaaggccctcagcctcggagtgaccaagctcgtcgaacgctggatctccgtgtccggcgtcgcggacgacccaaacaactacctcttctgccgcgtccgcaagaacggggtggctgcccctagcgccaccagccaactcagcacgagggccttggaaggtattttcgaggccacccaccgcctgatctacggcgcgaaggatgacagcggtcaacgctacctcgcatggtccgggcactccgcccgcgttggagctgctagggacatggcccgcgccggtgtttccatccccgaaatcatgcaggcgggtggatggacgaacgtgaacattgtcatgaactacattcgcaaccttgacagcgagacgggcgcaatggttcgcctcctggaagatggtgactgaggtacccaacctagacttgtccatcttctggattggccaacttaattaatgtatgaaataaaaggatgcacacatagtgacatgctaatcactataatgtgggcatcaaagttgtgtgttatgtgtaattactagttatctgaataaaagagaaagagatcatccatatttcttatcctaaatgaatgtcacgtgtctttataattctttgatgaaccagatgcatttcattaaccaaatccatatacatataaatattaatcatatataattaatatcaattgggttagcaaaacaaatctagtctaggtgtgttttgcgatccgatatcgacgtctaaaaacggcccctaactaacgcttagttgcccgctagattagtcccccgttagtgcctagttagacacacgacgaactaggggctagtgccaccttgctagttggatattacctcttctcttcaaagtatccttgaacgctcaccggttatcaaatctctacactatagctctgtagtcttgctagatagttagttctttagctctcgcacgataacttcgtatagcatacattatacgaagttataacagcggaccgggttacgatctgcctcatcaacagctgcagtatttgctagccacatatatatacacagttcgacacgtagttataacggaagagagaagcaaagagagaggcagagtgactgcaaccatcagtagttctatgattttattttttaccgttttgttgctgtttcatggtgtttatttgattgtagggtggaggagaggtgaaagctgacagaagagagtgagcacacatggtgcctttcttgcatgatgtatgatcgagagagttcatgctcgaagctatgcgtgctcacttctctctctgtcagccattagaactcctctatctctcaatctcgatctccctctttctttgttgatctctcccatggtgatatttatttgcttcctacgtgttgtgttctctttcttcagcacacacacaacctgttcatgttaccttagggttaaagtttttgcactttgcgtgaagatggaaagacaaacagtagatgagttttttgaaggtttgacagaagagagtgagcacacacggtggtttcttaccatgagtgtcatgctaggagctgtgcgtgctcaccctctatctgtcagtcactcatcaagcccatctgtcttattagcttgtttccgctgctaataaatattctagaggtaccgttaacagatctactaactatctatactgtaataatgttgtatagccgccggatagctagctagtttagtcattcagcggcgatgggtaataataaagtgtcatccatccatcaccatgcgtggcaacgtgagcaatgacctgattgaacaaattgaaatgaaaagaagaaatatgttatatgtcaacgagatttcctcataatgccactgacgacgtgtgtccaagaaatgtatcagtgatacgtatattcacaatttttttatgacttatactcacaatttgtttttttactacttatactcacaatttgttgtgcgtaccataacaatttcgatcgaatatatatcagaaagttgacgaaagtaagctcactcaaaaagttaaatgggctgcggaagctgcgtcaggcccaagttttggctattctatccggtatccacgattttgatggctgagggacatatgttcgcttcgaattcctgcccttaaggccaattgttcaagattcattcaacaattgaaacatctcccatgattaaatcagtataaggttgctatggtcttgcttgacaaagtttttttttgagggaatttcaactaaatttttgagtgaaactatcaaatactgattttaaaaaatttttataaaaggaagcgcagagataaaaggccatctatgctacaaaagtacccaaaaatgtaatcctaaagtatgaattgcattttttttttgtttggacgaaaggaaaggagtattaccacaagaatgatatcatcttcatatttagatcttttttgggtaaagcttgagattctctaaatatagagaaatcagaagaaaaaaaaaccgtgttttggtggttttgatttctagcctccacaataactttgacggcgtcgacaagtctaacggacaccaagcagcgaaccaccagcgccgagccaagcgaagcagacggccgagacgttgacaccttcggcgcggcatctctcgagagttccgctccggcgctccacctccaccgctggcggtttcttattccgttccgttccgcctcctgctctgctcctctccacaccacacggcacgaaaccgttacggcaccggcagcacccagcacgggagaggggattcctttcccaccgttccttccctttccgccccgccgctataaatagccagccccatccccagcttttttccccaatctcatctcctctctcctgttgttcggagcacacgcacaatccgatcgatccccaaatccccttcgtctctcctcgcgagcctcgtggatcccagcttcaaggtacggcgatcgatcatcccccctccttctctctaccttcttttctctagactacatcggatggcgatccatggttagggcctgctagtttcccttcctgttttgtcgatggctgcgaggcacaatagatctgatggcgttatgacggctaacttgtcatgttgttgcgatttatagtccctttaggagatcagtttaatttctcggatggttcgagatcggtggtccatggttagtaccctaagatccgcgctgttagggttcgtagatggaggcgacctgttctgattgttaacttgtcagtacctgggaaatcctgggatggttctagctcgtccgcagatgagatcgatttcatgatcctctgtatcttgtttcgttgcctaggttccgtctaatctatccgtggtatgatgtagatgttttgatcgtgctaactacgtcttgtaaagttaattgtcaggtcataatttttagcatgcctttttttttgtttggttttgtctaattgggctgtcgttctagatcagagtagaagactgttccaaactacctgctggatttattgaacttggatctgtatgtgtgtcacatatcttcataaattcatgattaagatggattgaaatatcttttatctttttggtatggatagttctatatgttggtgtggctttgttagatgtatacatgcttagatacatgaagcaacgtgctgctactgtttagtaattgctgttcatttgtctaataaacagataaggatatgtatttatgttgctgttggttttgctggtactttgttggatacaaatgcttcaatacagaaaacagcatgctgctacgatttaccatttatctaatcttatcatatgtctaatctaataaacaaacatgcttttaaattatcttcatatgcttggatgatggcatacacagcggctatgtgtggttttttaaatacccagcatcatgggcatgcatgacactgctttaatatgctttttatttgcttgagactgtttcttttgtttatactgaccctttagttcggtgactcttctgcaggtcgactttaacttagcctaggatccatggcccagtccaagcacggcctgaccaaggagatgaccatgaagtaccgcatggagggctgcgtggacggccacaagttcgtgatcaccggcgagggcatcggctaccccttcaagggcaagcaggccatcaacctgtgcgtggtggagggcggccccttgcccttcgccgaggacatcttgtccgccgccttcatgtacggcaaccgcgtgttcaccgagtacccccaggacatcgtcgactacttcaagaactcctgccccgccggctacacctgggaccgctccttcctgttcgaggacggcgccgtgtgcatctgcaacgccgacatcaccgtgagcgtggaggagaactgcatgtaccacgagtccaagttctacggcgtgaacttccccgccgacggccccgtgatgaagaagatgaccgacaactgggagccctcctgcgagaagatcatccccgtgcccaagcagggcatcttgaagggcgacgtgagcatgtacctgctgctgaaggacggtggccgcttgcgctgccagttcgacaccgtgtacaaggccaagtccgtgccccgcaagatgcccgactggcacttcatccagcacaagctgacccgcgaggaccgcagcgacgccaagaaccagaagtggcacctgaccgagcacgccatcgcctccggctccgccttgccctccggactcagatctcgatagggtaccaatggccagttaacagatccagctgctgctgttctagggttcacaagtctgcctatttgtcttccccaatggagctatggttgtctggtctggtccttggtcgtgtcccgtttcattgtgtactatttacctgtaatgtgtatccttaagtctggtttgatggtgtctgaaacgttttgctgtggtagagcagcatggaagaactataatgaataagtgatccctaatcattgtgtccaaattttgcttctgctatacccttttgtgctgtttcttatgttttgcttaaaaatttgatctgacaaacaaatttgtctaaattatgctcttgttctgactgtgtactgtacacatttgtattgctaccggtttggcacatagttttctctttgattgcagatcaaacccttctgattgcagattgcttggctatggctgatgtgctcactgttcttctttagcttgtatattgctgatggtggcttggctacggctgaaaaagttgctgctgcgccgacttggcaactgttgctccagtaatgctttgtcctctcttcctagccgccgacttggcacttggcagctgttgctcctgtaatgcgttgttatctcttatctcttgagatgtactatgattttgaggctgtttgacttgtgccagattgccagtgctgatgctatattatctcaggtttttatgctagtatatgttttactgtgtgctgcctgtgtcgagttacgtaatctattgaaccgctatgcgtgttgatgccctgttgttgcttgccagattgatgcccctgttgcttgcagcttgcaagctgtagtgaaatcctaaaattcgaaaccaaatctattctgaacttttgaagatctgtgatgtccggaagaaaagattcaaacagataaacgggactctccagaatctataaaataaatgatcgacaaacgctttgctttggtaggcttcctagttagttagcggaccgaagcttcggtgaattcaggtgactcttagcgatccgacggcgtcttcaccgccccgccgccgcccgagccggacttgtcgctgccgccgccgctgctcatcttgcgcgcttgtgtccctccctcagtccctgcgttcgcggatcgcgggcgggtgcgacccgtttggactccggccggtagccttcgtgccgacctcgctcggtccaccggtttgtcggggacccacatgtcagtgaaggtacgcgtccacgtccacagaccctactaccccagacgagtccaaatcgctgttccctcacactctcgtgtaccagcgcgcggcggaaagcacctttccaacaaccgccgacacgtcggtcccacgtcggcatgctccaccggtcagtgtttggcgtgtacggctcccggcgacgaacgagtgtggcctaagctttcctactcccatcccatctgagccacacatctctctcacgccacgcgcacaaaacagccaggctcccacgcgcatcaaccggctctccctttccgtgccactcgcccccaagccccaaaccctcgccgccgcctccgagacagccgccgccacctaggccatggccaccgccgccgccgcgtctaccgcgctcactggcgccactaccgctgcgcccaaggcgaggcgccgggcgcacctcctggccacccgccgcgccctcgccgcgcccatcaggtgctcagcggcgtcacccgccatgccgatggctcccccggccaccccgctccggccgtggggccccaccgagccccgcaagggtgctgacatcctcgtcgagtccctcgagcgctgcggcgtccgcgacgtcttcgcctaccccggcggcgcgtcgatggagatccaccaggcactcacccgctcccccgtcatcgccaaccacctcttccgccacgagcaaggggaggcctttgccgcctccggctacgcgcgctcctcgggccgcgtcggcgtctgcatcgccacctccggccccggcgccaccaacctagtctccgcgctcgccgacgcgctgctcgattccgtcccgatggtcgccatcacgggacaggtggcgcgacgcatgattggcaccgacgccttccaggagacgcccatcgtcgaggtcacgcgctccatcaccaagcacaactacctggtcctcgacgtcgacgacatcccccgcgtcgtgcaggaggctttcttcctcgcctcctctggtcgaccagggccggtgcttgtcgacatccccaaggacatccagcagcagatggcggtgcctgtctgggacaagcccatgagtctgcctgggtacattgcgcgccttcccaagccccctgcgactgagttgcttgagcaggtgctgcgtcttgttggtgaatcgcggcgccctgttctttatgtgggcggtggctgcgcagcatctggtgaggagttgcgacgctttgtggagctgactggaatcccggtcacaactactcttatgggcctcggcaacttccccagcgacgacccactgtctctgcgcatgctaggtatgcatgggacggtgtatgcaaattatgcagtggataaggccgatctgttgcttgcacttggtgtgcggtttgatgatcgcgtgacagggaagattgaggcttttgcaagcagggctaagattgtgcacgttgatattgatccggctgagattggcaagaacaagcagccacatgtgtccatctgtgcagatgttaagcttgctttgcagggcatgaatgctcttcttgaaggaagcacatcaaagaagagctttgactttggctcatggaacgatgagttggatcagcagaagagggaattcccccttgggtataaaacatctaatgaggagatccagccacaatatgctattcaggttcttgatgagctgacgaaaggcgaggccatcatcggcacaggtgttgggcagcaccagatgtgggcggcacagtactacacttacaagcggccaaggcagtggttgtcttcagctggtcttggggctatgggatttggtttgccggctgctgctggtgcttctgtggcaaacccaggtgtcactgttgttgacatcgatggagatggtagctttctcatgaacgttcaggagctagctatgatccgaattgagaacctcccagtgaaggtctttgtgctaaacaaccagcacctggggatggtggtgcagttggaggacaggttctataaggccaacagagcgcacacatacttgggaaacccagagaatgaaagtgagatatatccagatttcgtgacgatcgccaaagggttcaacattccagccgtccgtgtgacaaagaagaacgaagtccgcgcagcgataaagaagatgctcgagactccagggccgtacctcttggatataatcgtcccacaccaggagcatgtgttgcctatgatccctagtggtggggctttcaaggatatgatcctggatggtgatggcaggactgtgtactgacttcgaataggtacccggggatcctctagtgccgtgggtcgtttaagctgccgctgtacctgtgtcgtctggtgccttctggtgtacctgggaggttgtcgtctatcaagtatctgtggttggtgtcatgagtcagtgagtcccaatactgttcgtgtcctgtgtgcattatacccaaaactgttatgggcaaatcatgaataagcttgatgttcgaacttaaaagtctctgctcaatatggtattatggttgtttttgttcgtctcctaatatttgcctgggatcaaattttattggctggtgttcatttgacctccatgttcttgctaggctccattttttactctacagccataatatgtttgattgtttggtttgttctttgttgtacacctggttctgtcgagcttagttttcgacactggcttacagcttaacatgttgctattttattgggttctgattgctattttattgggttctgattgctagtttttgctgaatccaaaaaccatgttatttatttaagcgatccaggttattattatgatggtggctaagtttttttttttccaagggtaaattttctggattctccagtgtttctgtggcctgtttctgtggccgaattcaatcactagagtcgacctgcatgattccgatgacttcgtaggttcctagctcaagccgctcgtgtccaagcgtcacttacgattagctaatgattacggcatctaggaccgactagctagctagctaagagctcggtaccgagctcgaattcattccgattaatcgtggcctcttgctcttcaggatgaagagctatgtttaaacgtgcaagcgctactagacaattcagtacattaaaaacgtccgcaatgtgttattaagttgtctaagcgtcaatttgtttacaccacaatatatcctgcca

SEQ ID NO: 255 - DNA, 24377 bp, Artificial Sequence
  PHP98328
gtttacccgccaatatatcctgtcaaacactgatagtttaaactgaaggcgggaaacgacaatctgatcatgagcggagaattaagggagtcacgttatgacccccgccgatgacgcgggacaagccgttttacgtttggaactgacagaaccgcaacgttgaaggagccactcagcaagctggtacgattgtaatacgactcactatagggcgaattgagcgctgtttaaacgctcttcaactggaagagcggttacgctgtttaaacgctcttcaactggaagagcggttactaccggttcactagctagctgctaatcgagctagttaccctatgaggtgacatgaagcgctcacggttactatgacggttagcttcacgactgttggtggcagtagcgtacgacttagctatagttccggacttacccttaagcgatttaaatctgcggttaccgaattcgagctcggtacctagtacccttgtacttttggtttcacctgcatagagaaaacccacaagaatatgacagtctgatttgtcagtctcattctcaagcaacatttctctatccgttactttcatggtgaataacacaatccatcatcaatactttgtgttactcagaaactgaaagttattccgagtcttgcatatctttggacctactcgtttttctaccattattgctgattgttaagctctcgctacttgaatcggcattgttggagtgggaaggttcaaaaaattggagttatgactagttgtctctttctatgtacgatggagaaaatgaataaacaactgagaaaatggctcttgtttagttgatgatgctcttaagctttccactggttgccatatatgatttgggcatttcactttgatcttaatgggccttgtaaagcccaagactcatgattatctttagttgatgctcttaattaggtgtgggcaaataattcaaactgtatgtacccgaccaaaaccaaagcaaaaataatcgaaccaaaccgaaaatttaaaaataaccgaatgaaaactaaatcctataactgaaagaactgaaaccgaatcaaaatatttaatgtaaccaaaaatatccgaaatataattatattgtcaaaaatattaataatttctagattaaataattaaaaatacttaaaaatttatataaaatagtaaaaatactcgaaaataaccacaaatattcaaaaacaaccgaaatatcccaaaatattcaaagcaaaataaccgaatggataccaaattttaaaaccgaaaaaactggaacaaaaccaaaatcgaaccaaaatttcaaaaatcgaataaatactaaactttagaacaaaaaaaaacgataaccgaatgtatacgaaccaaagccgaattagataaccgaacgtccaggactactcttaatctttccgccacttatgatttgggctattactttgtttataatgagccttttcaagctcaagttcatgattgtccgtgagatgagaaactgacttgttggattcgaaaccctagctagtattggttaatacttaatacataaatgacctgcattgacatcatcatccaagaaaataaaaattgtatgcttgagatatttagttttcctagctaggttttctttattttagtaccgaatctttaggtgtgccacgttaatttagacccattttttcatacttaccaactgagtctagtttaatcatgactataatcgtataaaatgattcagtcgacgtcattgcgaacgtatataaaatcatccaaattgacgtcattccaaagaggtaagcatgcttatctaagagtccgagcatactaaacaagacgacattttatttgcactccaaatcaaattttgtattgcctaaagaaaaacaatcaaactcaagtttcttaaaattaatttcattcaaactaatcactttcaatatctcacatattattcatgccatttctatttgtctaaacatgatttaaaaaaaaaagtaaaatacaaagattactatgcaaaaactctataaaaaaaaattcaaatttcttatttatttgtgacatcaaattttcaaaataatttttttaattatcggttgatccggtcagtcgataaaaacataaactttcagcgaccgttaaaactttcctactaccgatttagagaaaatcttagcttgaaacgtaattgtaacctgccttcatgcaagtcgcaagatatgtcatcctaagttgtatatgttttctcaaaagatgtatttacttgagaaaatacgtttcaacgttgatggacaaccaattaagaatcaagcacctttcgtaatcaatttaggcttatcgtctaaggtatactgatttacgacagttgactagacttataaggaacaaaataatagaatagtttctaaacacttcacctaatcatagagactaagatggtaattcgtaaacgacaaagcctagtgacactgtccattgtaaaattccacatcatattagtattaaacatatacatgtagtttcctgaacacatgtagtatcaaacacacttcgtggcttcttcctcgaaacctgcggccgcgctatagttccggacttacccttaagataacttcgtatagcatacattatacgaagttatgggcccacgcgtgaagagcggttaccagagctggtcacctttgtccaccaagatggaactgtcttcggccagaatggccatctggattcagcaggcctagaaggccatttatcgctatcaactttgtatagaaaagttgggccgaattcgagctcggtacggccagaatggcccggaccgaagcttgcggccgcacactgatagtttaaacccgcgtgcgccgtggaatccgcctggatcgctgggggcgtttccaactgatcccccgcggccttccgtcgaatccgcctggatcggccgccacttggcaggccgcgaaggatctcagcccaggaaaagcccacggctccaaggcgcaaatgaaagaggagaagagaaaatcgtgagaaaactcactggaggagaaaaatggctatagtaaaattagtgaaatacccaatccggaaaaaacgtctagtgcttcgcctacttcctcaaacaaaagagacgcgcgaagggcagagcctcagccacccagcagtaatagcagccgtggtgcccgttgagattccccgcgccgttccgtcgaatcgatcagccgcgcgcccggcgcccctgcacatatattatacccaatgcccacacctcacaaccacttgctaacgcgcgcggcggtgacctaggctgcggtggactggtcatcgctccccgccgacgtgttcctagccaccaccggtctcgactactacatgagcctccgcgccgcgtgccgcccctgccgcgccgccaccgcggacccgcgcggtccggaccggcgcttccatccccgccggtggatcatgctcgaactgaatatccatgtttcaagagatattgttaagtccaaagctttcaaactgaatatccatgtttcatcgaaatagggtacaaaactttcgagtttgtggatgttcaacccaaaatccataacatacaacggttcagcctatttcttgagttgacagttcgcaattcctagtggcaatgaatacatgctagctactcccctttaactaatgaatacttggctcgaaacctctcgaccattgagcttaatgagtccagccgagtttgattttgaactggtcaacgaaacatttgagtcaagccgagcataattctgagttcgttaataaaacaactttaaccactcaagcaacgagctactcgtttaacaccatcccctcttctccccttggtccttggtccatccctctttttgacctaactcaatatccacccacattccttgacacacaagcaaaaccactcttgactcgcgtcctcctctcatatggcatatatgttaatttattaacgatcgagttaaacaaaccaattttgtagttaaattgagtcgagcccatgtcgcttttgaacatgatatactattaacgagtcgagctaactgttgtaactagtgtgttatcttaattggttctaccaattcgagccaagctaactactccctccgttacataaagattggcacggatatccggctctactcacacggacatgtggtcataatgcaaaagatgcaaatgaacaattctgaacaggagatttgatatcagaacctttggttatgtggcatgtgcctttaaccgtgtggagctaacaatttaacttaatccgtattataatctcacgcacactgtgcttgattcttcttgctttgcttcccttggtgcgggtgcacatctcagagcatacggacggtatagaaagaaggtgcagtgcgtcccagactaaccaaactttttttttggctatacaaaatgcacggttgtttgttgcacgcaacgacgattgttccttttgccaaagtaaataaataagcatctctcgtcgaagatcattatttttctaattctctacctcgtgaaagctggaagtggccacgtcaccggcaaaactaaccaacggtaatatctcccggaaaaatccaccgagccagcccttcgctagcgccaaagaagttcaccgcgcgcacggccaaaatccacgcaagaccagcgaaatctcgtggtctccactctctgctcgcccggcgcggcgagaagataatctcatggccaccgcacggccacatcagcgagccaccgcagcatccccgtgaggacattgaccccaccccatcgccctcggctcagactcaaacccatcaaaaatccgcgcgcgcccacggtgccagccactccgtggccagagcgcggccacctcggcaacccccatccgccttcccggcacctcacagcgcgcgcgccaatggcgactcggcttaagattccccgtggataaggactcgaacgtaagcgcttacgacgtaagcgcttacgtcgcgcgcgttcgggcctcctatttaaacgcctctcgctcccgctttactccacagcaacaaccgctccaacacttcagttctcactccacagctcagagtcagagctactagcagaattcttgtaaggttcccttccctcctcccctcacacccctgttcgtgttccttcggatcggatctcagtggtgatgttagacgtccgcggctgcctacgtagtggcattgccgcccgaaaggtttgtttaggtggggtagatccgaaacaggccggatctggaccatgtccgcggcggggcggcgggacttgatcgcgtagctgtcgtgtgcatttctccctaccagtggcggaatcggcgatgtggacctaagggctaaggcttatctgctgccttgaccatttcgtcgctgacaaaaacaaagtgacaatcatgccgttctctgtttgtttatctggatcgttattacgctgtgaatcctgcgatatgtggctaagtgatttttcttctttttctgggggcagtttagcctttgacccagtcctaggtgtggtcactaggactgtgtagcatgatgagtgaggttgcagcaggctgattgctagtggacgtttttttccccaatttgttaggttttcacgctccaggttgtgcaagtaattttgctagtgattgtgtgatccatcttcaacgttgaaccttgtttttccccctaaaacccccaacaggaaatcttgccccgacttctattgcaaaaattgtaacgcttagcaccctgattgactcaattcctgtcactaggcatgctcggtcaaaagcagatgatttaccacttagaaactgccctgcccctgctttccacatagcatttcgaactttttgactactattgacacccccctaacttgccgaactatttctctcttcagctactatttacctagttataattacataaatgtttgtgtgtatcttgtgcagcccgggggatctcgactctagaggatcgctcaggaaggccgctgagatagaggcatggcggccaatgcgggcggcggtggagcgggaggaggcagcggcagcggcagcgtggctgcgccggcggtgtgccgccccagcggctcgcggtggacgccgacgccggagcagatcaggatgctgaaggagctctactacggctgcggcatccggtcgcccagctcggagcagatccagcgcatcaccgccatgctgcggcagcacggcaagatcgagggcaagaacgtcttctactggttccagaaccacaaggcccgcgagcgccagaagcgccgcctcaccagcctcgacgtcaacgtgcccgccgccggcgcggccgacgccaccaccagccaactcggcgtcctctcgctgtcgtcgccgccgccttcaggcgcggcgcctccctcgcccaccctcggcttctacgccgccggcaatggcggcggatcggctgtgctgctggacacgagttccgactggggcagcagcggcgctgccatggccaccgagacatgcttcctgcaggactacatgggcgtgacggacacgggcagctcgtcgcagtggccacgcttctcgtcgtcggacacgataatggcggcggccgcggcgcgggcggcgacgacgcgggcgcccgagacgctccctctcttcccgacctgcggcgacgacggcggcagcggtagcagcagctacttgccgttctggggtgccgcgtccacaactgccggcgccacttcttccgttgcgatccagcagcaacaccagctgcaggagcagtacagcttttacagcaacagcaacagcacccagctggccggcaccggcaaccaagacgtatcggcaacagcagcagcagccgccgccctggagctgagcctcagctcatggtgctccccttaccctgctgcagggagtatgtgagagcaacgcgagctgccactgctcttcactgatgtctctggaatggaaggaggaggaagtgagcatagcgttggtgcgttgctgtcaagggcgaattcacatggttaacctagacttgtccatcttctggattggccaacttaattaatgtatgaaataaaaggatgcacacatagtgacatgctaatcactataatgtgggcatcaaagttgtgtgttatgtgtaattactagttatctgaataaaagagaaagagatcatccatatttcttatcctaaatgaatgtcacgtgtctttataattctttgatgaaccagatgcatttcattaaccaaatccatatacatataaatattaatcatatataattaatatcaattgggttagcaaaacaaatctagtctaggtgtgttttgcgaatgcggccgccaccgcggtggagctcgaattccggtccgggcctagaaggccagcttcaagtttgtacaaaaaagcaggctccggccagaatggcccggaccgggttaccgaattcgagctcggtaccatttaaattgcgcccgccacggccgtggaggtcgtattccggtcagcttgcatccctgcagtgcagcgtgacccggtcgtgcccctctctagagataatgagcattgcatgtctaagttataaaaaattaccacatattttttttgtcacacttgtttgaagtgcagtttatctatctttatacatatatttaaactttactctacgaataatataatctatagtactacaataatatcagtgttttagagaatcatataaatgaacagttagacatggtctaaaggacaattgagtattttgacaacaggactctacagttttatctttttagtgtgcatgtgttctcctttttttttgcaaatagcttcacctatataatacttcatccattttattagtacatccatttagggtttagggttaatggtttttatagactaatttttttagtacatctattttattctattttagcctctaaattaagaaaactaaaactctattttagtttttttatttaataatttagatataaaatagaataaaataaagtgactaaaaattaaacaaataccctttaagaaattaaaaaaactaaggaaacatttttcttgtttcgagtagataatgccagcctgttaaacgccgtcgacgagtctaacggacaccaaccagcgaaccagcagcgtcgcgtcgggccaagcgaagcagacggcacggcatctctgtcgctgcctctggacccctctcgagagttccgctccaccgttggacttgctccgctgtcggcatccagaaattgcgtggcggagcggcagacgtgagccggcacggcaggcggcctcctcctcctctcacggcaccggcagctacgggggattcctttcccaccgctccttcgctttcccttcctcgcccgccgtaataaatagacaccccctccacaccctctttccccaacctcgtgttgttcggagcgcacacacacacaaccagatctcccccaaatccacccgtcggcacctccgcttcaaggtacgccgctcgtcctcccccccccccctctctaccttctctagatcggcgttccggtccatgcatggttagggcccggtagttctacttctgttcatgtttgtgttagatccgtgtttgtgttagatccgtgctgctagcgttcgtacacggatgcgacctgtacgtcagacacgttctgattgctaacttgccagtgtttctctttggggaatcctgggatggctctagccgttccgcagacgggatcgatttcatgattttttttgtttcgttgcatagggtttggtttgcccttttcctttatttcaatatatgccgtgcacttgtttgtcgggtcatcttttcatgcttttttttgtcttggttgtgatgatgtggtctggttgggcggtcgttctagatcggagtagaattctgtttcaaactacctggtggatttattaattttggatctgtatgtgtgtgccatacatattcatagttacgaattgaagatgatggatggaaatatcgatctaggataggtatacatgttgatgcgggttttactgatgcatatacagagatgctttttgttcgcttggttgtgatgatgtggtgtggttgggcggtcgttcattcgttctagatcggagtagaatactgtttcaaactacctggtgtatttattaattttggaactgtatgtgtgtgtcatacatcttcatagttacgagtttaagatggatggaaatatcgatctaggataggtatacatgttgatgtgggttttactgatgcatatacatgatggcatatgcagcatctattcatatgctctaaccttgagtacctatctattataataaacaagtatgttttataattattttgatcttgatatacttggatgatggcatatgcagcagctatatgtggatttttttagccctgccttcatacgctatttatttgcttggtactgtttcttttgtcgatgctcaccctgttgtttggtgttacttctgcaggtcgactctagaggatccatggccactgtgaacaactggctcgctttctccctctccccgcaggagctgccgccctcccagacgacggactccacactcatctcggccgccaccgccgaccatgtctccggcgatgtctgcttcaacatcccccaagattggagcatgaggggatcagagctttcggcgctcgtcgcggagccgaagctggaggacttcctcggcggcatctccttctccgagcagcatcacaaggccaactgcaacatgatacccagcactagcagcacagtttgctacgcgagctcaggtgctagcaccggctaccatcaccagctgtaccaccagcccaccagctcagcgctccacttcgcggactccgtaatggtggcttcctcggccggtgtccacgacggcggtgccatgctcagcgcggccgccgctaacggtgtcgctggcgctgccagtgccaacggcggcggcatcgggctgtccatgattaagaactggctgcggagccaaccggcgcccatgcagccgagggtggcggcggctgagggcgcgcaggggctctctttgtccatgaacatggcggggacgacccaaggcgctgctggcatgccacttctcgctggagagcgcgcacgggcgcccgagagtgtatcgacgtcagcacagggtggagccgtcgtcgtcacggcgccgaaggaggatagcggtggcagcggtgttgccggcgctctagtagccgtgagcacggacacgggtggcagcggcggcgcgtcggctgacaacacggcaaggaagacggtggacacgttcgggcagcgcacgtcgatttaccgtggcgtgacaaggcatagatggactgggagatatgaggcacatctttgggataacagttgcagaagggaagggcaaactcgtaagggtcgtcaagtctatttaggtggctatgataaagaggagaaagctgctagggcttatgatcttgctgctctgaagtactggggtgccacaacaacaacaaattttccagtgagtaactacgaaaaggagctcgaggacatgaagcacatgacaaggcaggagtttgtagcgtctctgagaaggaagagcagtggtttctccagaggtgcatccatttacaggggagtgactaggcatcaccaacatggaagatggcaagcacggattggacgagttgcagggaacaaggatctttacttgggcaccttcagcacccaggaggaggcagcggaggcgtacgacatcgcggcgatcaagttccgcggcctcaacgccgtcaccaacttcgacatgagccgctacgacgtgaagagcatcctggacagcagcgccctccccatcggcagcgccgccaagcgcctcaaggaggccgaggccgcagcgtccgcgcagcaccaccacgccggcgtggtgagctacgacgtcggccgcatcgcctcgcagctcggcgacggcggagccctggcggcggcgtacggcgcgcactaccacggcgccgcctggccgaccatcgcgttccagccgggcgccgccagcacaggcctgtaccacccgtacgcgcagcagccaatgcgcggcggcgggtggtgcaagcaggagcaggaccacgcggtgatcgcggccgcgcacagcctgcaggacctccaccacctgaacctgggcgcggccggcgcgcacgactttttctcggcagggcagcaggccgccgccgctgcgatgcacggcctgggtagcatcgacagtgcgtcgctcgagcacagcaccggctccaactccgtcgtctacaacggcggggtcggcgacagcaacggcgccagcgccgtcggcggcagtggcggtggctacatgatgccgatgagcgctgccggagcaaccactacatcggcaatggtgagccacgagcaggtgcatgcacgggcctacgacgaagccaagcaggctgctcagatggggtacgagagctacctggtgaacgcggagaacaatggtggcggaaggatgtctgcatgggggactgtcgtgtctgcagccgcggcggcagcagcaagcagcaacgacaacatggccgccgacgtcgggcatggcggcgcgcagctcttcagtgtctggaacgacacttaagcgtacgtgccggcctggctctccgaaagggcgtattccagcacactggcggccgttactagacccaacctagacttgtccatcttctggattggccaacttaattaatgtatgaaataaaaggatgcacacatagtgacatgctaatcactataatgtgggcatcaaagttgtgtgttatgtgtaattactagttatctgaataaaagagaaagagatcatccatatttcttatcctaaatgaatgtcacgtgtctttataattctttgatgaaccagatgcatttcattaaccaaatccatatacatataaatattaatcatatataattaatatcaattgggttagcaaaacaaatctagtctaggtgtgttttgcgaatgcggcctccgggcacccagctttcttgtacaaagtggccgttaacggatcggccagaatggcccggaccgggttaccgaattcgagctcggtaccctggttcacaaactcaatacaacacacagtggagtagggtattacgctccggcggcccgaaccactctaaatccttgtgtcctcgtgtgctcttccaccattaatgactgtaattgcagggacacgaagagttgtagcgcttttgccaacaagatccgctatatgctagtagagtggaacctgcacagcaacaagcatccaataatctgagaataagaattatgtgtggtgatggttctcatctctgcaactcgccattttcgcgagagaaccaaatccaagttggtgaagatcatgatttgggctcatgggctggcatagtagctattacctttgcaattgtggttcgaatctatccgatattctccttttcagggagagctaatgcttatgcttattgggtattttggtttgacactgcttcacgcccaaaaaaaggcaactatgtctgagttggatatggcccaaaaaaaggcagctatgtctgagttggatatggaagtcttctttcgtttagggtgaagtaagaccaagctcatgagcttattatcttaggtcggaacaaattagttgataggcatggcacatttatcaaattataatgattttaacagaaaagcaacacctctttttcagcagcaccagctttgcaagctgcaattgacactccaagcatagtatttgctccaaactcagcctgcatttcgcacaatatcatatctatttccatttggataaaatatattttccagaaatatgggaacagaatcaagatacagaaaaaagttgtggtagtagtggtaagtggaaacacaagtacagtgaaaagatagcattatttctgaacagtcaaattaaccgaaataagtagtatcacatactgcccctaaattgactacacccaatgtaaagaattgcttgagcatattgagccatcagttgtttgtttgtgtaacggatttgacaatgcagagttcaggagcaaaaaaccgcaaaggagagaaagagggaaaggatctcctagtatcccaccttgtggcgcgccctgtcaagtgcatgatggcctggtcgatctgcgtctgctgctgcggttccatcccaacgagtgcctccgacaccttgtcgttgatcacccgcaccgcgtaggcgacccccctggcgaggaacttccgcctctcggaggccccggccgcgtcggcggcggcgccctcgagcgcgcccacgctagccgtagatgctcggtgcacggccttgttggtgtgcaactcgacctcaacggccggtgcgctacgcccgtcaaggatctggcgcgcccgcaccctcgtgatcacggtgggcgcctcccgcctcatgtggccgacgatgaaaagcgccgggttaggggccttggcgcgcaccgccgtattcagggcctcctcgctcttgcgcgagagcaggtgcttccccaggtactcctgcactgacaaggctgccacagcggtggaatttgtcctcacgacttcgccacgtcgtcctcacctccctggcttcccacgactccgccgtatcgaggtgctcggtgggtcgtcttaatccgaagtccgaactaggaagacgagacagagaggtctgaggaatgggcctcgtttgatgttgagctgaattatttttccagcataagcccaggtcttggtccatgaacaaaattactagaaacccagcccagtactacgatctaaaagagggactgccactggatagctctctctagcattctccacgctccaatacagcggcgtcgtgtctatccgggtctatccgcgaacacgtgagaactctccagaaactgctttctcctccacttcatctctctcgctttccctctataaaaagaccccttctaggaattgagggagacagcaagcaccaagcagcgatccgaagctcaatcaattcactcaaacctcttccccaaatcttcgattagatcttcgttgacaagaagactagaaccgaacctgacatgtccaacctgctcacggttcaccagaaccttccggctcttccagtggacgcgacgtccgatgaagtcaggaagaacctcatggacatgttccgcgacaggcaagcgttcagcgagcacacctggaagatgctgctctccgtctgccgctcctgggctgcatggtgcaagctgaacaacaggaagtggttccccgctgagcccgaggacgtgagggattaccttctgtacctgcaagcgcgaggtttgtttctgcttctacctttgatatatatataataattatcattaattagtagtaatataatatttcaaatatttttttcaaaataaaagaatgtagtatatagcaattgcttttctgtagtttataagtgtgtatattttaatttataacttttctaatatatgaccaaaacatggtgatgcctaggtctggcagtgaagaccatccagcaacaccttggacaactgaacatgcttcacaggcgctccggcctcccgcgccccagcgactcgaacgccgtgagcctcgtcatgcgccgcatcaggaaggaaaacgtcgatgccggcgaaagggcaaagcaggccctcgcgttcgagaggaccgatttcgaccaggtccgcagcctgatggagaacagcgacaggtgccaggacattaggaacctggcgttcctcggaattgcatacaacacgctcctcaggatcgcggaaattgcccgcattcgcgtgaaggacattagccgcaccgacggcggcaggatgcttatccacattggcaggaccaagacgctcgtttccaccgcaggcgtcgaaaaggccctcagcctcggagtgaccaagctcgtcgaacgctggatctccgtgtccggcgtcgcggacgacccaaacaactacctcttctgccgcgtccgcaagaacggggtggctgcccctagcgccaccagccaactcagcacgagggccttggaaggtattttcgaggccacccaccgcctgatctacggcgcgaaggatgacagcggtcaacgctacctcgcatggtccgggcactccgcccgcgttggagctgctagggacatggcccgcgccggtgtttccatccccgaaatcatgcaggcgggtggatggacgaacgtgaacattgtcatgaactacattcgcaaccttgacagcgagacgggcgcaatggttcgcctcctggaagatggtgactgaggtacccaacctagacttgtccatcttctggattggccaacttaattaatgtatgaaataaaaggatgcacacatagtgacatgctaatcactataatgtgggcatcaaagttgtgtgttatgtgtaattactagttatctgaataaaagagaaagagatcatccatatttcttatcctaaatgaatgtcacgtgtctttataattctttgatgaaccagatgcatttcattaaccaaatccatatacatataaatattaatcatatataattaatatcaattgggttagcaaaacaaatctagtctaggtgtgttttgcgatccgatatcgaattggccacggtaccagctgctgctgttctagggttcacaagtctgcctatttgtcttccccaatggagctatggttgtctggtctggtccttggtcgtgtcccgtttcattgtgtactatttacctgtaatgtgtatccttaagtctggtttgatggtgtctgaaacgttttgctgtggtagagcagcatggaagaactataatgaataagtgatccctaatcattgtgtccaaattttgcttctgctatacccttttgtgctgtttcttatgttttgcttaaaaatttgatctgacaaacaaatttgtctaaattatgctcttgttctgactgtgtactgtacacatttgtattgctaccggtttggcacatagttttctctttgattgcagatcaaacccttctgattgcagattgcttggctatggctgatgtgctcactgttcttctttagcttgtatattgctgatggtggcttggctacggctgaaaaagttgctgctgcgccgacttggcaactgttgctccagtaatgctttgtcctctcttcctagccgccgacttggcacttggcagctgttgctcctgtaatgcgttgttatctcttatctcttgagatgtactatgattttgaggctgtttgacttgtgccagattgccagtgctgatgctatattatctcaggtttttatgctagtatatgttttactgtgtgctgcctgtgtcgagttacgtaatctattgaaccgctatgcgtgttgatgccctgttgttgcttgccagattgatgcccctgttgcttgcagcttgcaagctgtagtgaaatcctaaaattccaaaccaaatctattctgaacttttgaagatctgtgatgtccggaagaaaagattcaaacagataaacgggactctccagaatctataaaataaatgatcgacaaacgctttgctttggtaggcttcaagcttggtcacccggtccgggcctagaaggccagcttcggccgccccgggcaactttattatacaaagttgatagataaatcagatatctggttcctaaggacccggcggaccgattaaactgattcggtccgacgcgttacctaataacttcgtatagcatacattatacgaagttattagctaactaactagtaagcttaagccatgggtcgacggatccgttaactagcgtggcatttggcaccgccgcacactatgcgagctaggagtgctagtttacagatgaaactatgaaaccaagaaaacacaattgtccgtagctagcgcgtggcgtcgtgtcaagcttcacacagtatcttcgttcttcactataaatcgcgcctgttgttcgtgagacccaccaccgtggataacagtcccctaataataagcgatcaacagcactgctgatggctgaacaccgaggcgccgccgcgcgtaaccatccgccggagcagcccgtcgtgccggcgaacgacgccttccccgaccgcgcccagcagctctgcctcgacgccgggcgcgcgctcgcgatgtgcggcgtgctcgtcgccgtccctcccgcattttacgcgtcgacgtcgcggacgacaccgcacttgccttcgtcggcttcgtcctctggatcatcggtgcgtggctgtgcctcctggcgctcacgcccttggctccacgggcggtgagggcgggcggggccgccgccagcaccttgctgatcaggtgcctgtccctttcatgaactactagcgcccgcgcccgcggccgccgggcacaagagaacacatcgatgttcgctgcgtacgtcagcaataaggcactctttgtcagtagtcgagtgcatatgttgggtgtttgccctgggagatttcaagtgttgtggccattatcccgcaggataaaaaatcggcggcttttggattgatacggaaaataacgatgtttcatgctcgtgttgtgtgtgtgacatcttgtcagccaagtttttaaccgttgctactccccctctgtgggctcagtgtgtggaccggaatacgtcgtacataggccgtagcctaagcccaatatgccgtttttcaggttggcctgtgtgacgacaagcgggtctcaaaagcccatcacgcaactggcctgcaattattggaggagagcgcgtcgagttggttccagaggctgcgtggtggggccggactctgcgacgacctctcgttcgcgtccgatttggttgccgtgagccgtgacgtaacgcctccttccgttcctccctatataagttccacccccgggtccggtttccccaagccccagtgacccccgatcccgatcgcgaaatctccgcacccgccggcaagggaccgaagcaagcctctctcccgaccgtcgcatcaaggtacgcgtccgctcgatctgtcctcttccttctcgatttgacttgctgtggtgcccgatcacgggatcagaatcgcaccagtgtagatttcgcatgttctaagatgtgttagtttccaggctaatccagttctcttgacgcccgatccgatcgagctccgtgtttatttcagcctaatcgtagtattcccctaaaatttcctcattagggggttcgcaagattgttggtcgacaggttcacttatgctcgatcgcttacttttagtcgattcatgctgcgtactattgttgccccccgtggttttatcttttctcgtgtgaaatccagtagatatagtagatatcgtagcattaggttttaattcaatcgattgattattgtatcatcaaaattgagaagttcgaatcatgcctatcatgctgcctcaaccgaaatcctgtatattgaagtttcaattcaattgattgatcattcattagattcaaccaaaatctagaaggttagatgacgcatgtcatgctgcctgcgtagtttacctttgatctgtttatgattaccttatcagtaggatatttgtgattttgggaagtagcactaactgattcatgctgacatgatgttccctttcagattatactgttgagtcctatctaattgatgctttgtatgctatatgaatacgtcatggtaaattagcagttaattagcatattagcaattgggcgtacctcatcaggattgctcttgtagatgtgtgtggtgatgtttcttgttcaattcatgttctgctttaaaagtatgtgttctctgtttgttaattaagattcatggttataatgatttggacctaattaatcagggttgcccttttagatgcgtggttacttgttgagttcatttttttcctgctatagttgtatgcgtttgttcattcatggttagatttgatttgtttcttctctattccatgccttccatatacttcaattgtagcttaacatgagatttctgtatatgcaggtcgaccgccggggatccacacgacaccatggcccagtccaagcacggcctgaccaaggagatgaccatgaagtaccgcatggagggctgcgtggacggccacaagttcgtgatcaccggcgagggcatcggctaccccttcaagggcaagcaggccatcaacctgtgcgtggtggagggcggccccttgcccttcgccgaggacatcttgtccgccgccttcatgtacggcaaccgcgtgttcaccgagtacccccaggacatcgtcgactacttcaagaactcctgccccgccggctacacctgggaccgctccttcctgttcgaggacggcgccgtgtgcatctgcaacgccgacatcaccgtgagcgtggaggagaactgcatgtaccacgagtccaagttctacggcgtgaacttccccgccgacggccccgtgatgaagaagatgaccgacaactgggagccctcctgcgagaagatcatccccgtgcccaagcagggcatcttgaagggcgacgtgagcatgtacctgctgctgaaggacggtggccgcttgcgctgccagttcgacaccgtgtacaaggccaagtccgtgccccgcaagatgcccgactggcacttcatccagcacaagctgacccgcgaggaccgcagcgacgccaagaaccagaagtggcacctgaccgagcacgccatcgcctccggctccgccttgccctccggactcagatctcgatagagtcaacctagacttgtccatcttctggattggccaacttaattaatgtatgaaataaaaggatgcacacatagtgacatgctaatcactataatgtgggcatcaaagttgtgtgttatgtgtaattactagttatctgaataaaagagaaagagatcatccatatttcttatcctaaatgaatgtcacgtgtctttataattctttgatgaaccagatgcatttcattaaccaaatccatatacatataaatattaatcatatataattaatatcaattgggttagcaaaacaaatctagtctaggtgtgttttgcgaattgcggcgcccttactttaacgcctctaaccaacacccctttatctttataaggaacaataaacagaatttgccccactgttctaaatcacctaataatatccccagctaaaaacaataaaggtttcctagaattaagacaagcatgactgttcctccaggagggtttggaacattgttgcagtcttgcagatacgggcgaagggtgagaaacagagcggagggctggaggtgacctcggtagtcgacgccggagttgagcttgacaacgacggggcggcccctgatggacttgaggaagtccgatggcgtcttcaccgtcccgccggcgcccgaggcgggcctgtcgctgccgccgccgccgctgctcatcttgcgcgctgtgcccccggcggtgtccctgtgttgcggatcgcgggtgggccaggtggatgcgagggcgacccgtttggactccggccggagccgccggatccctggtcggtgtcagtgccgtttactctgggccccacgtgtcagtaccgtctgtagatgacaacaacccgtcgtccacagtcatgtccaaaatatcctttcttcttttttttcgattcggatatctatcttccttttttttttccaaaaatcttcttgacgcaccagcgcgcacgtttgtggtaaacgccgacacgtcggtcccacgtcgatagaccccacccaccagtgagtagcgtgtacgtattcgggggtgacggacgtgtcgccgtcgtcttgctagtcccattcccatctgagccacacatctctgaacaaaaaaaaggagggaggcctccacgcacatccccctccgtgccacccgccccaaaccctcgcgccgcctccgagacagccgccgcaaccatggccaccgccgccgccgcgtctaccgcgctcactggcgccactaccgctgcgcccaaggcgaggcgccgggcgcacctcctggccacccgccgcgccctcgccgcgcccatcaggtgctcagcggcgtcacccgccatgccgatggctcccccggccaccccgctccggccgtggggccccaccgagccccgcaagggtgctgacatcctcgtcgagtccctcgagcgctgcggcgtccgcgacgtcttcgcctaccccggcggcgcgtccatggagatccaccaggcactcacccgctcccccgtcatcgccaaccacctcttccgccacgagcaaggggaggcctttgccgcctccggctacgcgcgctcctcgggccgcgtcggcgtctgcatcgccacctccggccccggcgccaccaacctagtctccgcgctcgccgacgcgctgctcgattccgtccccatggtcgccatcacgggacaggtggcgcgacgcatgattggcaccgacgccttccaggagacgcccatcgtcgaggtcacccgctccatcaccaagcacaactacctggtcctcgacgtcgacgacatcccccgcgtcgtgcaggaggctttcttcctcgcctcctctggtcgaccagggccggtgcttgtcgacatccccaaggacatccagcagcagatggcggtgcctgtctgggacaagcccatgagtctgcctgggtacattgcgcgccttcccaagccccctgcgactgagttgcttgagcaggtgctgcgtcttgttggtgaatcgcggcgccctgttctttatgtgggcggtggctgcgcagcatctggtgaggagttgcgacgctttgtggagctgactggaatcccggtcacaactactcttatgggcctcggcaacttccccagcgacgacccactgtctctgcgcatgctaggtatgcatgggacggtgtatgcaaattatgcagtggataaggccgatctgttgcttgcacttggtgtgcggtttgatgatcgcgtgacagggaagattgaggcttttgcaagcagggctaagattgtgcacgttgatattgatccggctgagattggcaagaacaagcagccacatgtgtccatctgtgcagatgttaagcttgctttgcagggcatgaatgctcttcttgaaggaagcacatcaaagaagagctttgactttggctcatggaacgatgagttggatcagcagaagagggaattcccccttgggtataaaacatctaatgaggagatccagccacaatatgctattcaggttcttgatgagctgacgaaaggcgaggccatcatcggcacaggtgttgggcagcaccagatgtgggcggcacagtactacacttacaagcggccaaggcagtggttgtcttcagctggtcttggggctatgggatttggtttgccggctgctgctggtgcttctgtggcaaacccaggtgtcactgttgttgacatcgatggagatggtagctttctcatgaacgttcaggagctagctatgatccgaattgagaacctcccagtgaaggtctttgtgctaaacaaccagcacctggggatggtggtgcagttggaggacaggttctataaggccaacagagcgcacacatacttgggaaacccagagaatgaaagtgagatatatccagatttcgtgacgatcgccaaagggttcaacattccagcggtccgtgtgacaaagaagaacgaagtccgcgcagcgataaagaagatgctcgagactccagggccgtacctcttggatataatcgtcccacaccaggagcatgtgttgcctatgatccctagtggtggggctttcaaggatatgatcctggatggtgatggcaggactgtgtactgactagctagtcagttaacagatctgccagatcctcggtgtacaaataacccgtcttatcctatgagacgggccggcgtcagtgtgttctggaggaatttttatgtcagagcctttttctttgtgtgcttgatgtagatgccaagggaagcttattggctgttgaagcttgatgcaaaataaattatggaactctgttttttgtttatctaataataactagcaaatatgcttccattgcattgaaactaacagccttttgtgtttccaagttttattttgtgacaatgtcatctatttcaattagttgtggaatcggaaacttgcaggactaacttggaaactccaatccctcagcatcctggactttttcctggtgtaatccatgtagatattattttaatcatcattttagttctggaggtttttccatctccggttttgctcccctttcttcaaaaaaaaaaaaaaaatgccgtaggcgccgcaacgcccacctgttgttcaaactcatgggcacgagtggctcgaagattttatacaacaattgctgtagtttcaccgttgctggtgaagaagcatttttttaaaaaaatatagtggtattcattttaattagtttagttgtgcagcgagcaaaatttggacatgctctgctcggaatctgatcgacctagacacagattagcagcagtagctttgtcatctgttccaagagttgcgatctgatagaagaaaaaaaaaccttcccttcaatgtaaaaccgaaactaacaagaaagaagcacagtgccgtttaggcaagtatggagtacgtattaagcatgtagaaggccatgcatgaaccactaacaagaaagaagcgcagtgccattcaggcaagcataagcatgtagattggcatgcatgaacaactaacagtagatcgtctctggtctgattagaagttttttgggaagccaagaaatcatgtacaactggttccatctcaaattccgtggcaaaaagaggcctaagcaacatacctcgagtagatcacattcaagcttggtcacccggtccgtcaatattctgattccgatgacttcgtaggttcctagctcaagccgctcgtgtccaagcgtcacttacgattagctaatgattacggcatctaggaccgactagtggcgcgccgactagctagctaaggtaccgagctcgaattcattccgattaatcgtggcctcttgctcttcaggatgaagagctatgtttaaacgtgcaagcgctactagacaattcagtacattaaaaacgtccgcaatgtgttattaagttgtctaagcgtcaatttgtttacaccacaatatatcctgcca

SEQ ID NO: 256 - DNA, 23023 bp, Artificial Sequence
  PHP98329
gtttacccgccaatatatcctgtcaaacactgatagtttaaactgaaggcgggaaacgacaatctgatcatgagcggagaattaagggagtcacgttatgacccccgccgatgacgcgggacaagccgttttacgtttggaactgacagaaccgcaacgttgaaggagccactcagcaagctggtacgattgtaatacgactcactatagggcgaattgagcgctgtttaaacgctcttcaactggaagagcggttacgctgtttaaacgctcttcaactggaagagcggttactaccggttcactagctagctgctaatcgagctagttaccctatgaggtgacatgaagcgctcacggttactatgacggttagcttcacgactgttggtggcagtagcgtacgacttagctatagttccggacttacccttaagcgatttaaatctgcggttaccgaattcgagctcggtacctagtacccttgtacttttggtttcacctgcatagagaaaacccacaagaatatgacagtctgatttgtcagtctcattctcaagcaacatttctctatccgttactttcatggtgaataacacaatccatcatcaatactttgtgttactcagaaactgaaagttattccgagtcttgcatatctttggacctactcgtttttctaccattattgctgattgttaagctctcgctacttgaatcggcattgttggagtgggaaggttcaaaaaattggagttatgactagttgtctctttctatgtacgatggagaaaatgaataaacaactgagaaaatggctcttgtttagttgatgatgctcttaagctttccactggttgccatatatgatttgggcatttcactttgatcttaatgggccttgtaaagcccaagactcatgattatctttagttgatgctcttaattaggtgtgggcaaataattcaaactgtatgtacccgaccaaaaccaaagcaaaaataatcgaaccaaaccgaaaatttaaaaataaccgaatgaaaactaaatcctataactgaaagaactgaaaccgaatcaaaatatttaatgtaaccaaaaatatccgaaatataattatattgtcaaaaatattaataatttctagattaaataattaaaaatacttaaaaatttatataaaatagtaaaaatactcgaaaataaccacaaatattcaaaaacaaccgaaatatcccaaaatattcaaagcaaaataaccgaatggataccaaattttaaaaccgaaaaaactggaacaaaaccaaaatcgaaccaaaatttcaaaaatcgaataaatactaaactttagaacaaaaaaaaacgataaccgaatgtatacgaaccaaagccgaattagataaccgaacgtccaggactactcttaatctttccgccacttatgatttgggctattactttgtttataatgagccttttcaagctcaagttcatgattgtccgtgagatgagaaactgacttgttggattcgaaaccctagctagtattggttaatacttaatacataaatgacctgcattgacatcatcatccaagaaaataaaaattgtatgcttgagatatttagttttcctagctaggttttctttattttagtaccgaatctttaggtgtgccacgttaatttagacccattttttcatacttaccaactgagtctagtttaatcatgactataatcgtataaaatgattcagtcgacgtcattgcgaacgtatataaaatcatccaaattgacgtcattccaaagaggtaagcatgcttatctaagagtccgagcatactaaacaagacgacattttatttgcactccaaatcaaattttgtattgcctaaagaaaaacaatcaaactcaagtttcttaaaattaatttcattcaaactaatcactttcaatatctcacatattattcatgccatttctatttgtctaaacatgatttaaaaaaaaaagtaaaatacaaagattactatgcaaaaactctataaaaaaaaattcaaatttcttatttatttgtgacatcaaattttcaaaataatttttttaattatcggttgatccggtcagtcgataaaaacataaactttcagcgaccgttaaaactttcctactaccgatttagagaaaatcttagcttgaaacgtaattgtaacctgccttcatgcaagtcgcaagatatgtcatcctaagttgtatatgttttctcaaaagatgtatttacttgagaaaatacgtttcaacgttgatggacaaccaattaagaatcaagcacctttcgtaatcaatttaggcttatcgtctaaggtatactgatttacgacagttgactagacttataaggaacaaaataatagaatagtttctaaacacttcacctaatcatagagactaagatggtaattcgtaaacgacaaagcctagtgacactgtccattgtaaaattccacatcatattagtattaaacatatacatgtagtttcctgaacacatgtagtatcaaacacacttcgtggcttcttcctcgaaacctgcggccgcgctatagttccggacttacccttaagataacttcgtatagcatacattatacgaagttatgggcccacgcgtgaagagcggttaccagagctggtcacctttgtccaccaagatggaactgtcttcggccagaatggccatctggattcagcaggcctagaaggccatttatcgctatcaactttgtatagaaaagttgggccgaattcgagctcggtacggccagaatggcccggaccgaagcttgcggccgcacactgatagtttaaacctggtaattattggctgtaggattataaacagagcctaaatagctggaatagctctagccctcaatccaaactaatgatatctatacttatgcaactctaaatttttattctaaaagtaatatttcatttttgtcaacgagattctctactctattccacaatcttttgaagcaatatttaccttaaatctgtactctataccaataatcatatattctattatttatttttatctctctcctaaggagcatccccctatgtctgcatggcccccgcctcgggtcccaatctcttgctctgctagtagcacagaagaaaacactagaaatgacttgcttgacttagagtatcagataaacatcatgtttacttaactttaatttgtatcggtttctactatttttataatatttttgtctctatagatactacgtgcaacagtataatcaacctagtttaatccagagcgaaggattttttactaagtacgtgactccatatgcacagcgttccttttatggttcctcactgggcacagcataaacgaaccctgtccaatgttttcagcgcgaacaaacagaaattccatcagcgaacaaacaacatacatgcgagatgaaaataaataataaaaaaagctccgtctcgataggccggcacgaatcgagagcctccatagccagttttttccatcggaacggcgggtctcgacgtaagcgcttacgacgtaagcgcttacgtaattatatgcaccacacgcctataaagccaaccaacccgtcggaggggcgcaagccagacagaagacagcccgtcagcccctctcgtttttcatccgccttcgcctccaaccgcgtgcgctccacgcctcctccaggaagtgagcgcagtcccctttcccctccttccaattcaattcgtcttctcgttcgcagccctaggatttgggggtctggaggggtttgatcgtttctcgccgtgaatctgctttggtgtaaaccaacggatctcggatcgtagtcttcagaagatcccggattttgcggtttggcccctcctggattcaattcgtcgtatcgttcgcagccctaggatttggggatctggaggggtttgatcgtttctcgccgcgaatctgctctggtgtaaaccaacggatctcgggtcgtagtcttcagaaggtcccggattttgcggtttggcccctcctggattcaattcgtcgtatcgttcgcagccctaggatttggggatctggaggggtttgatcctttctcgccgcgaatctgctctggtataaccaacggatctcgggtcgtagtcttcagaaggtcccggattttgcggtttggtggttcttgctctatgaatcagagggatggttcttcccggatttatgccttgcggccactctgtcgaatcatggggtttcgacccgattcgtaggcgtgctccctgttttggatgggaagtaggcgtgtttgtagtattcgtgcttcgattcgtcaacggagattagaagacctgggatgggatttgaggaaatctaggtatctgtctagcacgtttctagatctattcttcagctgttatatgagagtaattttggaaccctggtggggtatgtttgaccgagtattctgtagattattgtccgtgacttgctggctgttaccgtccttatctctgcatcatctatctgtgctagtttctgcgtgcttctcaaatatttccggcctgtgtagcatgtgactgataatatgattttggcagcccgggggatctcgactctagaggatcgctcaggaaggccgctgagatagaggcatggcggccaatgcgggcggcggtggagcgggaggaggcagcggcagcggcagcgtggctgcgccggcggtgtgccgccccagcggctcgcggtggacgccgacgccggagcagatcaggatgctgaaggagctctactacggctgcggcatccggtcgcccagctcggagcagatccagcgcatcaccgccatgctgcggcagcacggcaagatcgagggcaagaacgtcttctactggttccagaaccacaaggcccgcgagcgccagaagcgccgcctcaccagcctcgacgtcaacgtgcccgccgccggcgcggccgacgccaccaccagccaactcggcgtcctctcgctgtcgtcgccgccgccttcaggcgcggcgcctccctcgcccaccctcggcttctacgccgccggcaatggcggcggatcggctgtgctgctggacacgagttccgactggggcagcagcggcgctgccatggccaccgagacatgcttcctgcaggactacatgggcgtgacggacacgggcagctcgtcgcagtggccacgcttctcgtcgtcggacacgataatggcggcggccgcggcgcgggcggcgacgacgcgggcgcccgagacgctccctctcttcccgacctgcggcgacgacggcggcagcggtagcagcagctacttgccgttctggggtgccgcgtccacaactgccggcgccacttcttccgttgcgatccagcagcaacaccagctgcaggagcagtacagcttttacagcaacagcaacagcacccagctggccggcaccggcaaccaagacgtatcggcaacagcagcagcagccgccgccctggagctgagcctcagctcatggtgctccccttaccctgctgcagggagtatgtgagagcaacgcgagctgccactgctcttcactgatgtctctggaatggaaggaggaggaagtgagcatagcgttggtgcgttgctgtcaagggcgaattcacatggttaacctagacttgtccatcttctggattggccaacttaattaatgtatgaaataaaaggatgcacacatagtgacatgctaatcactataatgtgggcatcaaagttgtgtgttatgtgtaattactagttatctgaataaaagagaaagagatcatccatatttcttatcctaaatgaatgtcacgtgtctttataattctttgatgaaccagatgcatttcattaaccaaatccatatacatataaatattaatcatatataattaatatcaattgggttagcaaaacaaatctagtctaggtgtgttttgcgaatgcggccgccaccgcggtggagctcgaattccggtccgggcctagaaggccagcttcaagtttgtacaaaaaagcaggctccggccagaatggcccggaccgggttaccgaattcgagctcggtaccatttaaattgcgcccgccacggccgtggaggtcgtattccggtcagcttgcatccctgcagtgcagcgtgacccggtcgtgcccctctctagagataatgagcattgcatgtctaagttataaaaaattaccacatattttttttgtcacacttgtttgaagtgcagtttatctatctttatacatatatttaaactttactctacgaataatataatctatagtactacaataatatcagtgttttagagaatcatataaatgaacagttagacatggtctaaaggacaattgagtattttgacaacaggactctacagttttatctttttagtgtgcatgtgttctcctttttttttgcaaatagcttcacctatataatacttcatccattttattagtacatccatttagggtttagggttaatggtttttatagactaatttttttagtacatctattttattctattttagcctctaaattaagaaaactaaaactctattttagtttttttatttaataatttagatataaaatagaataaaataaagtgactaaaaattaaacaaataccctttaagaaattaaaaaaactaaggaaacatttttcttgtttcgagtagataatgccagcctgttaaacgccgtcgacgagtctaacggacaccaaccagcgaaccagcagcgtcgcgtcgggccaagcgaagcagacggcacggcatctctgtcgctgcctctggacccctctcgagagttccgctccaccgttggacttgctccgctgtcggcatccagaaattgcgtggcggagcggcagacgtgagccggcacggcaggcggcctcctcctcctctcacggcaccggcagctacgggggattcctttcccaccgctccttcgctttcccttcctcgcccgccgtaataaatagacaccccctccacaccctctttccccaacctcgtgttgttcggagcgcacacacacacaaccagatctcccccaaatccacccgtcggcacctccgcttcaaggtacgccgctcgtcctcccccccccccctctctaccttctctagatcggcgttccggtccatgcatggttagggcccggtagttctacttctgttcatgtttgtgttagatccgtgtttgtgttagatccgtgctgctagcgttcgtacacggatgcgacctgtacgtcagacacgttctgattgctaacttgccagtgtttctctttggggaatcctgggatggctctagccgttccgcagacgggatcgatttcatgattttttttgtttcgttgcatagggtttggtttgcccttttcctttatttcaatatatgccgtgcacttgtttgtcgggtcatcttttcatgcttttttttgtcttggttgtgatgatgtggtctggttgggcggtcgttctagatcggagtagaattctgtttcaaactacctggtggatttattaattttggatctgtatgtgtgtgccatacatattcatagttacgaattgaagatgatggatggaaatatcgatctaggataggtatacatgttgatgcgggttttactgatgcatatacagagatgctttttgttcgcttggttgtgatgatgtggtgtggttgggcggtcgttcattcgttctagatcggagtagaatactgtttcaaactacctggtgtatttattaattttggaactgtatgtgtgtgtcatacatcttcatagttacgagtttaagatggatggaaatatcgatctaggataggtatacatgttgatgtgggttttactgatgcatatacatgatggcatatgcagcatctattcatatgctctaaccttgagtacctatctattataataaacaagtatgttttataattattttgatcttgatatacttggatgatggcatatgcagcagctatatgtggatttttttagccctgccttcatacgctatttatttgcttggtactgtttcttttgtcgatgctcaccctgttgtttggtgttacttctgcaggtcgactctagaggatccatggccactgtgaacaactggctcgctttctccctctccccgcaggagctgccgccctcccagacgacggactccacactcatctcggccgccaccgccgaccatgtctccggcgatgtctgcttcaacatcccccaagattggagcatgaggggatcagagctttcggcgctcgtcgcggagccgaagctggaggacttcctcggcggcatctccttctccgagcagcatcacaaggccaactgcaacatgatacccagcactagcagcacagtttgctacgcgagctcaggtgctagcaccggctaccatcaccagctgtaccaccagcccaccagctcagcgctccacttcgcggactccgtaatggtggcttcctcggccggtgtccacgacggcggtgccatgctcagcgcggccgccgctaacggtgtcgctggcgctgccagtgccaacggcggcggcatcgggctgtccatgattaagaactggctgcggagccaaccggcgcccatgcagccgagggtggcggcggctgagggcgcgcaggggctctctttgtccatgaacatggcggggacgacccaaggcgctgctggcatgccacttctcgctggagagcgcgcacgggcgcccgagagtgtatcgacgtcagcacagggtggagccgtcgtcgtcacggcgccgaaggaggatagcggtggcagcggtgttgccggcgctctagtagccgtgagcacggacacgggtggcagcggcggcgcgtcggctgacaacacggcaaggaagacggtggacacgttcgggcagcgcacgtcgatttaccgtggcgtgacaaggcatagatggactgggagatatgaggcacatctttgggataacagttgcagaagggaagggcaaactcgtaagggtcgtcaagtctatttaggtggctatgataaagaggagaaagctgctagggcttatgatcttgctgctctgaagtactggggtgccacaacaacaacaaattttccagtgagtaactacgaaaaggagctcgaggacatgaagcacatgacaaggcaggagtttgtagcgtctctgagaaggaagagcagtggtttctccagaggtgcatccatttacaggggagtgactaggcatcaccaacatggaagatggcaagcacggattggacgagttgcagggaacaaggatctttacttgggcaccttcagcacccaggaggaggcagcggaggcgtacgacatcgcggcgatcaagttccgcggcctcaacgccgtcaccaacttcgacatgagccgctacgacgtgaagagcatcctggacagcagcgccctccccatcggcagcgccgccaagcgcctcaaggaggccgaggccgcagcgtccgcgcagcaccaccacgccggcgtggtgagctacgacgtcggccgcatcgcctcgcagctcggcgacggcggagccctggcggcggcgtacggcgcgcactaccacggcgccgcctggccgaccatcgcgttccagccgggcgccgccagcacaggcctgtaccacccgtacgcgcagcagccaatgcgcggcggcgggtggtgcaagcaggagcaggaccacgcggtgatcgcggccgcgcacagcctgcaggacctccaccacctgaacctgggcgcggccggcgcgcacgactttttctcggcagggcagcaggccgccgccgctgcgatgcacggcctgggtagcatcgacagtgcgtcgctcgagcacagcaccggctccaactccgtcgtctacaacggcggggtcggcgacagcaacggcgccagcgccgtcggcggcagtggcggtggctacatgatgccgatgagcgctgccggagcaaccactacatcggcaatggtgagccacgagcaggtgcatgcacgggcctacgacgaagccaagcaggctgctcagatggggtacgagagctacctggtgaacgcggagaacaatggtggcggaaggatgtctgcatgggggactgtcgtgtctgcagccgcggcggcagcagcaagcagcaacgacaacatggccgccgacgtcgggcatggcggcgcgcagctcttcagtgtctggaacgacacttaagcgtacgtgccggcctggctctccgaaagggcgtattccagcacactggcggccgttactagacccaacctagacttgtccatcttctggattggccaacttaattaatgtatgaaataaaaggatgcacacatagtgacatgctaatcactataatgtgggcatcaaagttgtgtgttatgtgtaattactagttatctgaataaaagagaaagagatcatccatatttcttatcctaaatgaatgtcacgtgtctttataattctttgatgaaccagatgcatttcattaaccaaatccatatacatataaatattaatcatatataattaatatcaattgggttagcaaaacaaatctagtctaggtgtgttttgcgaatgcggcctccgggcacccagctttcttgtacaaagtggccgttaacggatcggccagaatggcccggaccgggttaccgaattcgagctcggtaccctggttcacaaactcaatacaacacacagtggagtagggtattacgctccggcggcccgaaccactctaaatccttgtgtcctcgtgtgctcttccaccattaatgactgtaattgcagggacacgaagagttgtagcgcttttgccaacaagatccgctatatgctagtagagtggaacctgcacagcaacaagcatccaataatctgagaataagaattatgtgtggtgatggttctcatctctgcaactcgccattttcgcgagagaaccaaatccaagttggtgaagatcatgatttgggctcatgggctggcatagtagctattacctttgcaattgtggttcgaatctatccgatattctccttttcagggagagctaatgcttatgcttattgggtattttggtttgacactgcttcacgcccaaaaaaaggcaactatgtctgagttggatatggcccaaaaaaaggcagctatgtctgagttggatatggaagtcttctttcgtttagggtgaagtaagaccaagctcatgagcttattatcttaggtcggaacaaattagttgataggcatggcacatttatcaaattataatgattttaacagaaaagcaacacctctttttcagcagcaccagctttgcaagctgcaattgacactccaagcatagtatttgctccaaactcagcctgcatttcgcacaatatcatatctatttccatttggataaaatatattttccagaaatatgggaacagaatcaagatacagaaaaaagttgtggtagtagtggtaagtggaaacacaagtacagtgaaaagatagcattatttctgaacagtcaaattaaccgaaataagtagtatcacatactgcccctaaattgactacacccaatgtaaagaattgcttgagcatattgagccatcagttgtttgtttgtgtaacggatttgacaatgcagagttcaggagcaaaaaaccgcaaaggagagaaagagggaaaggatctcctagtatcccaccttgtggcgcgccctgtcaagtgcatgatggcctggtcgatctgcgtctgctgctgcggttccatcccaacgagtgcctccgacaccttgtcgttgatcacccgcaccgcgtaggcgacccccctggcgaggaacttccgcctctcggaggccccggccgcgtcggcggcggcgccctcgagcgcgcccacgctagccgtagatgctcggtgcacggccttgttggtgtgcaactcgacctcaacggccggtgcgctacgcccgtcaaggatctggcgcgcccgcaccctcgtgatcacggtgggcgcctcccgcctcatgtggccgacgatgaaaagcgccgggttaggggccttggcgcgcaccgccgtattcagggcctcctcgctcttgcgcgagagcaggtgcttccccaggtactcctgcactgacaaggctgccacagcggtggaatttgtcctcacgacttcgccacgtcgtcctcacctccctggcttcccacgactccgccgtatcgaggtgctcggtgggtcgtcttaatccgaagtccgaactaggaagacgagacagagaggtctgaggaatgggcctcgtttgatgttgagctgaattatttttccagcataagcccaggtcttggtccatgaacaaaattactagaaacccagcccagtactacgatctaaaagagggactgccactggatagctctctctagcattctccacgctccaatacagcggcgtcgtgtctatccgggtctatccgcgaacacgtgagaactctccagaaactgctttctcctccacttcatctctctcgctttccctctataaaaagaccccttctaggaattgagggagacagcaagcaccaagcagcgatccgaagctcaatcaattcactcaaacctcttccccaaatcttcgattagatcttcgttgacaagaagactagaaccgaacctgacatgtccaacctgctcacggttcaccagaaccttccggctcttccagtggacgcgacgtccgatgaagtcaggaagaacctcatggacatgttccgcgacaggcaagcgttcagcgagcacacctggaagatgctgctctccgtctgccgctcctgggctgcatggtgcaagctgaacaacaggaagtggttccccgctgagcccgaggacgtgagggattaccttctgtacctgcaagcgcgaggtttgtttctgcttctacctttgatatatatataataattatcattaattagtagtaatataatatttcaaatatttttttcaaaataaaagaatgtagtatatagcaattgcttttctgtagtttataagtgtgtatattttaatttataacttttctaatatatgaccaaaacatggtgatgcctaggtctggcagtgaagaccatccagcaacaccttggacaactgaacatgcttcacaggcgctccggcctcccgcgccccagcgactcgaacgccgtgagcctcgtcatgcgccgcatcaggaaggaaaacgtcgatgccggcgaaagggcaaagcaggccctcgcgttcgagaggaccgatttcgaccaggtccgcagcctgatggagaacagcgacaggtgccaggacattaggaacctggcgttcctcggaattgcatacaacacgctcctcaggatcgcggaaattgcccgcattcgcgtgaaggacattagccgcaccgacggcggcaggatgcttatccacattggcaggaccaagacgctcgtttccaccgcaggcgtcgaaaaggccctcagcctcggagtgaccaagctcgtcgaacgctggatctccgtgtccggcgtcgcggacgacccaaacaactacctcttctgccgcgtccgcaagaacggggtggctgcccctagcgccaccagccaactcagcacgagggccttggaaggtattttcgaggccacccaccgcctgatctacggcgcgaaggatgacagcggtcaacgctacctcgcatggtccgggcactccgcccgcgttggagctgctagggacatggcccgcgccggtgtttccatccccgaaatcatgcaggcgggtggatggacgaacgtgaacattgtcatgaactacattcgcaaccttgacagcgagacgggcgcaatggttcgcctcctggaagatggtgactgaggtacccaacctagacttgtccatcttctggattggccaacttaattaatgtatgaaataaaaggatgcacacatagtgacatgctaatcactataatgtgggcatcaaagttgtgtgttatgtgtaattactagttatctgaataaaagagaaagagatcatccatatttcttatcctaaatgaatgtcacgtgtctttataattctttgatgaaccagatgcatttcattaaccaaatccatatacatataaatattaatcatatataattaatatcaattgggttagcaaaacaaatctagtctaggtgtgttttgcgatccgatatcgaattggccacggtaccagctgctgctgttctagggttcacaagtctgcctatttgtcttccccaatggagctatggttgtctggtctggtccttggtcgtgtcccgtttcattgtgtactatttacctgtaatgtgtatccttaagtctggtttgatggtgtctgaaacgttttgctgtggtagagcagcatggaagaactataatgaataagtgatccctaatcattgtgtccaaattttgcttctgctatacccttttgtgctgtttcttatgttttgcttaaaaatttgatctgacaaacaaatttgtctaaattatgctcttgttctgactgtgtactgtacacatttgtattgctaccggtttggcacatagttttctctttgattgcagatcaaacccttctgattgcagattgcttggctatggctgatgtgctcactgttcttctttagcttgtatattgctgatggtggcttggctacggctgaaaaagttgctgctgcgccgacttggcaactgttgctccagtaatgctttgtcctctcttcctagccgccgacttggcacttggcagctgttgctcctgtaatgcgttgttatctcttatctcttgagatgtactatgattttgaggctgtttgacttgtgccagattgccagtgctgatgctatattatctcaggtttttatgctagtatatgttttactgtgtgctgcctgtgtcgagttacgtaatctattgaaccgctatgcgtgttgatgccctgttgttgcttgccagattgatgcccctgttgcttgcagcttgcaagctgtagtgaaatcctaaaattccaaaccaaatctattctgaacttttgaagatctgtgatgtccggaagaaaagattcaaacagataaacgggactctccagaatctataaaataaatgatcgacaaacgctttgctttggtaggcttcaagcttggtcacccggtccgggcctagaaggccagcttcggccgccccgggcaactttattatacaaagttgatagataaatcagatatctggttcctaaggacccggcggaccgattaaactgattcggtccgacgcgttacctaataacttcgtatagcatacattatacgaagttattagctaactaactagtaagcttaagccatgggtcgacggatccgttaactagcgtggcatttggcaccgccgcacactatgcgagctaggagtgctagtttacagatgaaactatgaaaccaagaaaacacaattgtccgtagctagcgcgtggcgtcgtgtcaagcttcacacagtatcttcgttcttcactataaatcgcgcctgttgttcgtgagacccaccaccgtggataacagtcccctaataataagcgatcaacagcactgctgatggctgaacaccgaggcgccgccgcgcgtaaccatccgccggagcagcccgtcgtgccggcgaacgacgccttccccgaccgcgcccagcagctctgcctcgacgccgggcgcgcgctcgcgatgtgcggcgtgctcgtcgccgtccctcccgcattttacgcgtcgacgtcgcggacgacaccgcacttgccttcgtcggcttcgtcctctggatcatcggtgcgtggctgtgcctcctggcgctcacgcccttggctccacgggcggtgagggcgggcggggccgccgccagcaccttgctgatcaggtgcctgtccctttcatgaactactagcgcccgcgcccgcggccgccgggcacaagagaacacatcgatgttcgctgcgtacgtcagcaataaggcactctttgtcagtagtcgagtgcatatgttgggtgtttgccctgggagatttcaagtgttgtggccattatcccgcaggataaaaaatcggcggcttttggattgatacggaaaataacgatgtttcatgctcgtgttgtgtgtgtgacatcttgtcagccaagtttttaaccgttgctactccccctctgtgggctcagtgtgtggaccggaatacgtcgtacataggccgtagcctaagcccaatatgccgtttttcaggttggcctgtgtgacgacaagcgggtctcaaaagcccatcacgcaactggcctgcaattattggaggagagcgcgtcgagttggttccagaggctgcgtggtggggccggactctgcgacgacctctcgttcgcgtccgatttggttgccgtgagccgtgacgtaacgcctccttccgttcctccctatataagttccacccccgggtccggtttccccaagccccagtgacccccgatcccgatcgcgaaatctccgcacccgccggcaagggaccgaagcaagcctctctcccgaccgtcgcatcaaggtacgcgtccgctcgatctgtcctcttccttctcgatttgacttgctgtggtgcccgatcacgggatcagaatcgcaccagtgtagatttcgcatgttctaagatgtgttagtttccaggctaatccagttctcttgacgcccgatccgatcgagctccgtgtttatttcagcctaatcgtagtattcccctaaaatttcctcattagggggttcgcaagattgttggtcgacaggttcacttatgctcgatcgcttacttttagtcgattcatgctgcgtactattgttgccccccgtggttttatcttttctcgtgtgaaatccagtagatatagtagatatcgtagcattaggttttaattcaatcgattgattattgtatcatcaaaattgagaagttcgaatcatgcctatcatgctgcctcaaccgaaatcctgtatattgaagtttcaattcaattgattgatcattcattagattcaaccaaaatctagaaggttagatgacgcatgtcatgctgcctgcgtagtttacctttgatctgtttatgattaccttatcagtaggatatttgtgattttgggaagtagcactaactgattcatgctgacatgatgttccctttcagattatactgttgagtcctatctaattgatgctttgtatgctatatgaatacgtcatggtaaattagcagttaattagcatattagcaattgggcgtacctcatcaggattgctcttgtagatgtgtgtggtgatgtttcttgttcaattcatgttctgctttaaaagtatgtgttctctgtttgttaattaagattcatggttataatgatttggacctaattaatcagggttgcccttttagatgcgtggttacttgttgagttcatttttttcctgctatagttgtatgcgtttgttcattcatggttagatttgatttgtttcttctctattccatgccttccatatacttcaattgtagcttaacatgagatttctgtatatgcaggtcgaccgccggggatccacacgacaccatggcccagtccaagcacggcctgaccaaggagatgaccatgaagtaccgcatggagggctgcgtggacggccacaagttcgtgatcaccggcgagggcatcggctaccccttcaagggcaagcaggccatcaacctgtgcgtggtggagggcggccccttgcccttcgccgaggacatcttgtccgccgccttcatgtacggcaaccgcgtgttcaccgagtacccccaggacatcgtcgactacttcaagaactcctgccccgccggctacacctgggaccgctccttcctgttcgaggacggcgccgtgtgcatctgcaacgccgacatcaccgtgagcgtggaggagaactgcatgtaccacgagtccaagttctacggcgtgaacttccccgccgacggccccgtgatgaagaagatgaccgacaactgggagccctcctgcgagaagatcatccccgtgcccaagcagggcatcttgaagggcgacgtgagcatgtacctgctgctgaaggacggtggccgcttgcgctgccagttcgacaccgtgtacaaggccaagtccgtgccccgcaagatgcccgactggcacttcatccagcacaagctgacccgcgaggaccgcagcgacgccaagaaccagaagtggcacctgaccgagcacgccatcgcctccggctccgccttgccctccggactcagatctcgatagagtcaacctagacttgtccatcttctggattggccaacttaattaatgtatgaaataaaaggatgcacacatagtgacatgctaatcactataatgtgggcatcaaagttgtgtgttatgtgtaattactagttatctgaataaaagagaaagagatcatccatatttcttatcctaaatgaatgtcacgtgtctttataattctttgatgaaccagatgcatttcattaaccaaatccatatacatataaatattaatcatatataattaatatcaattgggttagcaaaacaaatctagtctaggtgtgttttgcgaattgcggcgcccttactttaacgcctctaaccaacacccctttatctttataaggaacaataaacagaatttgccccactgttctaaatcacctaataatatccccagctaaaaacaataaaggtttcctagaattaagacaagcatgactgttcctccaggagggtttggaacattgttgcagtcttgcagatacgggcgaagggtgagaaacagagcggagggctggaggtgacctcggtagtcgacgccggagttgagcttgacaacgacggggcggcccctgatggacttgaggaagtccgatggcgtcttcaccgtcccgccggcgcccgaggcgggcctgtcgctgccgccgccgccgctgctcatcttgcgcgctgtgcccccggcggtgtccctgtgttgcggatcgcgggtgggccaggtggatgcgagggcgacccgtttggactccggccggagccgccggatccctggtcggtgtcagtgccgtttactctgggccccacgtgtcagtaccgtctgtagatgacaacaacccgtcgtccacagtcatgtccaaaatatcctttcttcttttttttcgattcggatatctatcttccttttttttttccaaaaatcttcttgacgcaccagcgcgcacgtttgtggtaaacgccgacacgtcggtcccacgtcgatagaccccacccaccagtgagtagcgtgtacgtattcgggggtgacggacgtgtcgccgtcgtcttgctagtcccattcccatctgagccacacatctctgaacaaaaaaaaggagggaggcctccacgcacatccccctccgtgccacccgccccaaaccctcgcgccgcctccgagacagccgccgcaaccatggccaccgccgccgccgcgtctaccgcgctcactggcgccactaccgctgcgcccaaggcgaggcgccgggcgcacctcctggccacccgccgcgccctcgccgcgcccatcaggtgctcagcggcgtcacccgccatgccgatggctcccccggccaccccgctccggccgtggggccccaccgagccccgcaagggtgctgacatcctcgtcgagtccctcgagcgctgcggcgtccgcgacgtcttcgcctaccccggcggcgcgtccatggagatccaccaggcactcacccgctcccccgtcatcgccaaccacctcttccgccacgagcaaggggaggcctttgccgcctccggctacgcgcgctcctcgggccgcgtcggcgtctgcatcgccacctccggccccggcgccaccaacctagtctccgcgctcgccgacgcgctgctcgattccgtccccatggtcgccatcacgggacaggtggcgcgacgcatgattggcaccgacgccttccaggagacgcccatcgtcgaggtcacccgctccatcaccaagcacaactacctggtcctcgacgtcgacgacatcccccgcgtcgtgcaggaggctttcttcctcgcctcctctggtcgaccagggccggtgcttgtcgacatccccaaggacatccagcagcagatggcggtgcctgtctgggacaagcccatgagtctgcctgggtacattgcgcgccttcccaagccccctgcgactgagttgcttgagcaggtgctgcgtcttgttggtgaatcgcggcgccctgttctttatgtgggcggtggctgcgcagcatctggtgaggagttgcgacgctttgtggagctgactggaatcccggtcacaactactcttatgggcctcggcaacttccccagcgacgacccactgtctctgcgcatgctaggtatgcatgggacggtgtatgcaaattatgcagtggataaggccgatctgttgcttgcacttggtgtgcggtttgatgatcgcgtgacagggaagattgaggcttttgcaagcagggctaagattgtgcacgttgatattgatccggctgagattggcaagaacaagcagccacatgtgtccatctgtgcagatgttaagcttgctttgcagggcatgaatgctcttcttgaaggaagcacatcaaagaagagctttgactttggctcatggaacgatgagttggatcagcagaagagggaattcccccttgggtataaaacatctaatgaggagatccagccacaatatgctattcaggttcttgatgagctgacgaaaggcgaggccatcatcggcacaggtgttgggcagcaccagatgtgggcggcacagtactacacttacaagcggccaaggcagtggttgtcttcagctggtcttggggctatgggatttggtttgccggctgctgctggtgcttctgtggcaaacccaggtgtcactgttgttgacatcgatggagatggtagctttctcatgaacgttcaggagctagctatgatccgaattgagaacctcccagtgaaggtctttgtgctaaacaaccagcacctggggatggtggtgcagttggaggacaggttctataaggccaacagagcgcacacatacttgggaaacccagagaatgaaagtgagatatatccagatttcgtgacgatcgccaaagggttcaacattccagcggtccgtgtgacaaagaagaacgaagtccgcgcagcgataaagaagatgctcgagactccagggccgtacctcttggatataatcgtcccacaccaggagcatgtgttgcctatgatccctagtggtggggctttcaaggatatgatcctggatggtgatggcaggactgtgtactgactagctagtcagttaacagatctgccagatcctcggtgtacaaataacccgtcttatcctatgagacgggccggcgtcagtgtgttctggaggaatttttatgtcagagcctttttctttgtgtgcttgatgtagatgccaagggaagcttattggctgttgaagcttgatgcaaaataaattatggaactctgttttttgtttatctaataataactagcaaatatgcttccattgcattgaaactaacagccttttgtgtttccaagttttattttgtgacaatgtcatctatttcaattagttgtggaatcggaaacttgcaggactaacttggaaactccaatccctcagcatcctggactttttcctggtgtaatccatgtagatattattttaatcatcattttagttctggaggtttttccatctccggttttgctcccctttcttcaaaaaaaaaaaaaaaatgccgtaggcgccgcaacgcccacctgttgttcaaactcatgggcacgagtggctcgaagattttatacaacaattgctgtagtttcaccgttgctggtgaagaagcatttttttaaaaaaatatagtggtattcattttaattagtttagttgtgcagcgagcaaaatttggacatgctctgctcggaatctgatcgacctagacacagattagcagcagtagctttgtcatctgttccaagagttgcgatctgatagaagaaaaaaaaaccttcccttcaatgtaaaaccgaaactaacaagaaagaagcacagtgccgtttaggcaagtatggagtacgtattaagcatgtagaaggccatgcatgaaccactaacaagaaagaagcgcagtgccattcaggcaagcataagcatgtagattggcatgcatgaacaactaacagtagatcgtctctggtctgattagaagttttttgggaagccaagaaatcatgtacaactggttccatctcaaattccgtggcaaaaagaggcctaagcaacatacctcgagtagatcacattcaagcttggtcacccggtccgtcaatattctgattccgatgacttcgtaggttcctagctcaagccgctcgtgtccaagcgtcacttacgattagctaatgattacggcatctaggaccgactagtggcgcgccgactagctagctaaggtaccgagctcgaattcattccgattaatcgtggcctcttgctcttcaggatgaagagctatgtttaaacgtgcaagcgctactagacaattcagtacattaaaaacgtccgcaatgtgttattaagttgtctaagcgtcaatttgtttacaccacaatatatcctgcca

SEQ ID NO: 257 - DNA, 26157 bp, Artificial Sequence
  PHP98327
gtttacccgccaatatatcctgtcaaacactgatagtttaaactgaaggcgggaaacgacaatctgatcatgagcggagaattaagggagtcacgttatgacccccgccgatgacgcgggacaagccgttttacgtttggaactgacagaaccgcaacgttgaaggagccactcagcaagctggtacgattgtaatacgactcactatagggcgaattgagcgctgtttaaacgctcttcaactggaagagcggttacgctgtttaaacgctcttcaactggaagagcggttactaccggttcactagctagctgctaatcgagctagttaccctatgaggtgacatgaagcgctcacggttactatgacggttagcttcacgactgttggtggcagtagcgtacgacttagctatagttccggacttacccttaagcgatttaaatctgcggttaccgaattcgagctcggtacctagtacccttgtacttttggtttcacctgcatagagaaaacccacaagaatatgacagtctgatttgtcagtctcattctcaagcaacatttctctatccgttactttcatggtgaataacacaatccatcatcaatactttgtgttactcagaaactgaaagttattccgagtcttgcatatctttggacctactcgtttttctaccattattgctgattgttaagctctcgctacttgaatcggcattgttggagtgggaaggttcaaaaaattggagttatgactagttgtctctttctatgtacgatggagaaaatgaataaacaactgagaaaatggctcttgtttagttgatgatgctcttaagctttccactggttgccatatatgatttgggcatttcactttgatcttaatgggccttgtaaagcccaagactcatgattatctttagttgatgctcttaattaggtgtgggcaaataattcaaactgtatgtacccgaccaaaaccaaagcaaaaataatcgaaccaaaccgaaaatttaaaaataaccgaatgaaaactaaatcctataactgaaagaactgaaaccgaatcaaaatatttaatgtaaccaaaaatatccgaaatataattatattgtcaaaaatattaataatttctagattaaataattaaaaatacttaaaaatttatataaaatagtaaaaatactcgaaaataaccacaaatattcaaaaacaaccgaaatatcccaaaatattcaaagcaaaataaccgaatggataccaaattttaaaaccgaaaaaactggaacaaaaccaaaatcgaaccaaaatttcaaaaatcgaataaatactaaactttagaacaaaaaaaaacgataaccgaatgtatacgaaccaaagccgaattagataaccgaacgtccaggactactcttaatctttccgccacttatgatttgggctattactttgtttataatgagccttttcaagctcaagttcatgattgtccgtgagatgagaaactgacttgttggattcgaaaccctagctagtattggttaatacttaatacataaatgacctgcattgacatcatcatccaagaaaataaaaattgtatgcttgagatatttagttttcctagctaggttttctttattttagtaccgaatctttaggtgtgccacgttaatttagacccattttttcatacttaccaactgagtctagtttaatcatgactataatcgtataaaatgattcagtcgacgtcattgcgaacgtatataaaatcatccaaattgacgtcattccaaagaggtaagcatgcttatctaagagtccgagcatactaaacaagacgacattttatttgcactccaaatcaaattttgtattgcctaaagaaaaacaatcaaactcaagtttcttaaaattaatttcattcaaactaatcactttcaatatctcacatattattcatgccatttctatttgtctaaacatgatttaaaaaaaaaagtaaaatacaaagattactatgcaaaaactctataaaaaaaaattcaaatttcttatttatttgtgacatcaaattttcaaaataatttttttaattatcggttgatccggtcagtcgataaaaacataaactttcagcgaccgttaaaactttcctactaccgatttagagaaaatcttagcttgaaacgtaattgtaacctgccttcatgcaagtcgcaagatatgtcatcctaagttgtatatgttttctcaaaagatgtatttacttgagaaaatacgtttcaacgttgatggacaaccaattaagaatcaagcacctttcgtaatcaatttaggcttatcgtctaaggtatactgatttacgacagttgactagacttataaggaacaaaataatagaatagtttctaaacacttcacctaatcatagagactaagatggtaattcgtaaacgacaaagcctagtgacactgtccattgtaaaattccacatcatattagtattaaacatatacatgtagtttcctgaacacatgtagtatcaaacacacttcgtggcttcttcctcgaaacctgcggccgcgctatagttccggacttacccttaagataacttcgtatagcatacattatacgaagttatgggcccacgcgtgaagagcggttaccagagctggtcacctttgtccaccaagatggaactgtcttcggccagaatggccatctggattcagcaggcctagaaggccatttatcgctatcaactttgtatagaaaagttgggccgaattcgagctcggtacggccagaatggcccggaccgaagcttgcggccgcacactgatagtttaaacccgcgtgcgccgtggaatccgcctggatcgctgggggcgtttccaactgatcccccgcggccttccgtcgaatccgcctggatcggccgccacttggcaggccgcgaaggatctcagcccaggaaaagcccacggctccaaggcgcaaatgaaagaggagaagagaaaatcgtgagaaaactcactggaggagaaaaatggctatagtaaaattagtgaaatacccaatccggaaaaaacgtctagtgcttcgcctacttcctcaaacaaaagagacgcgcgaagggcagagcctcagccacccagcagtaatagcagccgtggtgcccgttgagattccccgcgccgttccgtcgaatcgatcagccgcgcgcccggcgcccctgcacatatattatacccaatgcccacacctcacaaccacttgctaacgcgcgcggcggtgacctaggctgcggtggactggtcatcgctccccgccgacgtgttcctagccaccaccggtctcgactactacatgagcctccgcgccgcgtgccgcccctgccgcgccgccaccgcggacccgcgcggtccggaccggcgcttccatccccgccggtggatcatgctcgaactgaatatccatgtttcaagagatattgttaagtccaaagctttcaaactgaatatccatgtttcatcgaaatagggtacaaaactttcgagtttgtggatgttcaacccaaaatccataacatacaacggttcagcctatttcttgagttgacagttcgcaattcctagtggcaatgaatacatgctagctactcccctttaactaatgaatacttggctcgaaacctctcgaccattgagcttaatgagtccagccgagtttgattttgaactggtcaacgaaacatttgagtcaagccgagcataattctgagttcgttaataaaacaactttaaccactcaagcaacgagctactcgtttaacaccatcccctcttctccccttggtccttggtccatccctctttttgacctaactcaatatccacccacattccttgacacacaagcaaaaccactcttgactcgcgtcctcctctcatatggcatatatgttaatttattaacgatcgagttaaacaaaccaattttgtagttaaattgagtcgagcccatgtcgcttttgaacatgatatactattaacgagtcgagctaactgttgtaactagtgtgttatcttaattggttctaccaattcgagccaagctaactactccctccgttacataaagattggcacggatatccggctctactcacacggacatgtggtcataatgcaaaagatgcaaatgaacaattctgaacaggagatttgatatcagaacctttggttatgtggcatgtgcctttaaccgtgtggagctaacaatttaacttaatccgtattataatctcacgcacactgtgcttgattcttcttgctttgcttcccttggtgcgggtgcacatctcagagcatacggacggtatagaaagaaggtgcagtgcgtcccagactaaccaaactttttttttggctatacaaaatgcacggttgtttgttgcacgcaacgacgattgttccttttgccaaagtaaataaataagcatctctcgtcgaagatcattatttttctaattctctacctcgtgaaagctggaagtggccacgtcaccggcaaaactaaccaacggtaatatctcccggaaaaatccaccgagccagcccttcgctagcgccaaagaagttcaccgcgcgcacggccaaaatccacgcaagaccagcgaaatctcgtggtctccactctctgctcgcccggcgcggcgagaagataatctcatggccaccgcacggccacatcagcgagccaccgcagcatccccgtgaggacattgaccccaccccatcgccctcggctcagactcaaacccatcaaaaatccgcgcgcgcccacggtgccagccactccgtggccagagcgcggccacctcggcaacccccatccgccttcccggcacctcacagcgcgcgcgccaatggcgactcggcttaagattccccgtggataaggactcgaacgtaagcgcttacgacgtaagcgcttacgtcgcgcgcgttcgggcctcctatttaaacgcctctcgctcccgctttactccacagcaacaaccgctccaacacttcagttctcactccacagctcagagtcagagctactagcagaattcttgtaaggttcccttccctcctcccctcacacccctgttcgtgttccttcggatcggatctcagtggtgatgttagacgtccgcggctgcctacgtagtggcattgccgcccgaaaggtttgtttaggtggggtagatccgaaacaggccggatctggaccatgtccgcggcggggcggcgggacttgatcgcgtagctgtcgtgtgcatttctccctaccagtggcggaatcggcgatgtggacctaagggctaaggcttatctgctgccttgaccatttcgtcgctgacaaaaacaaagtgacaatcatgccgttctctgtttgtttatctggatcgttattacgctgtgaatcctgcgatatgtggctaagtgatttttcttctttttctgggggcagtttagcctttgacccagtcctaggtgtggtcactaggactgtgtagcatgatgagtgaggttgcagcaggctgattgctagtggacgtttttttccccaatttgttaggttttcacgctccaggttgtgcaagtaattttgctagtgattgtgtgatccatcttcaacgttgaaccttgtttttccccctaaaacccccaacaggaaatcttgccccgacttctattgcaaaaattgtaacgcttagcaccctgattgactcaattcctgtcactaggcatgctcggtcaaaagcagatgatttaccacttagaaactgccctgcccctgctttccacatagcatttcgaactttttgactactattgacacccccctaacttgccgaactatttctctcttcagctactatttacctagttataattacataaatgtttgtgtgtatcttgtgcagcccgggggatctcgactctagaggatcgctcaggaaggccgctgagatagaggcatggcggccaatgcgggcggcggtggagcgggaggaggcagcggcagcggcagcgtggctgcgccggcggtgtgccgccccagcggctcgcggtggacgccgacgccggagcagatcaggatgctgaaggagctctactacggctgcggcatccggtcgcccagctcggagcagatccagcgcatcaccgccatgctgcggcagcacggcaagatcgagggcaagaacgtcttctactggttccagaaccacaaggcccgcgagcgccagaagcgccgcctcaccagcctcgacgtcaacgtgcccgccgccggcgcggccgacgccaccaccagccaactcggcgtcctctcgctgtcgtcgccgccgccttcaggcgcggcgcctccctcgcccaccctcggcttctacgccgccggcaatggcggcggatcggctgtgctgctggacacgagttccgactggggcagcagcggcgctgccatggccaccgagacatgcttcctgcaggactacatgggcgtgacggacacgggcagctcgtcgcagtggccacgcttctcgtcgtcggacacgataatggcggcggccgcggcgcgggcggcgacgacgcgggcgcccgagacgctccctctcttcccgacctgcggcgacgacggcggcagcggtagcagcagctacttgccgttctggggtgccgcgtccacaactgccggcgccacttcttccgttgcgatccagcagcaacaccagctgcaggagcagtacagcttttacagcaacagcaacagcacccagctggccggcaccggcaaccaagacgtatcggcaacagcagcagcagccgccgccctggagctgagcctcagctcatggtgctccccttaccctgctgcagggagtatgtgagagcaacgcgagctgccactgctcttcactgatgtctctggaatggaaggaggaggaagtgagcatagcgttggtgcgttgctgtcaagggcgaattcacatggttaacctagacttgtccatcttctggattggccaacttaattaatgtatgaaataaaaggatgcacacatagtgacatgctaatcactataatgtgggcatcaaagttgtgtgttatgtgtaattactagttatctgaataaaagagaaagagatcatccatatttcttatcctaaatgaatgtcacgtgtctttataattctttgatgaaccagatgcatttcattaaccaaatccatatacatataaatattaatcatatataattaatatcaattgggttagcaaaacaaatctagtctaggtgtgttttgcgaatgcggccgccaccgcggtggagctcgaattccggtccgggcctagaaggccagcttcaagtttgtacaaaaaagcaggctccggccagaatctcactgactagctaaacagcggccgcatcgagcagctggcttgtggggaccagacaaaaaaggaatggtgcagaattgttaggcgcacctaccaaaagcatctttgcctttattgcaaagataaagcagattcctctagtacaagtggggaacaaaataacgtggaaaagagctgtcctgacagcccactcactaatgcgtatgacgaacgcagtgacgaccacaaaactcgagcaacgagatcatgagccaatcaaagaggagtgatgtagacctaaagcaataatggagccatgacgtaagggcttacgcccatacgaaataattaaaggctgatgtgacctgtcggtctctcagaacctttactttttatgtttggcgtgtatttttaaatttccacggcaatgacgatgtgaccgtcgacccactaaaacattgctttgtcaaaagctaaaaaagatgatgcccgacagccacttgtgtgaagcatgagaagccggtccctccactaagaaaattagtgaagcatcttccagtggtccctccactcacagctcaatcagtgagcaacaggacgaaggaaatgacgtaagccatgacgtctaatcccagggcccggtgaccaatcgaattagcttggcgcgtggaccgaagcttgcatgcctgcagtgcagcgtgacccggtcgtgcccctctctagagataatgagcattgcatgtctaagttataaaaaattaccacatattttttttgtcacacttgtttgaagtgcagtttatctatctttatacatatatttaaactttactctacgaataatataatctatagtactacaataatatcagtgttttagagaatcatataaatgaacagttagacatggtctaaaggacaattgagtattttgacaacaggactctacagttttatctttttagtgtgcatgtgttctcctttttttttgcaaatagcttcacctatataatacttcatccattttattagtacatccatttagggtttagggttaatggtttttatagactaatttttttagtacatctattttattctattttagcctctaaattaagaaaactaaaactctattttagtttttttatttaataatttagatataaaatagaataaaataaagtgactaaaaattaaacaaataccctttaagaaattaaaaaaactaaggaaacatttttcttgtttcgagtagataatgccagcctgttaaacgccgtcgacgagtctaacggacaccaaccagcgaaccagcagcgtcgcgtcgggccaagcgaagcagacggcacggcatctctgtcgctgcctctggacccctctcgagagttccgctccaccgttggacttgctccgctgtcggcatccagaaattgcgtggcggagcggcagacgtgagccggcacggcaggcggcctcctcctcctctcacggcaccggcagctacgggggattcctttcccaccgctccttcgctttcccttcctcgcccgccgtaataaatagacaccccctccacaccctctttccccaacctcgtgttgttcggagcgcacacacacacaaccagatctcccccaaatccacccgtcggcacctccgcttcaaggtacgccgctcgtcctcccccccccccctctctaccttctctagatcggcgttccggtccatgcatggttagggcccggtagttctacttctgttcatgtttgtgttagatccgtgtttgtgttagatccgtgctgctagcgttcgtacacggatgcgacctgtacgtcagacacgttctgattgctaacttgccagtgtttctctttggggaatcctgggatggctctagccgttccgcagacgggatcgatttcatgattttttttgtttcgttgcatagggtttggtttgcccttttcctttatttcaatatatgccgtgcacttgtttgtcgggtcatcttttcatgcttttttttgtcttggttgtgatgatgtggtctggttgggcggtcgttctagatcggagtagaattctgtttcaaactacctggtggatttattaattttggatctgtatgtgtgtgccatacatattcatagttacgaattgaagatgatggatggaaatatcgatctaggataggtatacatgttgatgcgggttttactgatgcatatacagagatgctttttgttcgcttggttgtgatgatgtggtgtggttgggcggtcgttcattcgttctagatcggagtagaatactgtttcaaactacctggtgtatttattaattttggaactgtatgtgtgtgtcatacatcttcatagttacgagtttaagatggatggaaatatcgatctaggataggtatacatgttgatgtgggttttactgatgcatatacatgatggcatatgcagcatctattcatatgctctaaccttgagtacctatctattataataaacaagtatgttttataattattttgatcttgatatacttggatgatggcatatgcagcagctatatgtggatttttttagcactgccttcatacgctatttatttgcttggtactgtttcttttgtcgatgctcaccctgttgtttggtgttacttctgcaggtcgactttaacttagcctaggatccatggccactgtgaacaactggctcgctttctccctctccccgcaggagctgccgccctcccagacgacggactccacactcatctcggccgccaccgccgaccatgtctccggcgatgtctgcttcaacatcccccaagattggagcatgaggggatcagagctttcggcgctcgtcgcggagccgaagctggaggacttcctcggcggcatctccttctccgagcagcatcacaaggccaactgcaacatgatacccagcactagcagcacagtttgctacgcgagctcaggtgctagcaccggctaccatcaccagctgtaccaccagcccaccagctcagcgctccacttcgcggactccgtaatggtggcttcctcggccggtgtccacgacggcggtgccatgctcagcgcggccgccgctaacggtgtcgctggcgctgccagtgccaacggcggcggcatcgggctgtccatgattaagaactggctgcggagccaaccggcgcccatgcagccgagggtggcggcggctgagggcgcgcaggggctctctttgtccatgaacatggcggggacgacccaaggcgctgctggcatgccacttctcgctggagagcgcgcacgggcgcccgagagtgtatcgacgtcagcacagggtggagccgtcgtcgtcacggcgccgaaggaggatagcggtggcagcggtgttgccggcgctctagtagccgtgagcacggacacgggtggcagcggcggcgcgtcggctgacaacacggcaaggaagacggtggacacgttcgggcagcgcacgtcgatttaccgtggcgtgacaaggcatagatggactgggagatatgaggcacatctttgggataacagttgcagaagggaagggcaaactcgtaagggtcgtcaagtctatttaggtggctatgataaagaggagaaagctgctagggcttatgatcttgctgctctgaagtactggggtgccacaacaacaacaaattttccagtgagtaactacgaaaaggagctcgaggacatgaagcacatgacaaggcaggagtttgtagcgtctctgagaaggaagagcagtggtttctccagaggtgcatccatttacaggggagtgactaggcatcaccaacatggaagatggcaagcacggattggacgagttgcagggaacaaggatctttacttgggcaccttcagcacccaggaggaggcagcggaggcgtacgacatcgcggcgatcaagttccgcggcctcaacgccgtcaccaacttcgacatgagccgctacgacgtgaagagcatcctggacagcagcgccctccccatcggcagcgccgccaagcgcctcaaggaggccgaggccgcagcgtccgcgcagcaccaccacgccggcgtggtgagctacgacgtcggccgcatcgcctcgcagctcggcgacggcggagccctggcggcggcgtacggcgcgcactaccacggcgccgcctggccgaccatcgcgttccagccgggcgccgccagcacaggcctgtaccacccgtacgcgcagcagccaatgcgcggcggcgggtggtgcaagcaggagcaggaccacgcggtgatcgcggccgcgcacagcctgcaggacctccaccacctgaacctgggcgcggccggcgcgcacgactttttctcggcagggcagcaggccgccgccgctgcgatgcacggcctgggtagcatcgacagtgcgtcgctcgagcacagcaccggctccaactccgtcgtctacaacggcggggtcggcgacagcaacggcgccagcgccgtcggcggcagtggcggtggctacatgatgccgatgagcgctgccggagcaaccactacatcggcaatggtgagccacgagcaggtgcatgcacgggcctacgacgaagccaagcaggctgctcagatggggtacgagagctacctggtgaacgcggagaacaatggtggcggaaggatgtctgcatgggggactgtcgtgtctgcagccgcggcggcagcagcaagcagcaacgacaacatggccgccgacgtcgggcatggcggcgcgcagctcttcagtgtctggaacgacacttaagcgtacctagtggtacctgacatcttatagtctgcaacctctcgtgtctgaattcctatctttatcaagtgttattgcttccacgactataggacagctttcgtcgaaagcttttgctcatgtgatctcgaaggattcatctagtctgatttttcgtgacttgtatcggttttattggattcatccaacatatatcaataaaaaatgagttgtgtttcctttcttcctagttcagttaaaattatttccctcctgcgcttgtgctgtaattgtctgtgtacctgttgtttgtgactgtgttagttcccttggatatgatttcgtatttgatatgtacatggagatagcttagcttcattattggagtatgaagttagtatgacatagtcactctcctggaaaattgacactgcaaaccatatttttattctgaaccacaaatcctagtcagtccgctggcatatgccgtccgtttgctgaatccagaacgtgggtttggagatgtacggctgagatgcctctatgcgaaggggatttcgtggtgaaacgagatgggagtagagcaacgcccgtggaagatgcttcaaacttccacacttttgagcaacgatcggcagtagtaaggtagacgatttcaagatcaaagcatatgaagataaacaacatcaacaacaaaatttgttggggttctatagagagaaacagagctacatacatacactgttttgtatctaccatctgagatgatgaaaagatgaaaaactaaagaatgccccggcgccaacgccaggacacgccgcgcgcgcgtcacccgagccatctcttgacccagccggcgctgtatatttacacacgttgcagcatcgatcaccacctgttcgatcgcgtcgccgtcaccggcgcgccgcgacttattgaactagtctagggcgcggctaacaacctagcttagattgccttgtctaaacccttaggctaacgcgccactctagaaggccgatctcccccgaacgcgccagatccgatatcgatgggccctggccgaagcttggtcacccggtccgggcctagaaggccgatctcccgggcacccagctttcttgtacaaagtggccgttaacggatcggccagaatggcccggaccgggttaccccgcggttcaaagccaatgactgttgttaggtccagtttctaaggacgaatcatccaatcactggttctttctgaacaaaacaaagagctatagagttacgttactgtagccgagacagagcctgcaatctggttatgccacatactaggttctttcttaaagttgactcactctatcctaagttctacttacaaggagctacaacaaattggtcataaccggagagcgttcaaggaggtaatatcccatcttactctgtagcaaggctacaaaaggagagctaaagaactaggctacaaaaagagagctaaagaactaactatctagcaagactacagagctatagtgtagagatttcataaccggtgagcgttcaaggatactttgaagagaagaggtaatatctcaactagcaagactacaaaaaaatggagatataaaactaactgtctaacaagactacagagctatagtagagatagatacgttcgacacttaagcatgagaattcgagctcggtaccctggttcacaaactcaatacaacacacagtggagtagggtattacgctccggcggcccgaaccactctaaatccttgtgtcctcgtgtgctcttccaccattaatgactgtaattgcagggacacgaagagttgtagcgcttttgccaacaagatccgctatatgctagtagagtggaacctgcacagcaacaagcatccaataatctgagaataagaattatgtgtggtgatggttctcatctctgcaactcgccattttcgcgagagaaccaaatccaagttggtgaagatcatgatttgggctcatgggctggcatagtagctattacctttgcaattgtggttcgaatctatccgatattctccttttcagggagagctaatgcttatgcttattgggtattttggtttgacactgcttcacgcccaaaaaaaggcaactatgtctgagttggatatggcccaaaaaaaggcagctatgtctgagttggatatggaagtcttctttcgtttagggtgaagtaagaccaagctcatgagcttattatcttaggtcggaacaaattagttgataggcatggcacatttatcaaattataatgattttaacagaaaagcaacacctctttttcagcagcaccagctttgcaagctgcaattgacactccaagcatagtatttgctccaaactcagcctgcatttcgcacaatatcatatctatttccatttggataaaatatattttccagaaatatgggaacagaatcaagatacagaaaaaagttgtggtagtagtggtaagtggaaacacaagtacagtgaaaagatagcattatttctgaacagtcaaattaaccgaaataagtagtatcacatactgcccctaaattgactacacccaatgtaaagaattgcttgagcatattgagccatcagttgtttgtttgtgtaacggatttgacaatgcagagttcaggagcaaaaaaccgcaaaggagagaaagagggaaaggatctcctagtatcccaccttgtggcgcgccctgtcaagtgcatgatggcctggtcgatctgcgtctgctgctgcggttccatcccaacgagtgcctccgacaccttgtcgttgatcacccgcaccgcgtaggcgacccccctggcgaggaacttccgcctctcggaggccccggccgcgtcggcggcggcgccctcgagcgcgcccacgctagccgtagatgctcggtgcacggccttgttggtgtgcaactcgacctcaacggccggtgcgctacgcccgtcaaggatctggcgcgcccgcaccctcgtgatcacggtgggcgcctcccgcctcatgtggccgacgatgaaaagcgccgggttaggggccttggcgcgcaccgccgtattcagggcctcctcgctcttgcgcgagagcaggtgcttccccaggtactcctgcactgacaaggctgccacagcggtggaatttgtcctcacgacttcgccacgtcgtcctcacctccctggcttcccacgactccgccgtatcgaggtgctcggtgggtcgtcttaatccgaagtccgaactaggaagacgagacagagaggtctgaggaatgggcctcgtttgatgttgagctgaattatttttccagcataagcccaggtcttggtccatgaacaaaattactagaaacccagcccagtactacgatctaaaagagggactgccactggatagctctctctagcattctccacgctccaatacagcggcgtcgtgtctatccgggtctatccgcgaacacgtgagaactctccagaaactgctttctcctccacttcatctctctcgctttccctctataaaaagaccccttctaggaattgagggagacagcaagcaccaagcagcgatccgaagctcaatcaattcactcaaacctcttccccaaatcttcgattagatcttcgttgacaagaagactagaaccgaacctgacatgtccaacctgctcacggttcaccagaaccttccggctcttccagtggacgcgacgtccgatgaagtcaggaagaacctcatggacatgttccgcgacaggcaagcgttcagcgagcacacctggaagatgctgctctccgtctgccgctcctgggctgcatggtgcaagctgaacaacaggaagtggttccccgctgagcccgaggacgtgagggattaccttctgtacctgcaagcgcgaggtttgtttctgcttctacctttgatatatatataataattatcattaattagtagtaatataatatttcaaatatttttttcaaaataaaagaatgtagtatatagcaattgcttttctgtagtttataagtgtgtatattttaatttataacttttctaatatatgaccaaaacatggtgatgcctaggtctggcagtgaagaccatccagcaacaccttggacaactgaacatgcttcacaggcgctccggcctcccgcgccccagcgactcgaacgccgtgagcctcgtcatgcgccgcatcaggaaggaaaacgtcgatgccggcgaaagggcaaagcaggccctcgcgttcgagaggaccgatttcgaccaggtccgcagcctgatggagaacagcgacaggtgccaggacattaggaacctggcgttcctcggaattgcatacaacacgctcctcaggatcgcggaaattgcccgcattcgcgtgaaggacattagccgcaccgacggcggcaggatgcttatccacattggcaggaccaagacgctcgtttccaccgcaggcgtcgaaaaggccctcagcctcggagtgaccaagctcgtcgaacgctggatctccgtgtccggcgtcgcggacgacccaaacaactacctcttctgccgcgtccgcaagaacggggtggctgcccctagcgccaccagccaactcagcacgagggccttggaaggtattttcgaggccacccaccgcctgatctacggcgcgaaggatgacagcggtcaacgctacctcgcatggtccgggcactccgcccgcgttggagctgctagggacatggcccgcgccggtgtttccatccccgaaatcatgcaggcgggtggatggacgaacgtgaacattgtcatgaactacattcgcaaccttgacagcgagacgggcgcaatggttcgcctcctggaagatggtgactgaggtacccaacctagacttgtccatcttctggattggccaacttaattaatgtatgaaataaaaggatgcacacatagtgacatgctaatcactataatgtgggcatcaaagttgtgtgttatgtgtaattactagttatctgaataaaagagaaagagatcatccatatttcttatcctaaatgaatgtcacgtgtctttataattctttgatgaaccagatgcatttcattaaccaaatccatatacatataaatattaatcatatataattaatatcaattgggttagcaaaacaaatctagtctaggtgtgttttgcgatccgatatcgaattggccacggtaccagctgctgctgttctagggttcacaagtctgcctatttgtcttccccaatggagctatggttgtctggtctggtccttggtcgtgtcccgtttcattgtgtactatttacctgtaatgtgtatccttaagtctggtttgatggtgtctgaaacgttttgctgtggtagagcagcatggaagaactataatgaataagtgatccctaatcattgtgtccaaattttgcttctgctatacccttttgtgctgtttcttatgttttgcttaaaaatttgatctgacaaacaaatttgtctaaattatgctcttgttctgactgtgtactgtacacatttgtattgctaccggtttggcacatagttttctctttgattgcagatcaaacccttctgattgcagattgcttggctatggctgatgtgctcactgttcttctttagcttgtatattgctgatggtggcttggctacggctgaaaaagttgctgctgcgccgacttggcaactgttgctccagtaatgctttgtcctctcttcctagccgccgacttggcacttggcagctgttgctcctgtaatgcgttgttatctcttatctcttgagatgtactatgattttgaggctgtttgacttgtgccagattgccagtgctgatgctatattatctcaggtttttatgctagtatatgttttactgtgtgctgcctgtgtcgagttacgtaatctattgaaccgctatgcgtgttgatgccctgttgttgcttgccagattgatgcccctgttgcttgcagcttgcaagctgtagtgaaatcctaaaattccaaaccaaatctattctgaacttttgaagatctgtgatgtccggaagaaaagattcaaacagataaacgggactctccagaatctataaaataaatgatcgacaaacgctttgctttggtaggcttcaagcttggtcacccggtccgggcctagaaggccagcttcggccgccccgggcaactttattatacaaagttgatagataaatcagatatctggttcctaaggacccggcggaccgattaaactgattcggtccgacgcgttacctaataacttcgtatagcatacattatacgaagttattagctaactaactagtaagcttaagccatgggtcgacggatccgttaactagcgtggcatttggcaccgccgcacactatgcgagctaggagtgctagtttacagatgaaactatgaaaccaagaaaacacaattgtccgtagctagcgcgtggcgtcgtgtcaagcttcacacagtatcttcgttcttcactataaatcgcgcctgttgttcgtgagacccaccaccgtggataacagtcccctaataataagcgatcaacagcactgctgatggctgaacaccgaggcgccgccgcgcgtaaccatccgccggagcagcccgtcgtgccggcgaacgacgccttccccgaccgcgcccagcagctctgcctcgacgccgggcgcgcgctcgcgatgtgcggcgtgctcgtcgccgtccctcccgcattttacgcgtcgacgtcgcggacgacaccgcacttgccttcgtcggcttcgtcctctggatcatcggtgcgtggctgtgcctcctggcgctcacgcccttggctccacgggcggtgagggcgggcggggccgccgccagcaccttgctgatcaggtgcctgtccctttcatgaactactagcgcccgcgcccgcggccgccgggcacaagagaacacatcgatgttcgctgcgtacgtcagcaataaggcactctttgtcagtagtcgagtgcatatgttgggtgtttgccctgggagatttcaagtgttgtggccattatcccgcaggataaaaaatcggcggcttttggattgatacggaaaataacgatgtttcatgctcgtgttgtgtgtgtgacatcttgtcagccaagtttttaaccgttgctactccccctctgtgggctcagtgtgtggaccggaatacgtcgtacataggccgtagcctaagcccaatatgccgtttttcaggttggcctgtgtgacgacaagcgggtctcaaaagcccatcacgcaactggcctgcaattattggaggagagcgcgtcgagttggttccagaggctgcgtggtggggccggactctgcgacgacctctcgttcgcgtccgatttggttgccgtgagccgtgacgtaacgcctccttccgttcctccctatataagttccacccccgggtccggtttccccaagccccagtgacccccgatcccgatcgcgaaatctccgcacccgccggcaagggaccgaagcaagcctctctcccgaccgtcgcatcaaggtacgcgtccgctcgatctgtcctcttccttctcgatttgacttgctgtggtgcccgatcacgggatcagaatcgcaccagtgtagatttcgcatgttctaagatgtgttagtttccaggctaatccagttctcttgacgcccgatccgatcgagctccgtgtttatttcagcctaatcgtagtattcccctaaaatttcctcattagggggttcgcaagattgttggtcgacaggttcacttatgctcgatcgcttacttttagtcgattcatgctgcgtactattgttgccccccgtggttttatcttttctcgtgtgaaatccagtagatatagtagatatcgtagcattaggttttaattcaatcgattgattattgtatcatcaaaattgagaagttcgaatcatgcctatcatgctgcctcaaccgaaatcctgtatattgaagtttcaattcaattgattgatcattcattagattcaaccaaaatctagaaggttagatgacgcatgtcatgctgcctgcgtagtttacctttgatctgtttatgattaccttatcagtaggatatttgtgattttgggaagtagcactaactgattcatgctgacatgatgttccctttcagattatactgttgagtcctatctaattgatgctttgtatgctatatgaatacgtcatggtaaattagcagttaattagcatattagcaattgggcgtacctcatcaggattgctcttgtagatgtgtgtggtgatgtttcttgttcaattcatgttctgctttaaaagtatgtgttctctgtttgttaattaagattcatggttataatgatttggacctaattaatcagggttgcccttttagatgcgtggttacttgttgagttcatttttttcctgctatagttgtatgcgtttgttcattcatggttagatttgatttgtttcttctctattccatgccttccatatacttcaattgtagcttaacatgagatttctgtatatgcaggtcgaccgccggggatccacacgacaccatggcccagtccaagcacggcctgaccaaggagatgaccatgaagtaccgcatggagggctgcgtggacggccacaagttcgtgatcaccggcgagggcatcggctaccccttcaagggcaagcaggccatcaacctgtgcgtggtggagggcggccccttgcccttcgccgaggacatcttgtccgccgccttcatgtacggcaaccgcgtgttcaccgagtacccccaggacatcgtcgactacttcaagaactcctgccccgccggctacacctgggaccgctccttcctgttcgaggacggcgccgtgtgcatctgcaacgccgacatcaccgtgagcgtggaggagaactgcatgtaccacgagtccaagttctacggcgtgaacttccccgccgacggccccgtgatgaagaagatgaccgacaactgggagccctcctgcgagaagatcatccccgtgcccaagcagggcatcttgaagggcgacgtgagcatgtacctgctgctgaaggacggtggccgcttgcgctgccagttcgacaccgtgtacaaggccaagtccgtgccccgcaagatgcccgactggcacttcatccagcacaagctgacccgcgaggaccgcagcgacgccaagaaccagaagtggcacctgaccgagcacgccatcgcctccggctccgccttgccctccggactcagatctcgatagagtcaacctagacttgtccatcttctggattggccaacttaattaatgtatgaaataaaaggatgcacacatagtgacatgctaatcactataatgtgggcatcaaagttgtgtgttatgtgtaattactagttatctgaataaaagagaaagagatcatccatatttcttatcctaaatgaatgtcacgtgtctttataattctttgatgaaccagatgcatttcattaaccaaatccatatacatataaatattaatcatatataattaatatcaattgggttagcaaaacaaatctagtctaggtgtgttttgcgaattgcggcgcccttactttaacgcctctaaccaacacccctttatctttataaggaacaataaacagaatttgccccactgttctaaatcacctaataatatccccagctaaaaacaataaaggtttcctagaattaagacaagcatgactgttcctccaggagggtttggaacattgttgcagtcttgcagatacgggcgaagggtgagaaacagagcggagggctggaggtgacctcggtagtcgacgccggagttgagcttgacaacgacggggcggcccctgatggacttgaggaagtccgatggcgtcttcaccgtcccgccggcgcccgaggcgggcctgtcgctgccgccgccgccgctgctcatcttgcgcgctgtgcccccggcggtgtccctgtgttgcggatcgcgggtgggccaggtggatgcgagggcgacccgtttggactccggccggagccgccggatccctggtcggtgtcagtgccgtttactctgggccccacgtgtcagtaccgtctgtagatgacaacaacccgtcgtccacagtcatgtccaaaatatcctttcttcttttttttcgattcggatatctatcttccttttttttttccaaaaatcttcttgacgcaccagcgcgcacgtttgtggtaaacgccgacacgtcggtcccacgtcgatagaccccacccaccagtgagtagcgtgtacgtattcgggggtgacggacgtgtcgccgtcgtcttgctagtcccattcccatctgagccacacatctctgaacaaaaaaaaggagggaggcctccacgcacatccccctccgtgccacccgccccaaaccctcgcgccgcctccgagacagccgccgcaaccatggccaccgccgccgccgcgtctaccgcgctcactggcgccactaccgctgcgcccaaggcgaggcgccgggcgcacctcctggccacccgccgcgccctcgccgcgcccatcaggtgctcagcggcgtcacccgccatgccgatggctcccccggccaccccgctccggccgtggggccccaccgagccccgcaagggtgctgacatcctcgtcgagtccctcgagcgctgcggcgtccgcgacgtcttcgcctaccccggcggcgcgtccatggagatccaccaggcactcacccgctcccccgtcatcgccaaccacctcttccgccacgagcaaggggaggcctttgccgcctccggctacgcgcgctcctcgggccgcgtcggcgtctgcatcgccacctccggccccggcgccaccaacctagtctccgcgctcgccgacgcgctgctcgattccgtccccatggtcgccatcacgggacaggtggcgcgacgcatgattggcaccgacgccttccaggagacgcccatcgtcgaggtcacccgctccatcaccaagcacaactacctggtcctcgacgtcgacgacatcccccgcgtcgtgcaggaggctttcttcctcgcctcctctggtcgaccagggccggtgcttgtcgacatccccaaggacatccagcagcagatggcggtgcctgtctgggacaagcccatgagtctgcctgggtacattgcgcgccttcccaagccccctgcgactgagttgcttgagcaggtgctgcgtcttgttggtgaatcgcggcgccctgttctttatgtgggcggtggctgcgcagcatctggtgaggagttgcgacgctttgtggagctgactggaatcccggtcacaactactcttatgggcctcggcaacttccccagcgacgacccactgtctctgcgcatgctaggtatgcatgggacggtgtatgcaaattatgcagtggataaggccgatctgttgcttgcacttggtgtgcggtttgatgatcgcgtgacagggaagattgaggcttttgcaagcagggctaagattgtgcacgttgatattgatccggctgagattggcaagaacaagcagccacatgtgtccatctgtgcagatgttaagcttgctttgcagggcatgaatgctcttcttgaaggaagcacatcaaagaagagctttgactttggctcatggaacgatgagttggatcagcagaagagggaattcccccttgggtataaaacatctaatgaggagatccagccacaatatgctattcaggttcttgatgagctgacgaaaggcgaggccatcatcggcacaggtgttgggcagcaccagatgtgggcggcacagtactacacttacaagcggccaaggcagtggttgtcttcagctggtcttggggctatgggatttggtttgccggctgctgctggtgcttctgtggcaaacccaggtgtcactgttgttgacatcgatggagatggtagctttctcatgaacgttcaggagctagctatgatccgaattgagaacctcccagtgaaggtctttgtgctaaacaaccagcacctggggatggtggtgcagttggaggacaggttctataaggccaacagagcgcacacatacttgggaaacccagagaatgaaagtgagatatatccagatttcgtgacgatcgccaaagggttcaacattccagcggtccgtgtgacaaagaagaacgaagtccgcgcagcgataaagaagatgctcgagactccagggccgtacctcttggatataatcgtcccacaccaggagcatgtgttgcctatgatccctagtggtggggctttcaaggatatgatcctggatggtgatggcaggactgtgtactgactagctagtcagttaacagatctgccagatcctcggtgtacaaataacccgtcttatcctatgagacgggccggcgtcagtgtgttctggaggaatttttatgtcagagcctttttctttgtgtgcttgatgtagatgccaagggaagcttattggctgttgaagcttgatgcaaaataaattatggaactctgttttttgtttatctaataataactagcaaatatgcttccattgcattgaaactaacagccttttgtgtttccaagttttattttgtgacaatgtcatctatttcaattagttgtggaatcggaaacttgcaggactaacttggaaactccaatccctcagcatcctggactttttcctggtgtaatccatgtagatattattttaatcatcattttagttctggaggtttttccatctccggttttgctcccctttcttcaaaaaaaaaaaaaaaatgccgtaggcgccgcaacgcccacctgttgttcaaactcatgggcacgagtggctcgaagattttatacaacaattgctgtagtttcaccgttgctggtgaagaagcatttttttaaaaaaatatagtggtattcattttaattagtttagttgtgcagcgagcaaaatttggacatgctctgctcggaatctgatcgacctagacacagattagcagcagtagctttgtcatctgttccaagagttgcgatctgatagaagaaaaaaaaaccttcccttcaatgtaaaaccgaaactaacaagaaagaagcacagtgccgtttaggcaagtatggagtacgtattaagcatgtagaaggccatgcatgaaccactaacaagaaagaagcgcagtgccattcaggcaagcataagcatgtagattggcatgcatgaacaactaacagtagatcgtctctggtctgattagaagttttttgggaagccaagaaatcatgtacaactggttccatctcaaattccgtggcaaaaagaggcctaagcaacatacctcgagtagatcacattcaagcttggtcacccggtccgtcaatattctgattccgatgacttcgtaggttcctagctcaagccgctcgtgtccaagcgtcacttacgattagctaatgattacggcatctaggaccgactagtggcgcgccgactagctagctaaggtaccgagctcgaattcattccgattaatcgtggcctcttgctcttcaggatgaagagctatgtttaaacgtgcaagcgctactagacaattcagtacattaaaaacgtccgcaatgtgttattaagttgtctaagcgtcaatttgtttacaccacaatatatcctgcca

SEQ ID NO: 258 - DNA, 24803 bp, Artificial Sequence
  PHP98370
gtttacccgccaatatatcctgtcaaacactgatagtttaaactgaaggcgggaaacgacaatctgatcatgagcggagaattaagggagtcacgttatgacccccgccgatgacgcgggacaagccgttttacgtttggaactgacagaaccgcaacgttgaaggagccactcagcaagctggtacgattgtaatacgactcactatagggcgaattgagcgctgtttaaacgctcttcaactggaagagcggttacgctgtttaaacgctcttcaactggaagagcggttactaccggttcactagctagctgctaatcgagctagttaccctatgaggtgacatgaagcgctcacggttactatgacggttagcttcacgactgttggtggcagtagcgtacgacttagctatagttccggacttacccttaagcgatttaaatctgcggttaccgaattcgagctcggtacctagtacccttgtacttttggtttcacctgcatagagaaaacccacaagaatatgacagtctgatttgtcagtctcattctcaagcaacatttctctatccgttactttcatggtgaataacacaatccatcatcaatactttgtgttactcagaaactgaaagttattccgagtcttgcatatctttggacctactcgtttttctaccattattgctgattgttaagctctcgctacttgaatcggcattgttggagtgggaaggttcaaaaaattggagttatgactagttgtctctttctatgtacgatggagaaaatgaataaacaactgagaaaatggctcttgtttagttgatgatgctcttaagctttccactggttgccatatatgatttgggcatttcactttgatcttaatgggccttgtaaagcccaagactcatgattatctttagttgatgctcttaattaggtgtgggcaaataattcaaactgtatgtacccgaccaaaaccaaagcaaaaataatcgaaccaaaccgaaaatttaaaaataaccgaatgaaaactaaatcctataactgaaagaactgaaaccgaatcaaaatatttaatgtaaccaaaaatatccgaaatataattatattgtcaaaaatattaataatttctagattaaataattaaaaatacttaaaaatttatataaaatagtaaaaatactcgaaaataaccacaaatattcaaaaacaaccgaaatatcccaaaatattcaaagcaaaataaccgaatggataccaaattttaaaaccgaaaaaactggaacaaaaccaaaatcgaaccaaaatttcaaaaatcgaataaatactaaactttagaacaaaaaaaaacgataaccgaatgtatacgaaccaaagccgaattagataaccgaacgtccaggactactcttaatctttccgccacttatgatttgggctattactttgtttataatgagccttttcaagctcaagttcatgattgtccgtgagatgagaaactgacttgttggattcgaaaccctagctagtattggttaatacttaatacataaatgacctgcattgacatcatcatccaagaaaataaaaattgtatgcttgagatatttagttttcctagctaggttttctttattttagtaccgaatctttaggtgtgccacgttaatttagacccattttttcatacttaccaactgagtctagtttaatcatgactataatcgtataaaatgattcagtcgacgtcattgcgaacgtatataaaatcatccaaattgacgtcattccaaagaggtaagcatgcttatctaagagtccgagcatactaaacaagacgacattttatttgcactccaaatcaaattttgtattgcctaaagaaaaacaatcaaactcaagtttcttaaaattaatttcattcaaactaatcactttcaatatctcacatattattcatgccatttctatttgtctaaacatgatttaaaaaaaaaagtaaaatacaaagattactatgcaaaaactctataaaaaaaaattcaaatttcttatttatttgtgacatcaaattttcaaaataatttttttaattatcggttgatccggtcagtcgataaaaacataaactttcagcgaccgttaaaactttcctactaccgatttagagaaaatcttagcttgaaacgtaattgtaacctgccttcatgcaagtcgcaagatatgtcatcctaagttgtatatgttttctcaaaagatgtatttacttgagaaaatacgtttcaacgttgatggacaaccaattaagaatcaagcacctttcgtaatcaatttaggcttatcgtctaaggtatactgatttacgacagttgactagacttataaggaacaaaataatagaatagtttctaaacacttcacctaatcatagagactaagatggtaattcgtaaacgacaaagcctagtgacactgtccattgtaaaattccacatcatattagtattaaacatatacatgtagtttcctgaacacatgtagtatcaaacacacttcgtggcttcttcctcgaaacctgcggccgcgctatagttccggacttacccttaagataacttcgtatagcatacattatacgaagttatgggcccacgcgtgaagagcggttaccagagctggtcacctttgtccaccaagatggaactgtcttcggccagaatggccatctggattcagcaggcctagaaggccatttatcgctatcaactttgtatagaaaagttgggccgaattcgagctcggtacggccagaatggcccggaccgaagcttgcggccgcacactgatagtttaaacctggtaattattggctgtaggattataaacagagcctaaatagctggaatagctctagccctcaatccaaactaatgatatctatacttatgcaactctaaatttttattctaaaagtaatatttcatttttgtcaacgagattctctactctattccacaatcttttgaagcaatatttaccttaaatctgtactctataccaataatcatatattctattatttatttttatctctctcctaaggagcatccccctatgtctgcatggcccccgcctcgggtcccaatctcttgctctgctagtagcacagaagaaaacactagaaatgacttgcttgacttagagtatcagataaacatcatgtttacttaactttaatttgtatcggtttctactatttttataatatttttgtctctatagatactacgtgcaacagtataatcaacctagtttaatccagagcgaaggattttttactaagtacgtgactccatatgcacagcgttccttttatggttcctcactgggcacagcataaacgaaccctgtccaatgttttcagcgcgaacaaacagaaattccatcagcgaacaaacaacatacatgcgagatgaaaataaataataaaaaaagctccgtctcgataggccggcacgaatcgagagcctccatagccagttttttccatcggaacggcgggtctcgacgtaagcgcttacgacgtaagcgcttacgtaattatatgcaccacacgcctataaagccaaccaacccgtcggaggggcgcaagccagacagaagacagcccgtcagcccctctcgtttttcatccgccttcgcctccaaccgcgtgcgctccacgcctcctccaggaagtgagcgcagtcccctttcccctccttccaattcaattcgtcttctcgttcgcagccctaggatttgggggtctggaggggtttgatcgtttctcgccgtgaatctgctttggtgtaaaccaacggatctcggatcgtagtcttcagaagatcccggattttgcggtttggcccctcctggattcaattcgtcgtatcgttcgcagccctaggatttggggatctggaggggtttgatcgtttctcgccgcgaatctgctctggtgtaaaccaacggatctcgggtcgtagtcttcagaaggtcccggattttgcggtttggcccctcctggattcaattcgtcgtatcgttcgcagccctaggatttggggatctggaggggtttgatcctttctcgccgcgaatctgctctggtataaccaacggatctcgggtcgtagtcttcagaaggtcccggattttgcggtttggtggttcttgctctatgaatcagagggatggttcttcccggatttatgccttgcggccactctgtcgaatcatggggtttcgacccgattcgtaggcgtgctccctgttttggatgggaagtaggcgtgtttgtagtattcgtgcttcgattcgtcaacggagattagaagacctgggatgggatttgaggaaatctaggtatctgtctagcacgtttctagatctattcttcagctgttatatgagagtaattttggaaccctggtggggtatgtttgaccgagtattctgtagattattgtccgtgacttgctggctgttaccgtccttatctctgcatcatctatctgtgctagtttctgcgtgcttctcaaatatttccggcctgtgtagcatgtgactgataatatgattttggcagcccgggggatctcgactctagaggatcgctcaggaaggccgctgagatagaggcatggcggccaatgcgggcggcggtggagcgggaggaggcagcggcagcggcagcgtggctgcgccggcggtgtgccgccccagcggctcgcggtggacgccgacgccggagcagatcaggatgctgaaggagctctactacggctgcggcatccggtcgcccagctcggagcagatccagcgcatcaccgccatgctgcggcagcacggcaagatcgagggcaagaacgtcttctactggttccagaaccacaaggcccgcgagcgccagaagcgccgcctcaccagcctcgacgtcaacgtgcccgccgccggcgcggccgacgccaccaccagccaactcggcgtcctctcgctgtcgtcgccgccgccttcaggcgcggcgcctccctcgcccaccctcggcttctacgccgccggcaatggcggcggatcggctgtgctgctggacacgagttccgactggggcagcagcggcgctgccatggccaccgagacatgcttcctgcaggactacatgggcgtgacggacacgggcagctcgtcgcagtggccacgcttctcgtcgtcggacacgataatggcggcggccgcggcgcgggcggcgacgacgcgggcgcccgagacgctccctctcttcccgacctgcggcgacgacggcggcagcggtagcagcagctacttgccgttctggggtgccgcgtccacaactgccggcgccacttcttccgttgcgatccagcagcaacaccagctgcaggagcagtacagcttttacagcaacagcaacagcacccagctggccggcaccggcaaccaagacgtatcggcaacagcagcagcagccgccgccctggagctgagcctcagctcatggtgctccccttaccctgctgcagggagtatgtgagagcaacgcgagctgccactgctcttcactgatgtctctggaatggaaggaggaggaagtgagcatagcgttggtgcgttgctgtcaagggcgaattcacatggttaacctagacttgtccatcttctggattggccaacttaattaatgtatgaaataaaaggatgcacacatagtgacatgctaatcactataatgtgggcatcaaagttgtgtgttatgtgtaattactagttatctgaataaaagagaaagagatcatccatatttcttatcctaaatgaatgtcacgtgtctttataattctttgatgaaccagatgcatttcattaaccaaatccatatacatataaatattaatcatatataattaatatcaattgggttagcaaaacaaatctagtctaggtgtgttttgcgaatgcggccgccaccgcggtggagctcgaattccggtccgggcctagaaggccagcttcaagtttgtacaaaaaagcaggctccggccagaatctcactgactagctaaacagcggccgcatcgagcagctggcttgtggggaccagacaaaaaaggaatggtgcagaattgttaggcgcacctaccaaaagcatctttgcctttattgcaaagataaagcagattcctctagtacaagtggggaacaaaataacgtggaaaagagctgtcctgacagcccactcactaatgcgtatgacgaacgcagtgacgaccacaaaactcgagcaacgagatcatgagccaatcaaagaggagtgatgtagacctaaagcaataatggagccatgacgtaagggcttacgcccatacgaaataattaaaggctgatgtgacctgtcggtctctcagaacctttactttttatgtttggcgtgtatttttaaatttccacggcaatgacgatgtgaccgtcgacccactaaaacattgctttgtcaaaagctaaaaaagatgatgcccgacagccacttgtgtgaagcatgagaagccggtccctccactaagaaaattagtgaagcatcttccagtggtccctccactcacagctcaatcagtgagcaacaggacgaaggaaatgacgtaagccatgacgtctaatcccagggcccggtgaccaatcgaattagcttggcgcgtggaccgaagcttgcatgcctgcagtgcagcgtgacccggtcgtgcccctctctagagataatgagcattgcatgtctaagttataaaaaattaccacatattttttttgtcacacttgtttgaagtgcagtttatctatctttatacatatatttaaactttactctacgaataatataatctatagtactacaataatatcagtgttttagagaatcatataaatgaacagttagacatggtctaaaggacaattgagtattttgacaacaggactctacagttttatctttttagtgtgcatgtgttctcctttttttttgcaaatagcttcacctatataatacttcatccattttattagtacatccatttagggtttagggttaatggtttttatagactaatttttttagtacatctattttattctattttagcctctaaattaagaaaactaaaactctattttagtttttttatttaataatttagatataaaatagaataaaataaagtgactaaaaattaaacaaataccctttaagaaattaaaaaaactaaggaaacatttttcttgtttcgagtagataatgccagcctgttaaacgccgtcgacgagtctaacggacaccaaccagcgaaccagcagcgtcgcgtcgggccaagcgaagcagacggcacggcatctctgtcgctgcctctggacccctctcgagagttccgctccaccgttggacttgctccgctgtcggcatccagaaattgcgtggcggagcggcagacgtgagccggcacggcaggcggcctcctcctcctctcacggcaccggcagctacgggggattcctttcccaccgctccttcgctttcccttcctcgcccgccgtaataaatagacaccccctccacaccctctttccccaacctcgtgttgttcggagcgcacacacacacaaccagatctcccccaaatccacccgtcggcacctccgcttcaaggtacgccgctcgtcctcccccccccccctctctaccttctctagatcggcgttccggtccatgcatggttagggcccggtagttctacttctgttcatgtttgtgttagatccgtgtttgtgttagatccgtgctgctagcgttcgtacacggatgcgacctgtacgtcagacacgttctgattgctaacttgccagtgtttctctttggggaatcctgggatggctctagccgttccgcagacgggatcgatttcatgattttttttgtttcgttgcatagggtttggtttgcccttttcctttatttcaatatatgccgtgcacttgtttgtcgggtcatcttttcatgcttttttttgtcttggttgtgatgatgtggtctggttgggcggtcgttctagatcggagtagaattctgtttcaaactacctggtggatttattaattttggatctgtatgtgtgtgccatacatattcatagttacgaattgaagatgatggatggaaatatcgatctaggataggtatacatgttgatgcgggttttactgatgcatatacagagatgctttttgttcgcttggttgtgatgatgtggtgtggttgggcggtcgttcattcgttctagatcggagtagaatactgtttcaaactacctggtgtatttattaattttggaactgtatgtgtgtgtcatacatcttcatagttacgagtttaagatggatggaaatatcgatctaggataggtatacatgttgatgtgggttttactgatgcatatacatgatggcatatgcagcatctattcatatgctctaaccttgagtacctatctattataataaacaagtatgttttataattattttgatcttgatatacttggatgatggcatatgcagcagctatatgtggatttttttagcactgccttcatacgctatttatttgcttggtactgtttcttttgtcgatgctcaccctgttgtttggtgttacttctgcaggtcgactttaacttagcctaggatccatggccactgtgaacaactggctcgctttctccctctccccgcaggagctgccgccctcccagacgacggactccacactcatctcggccgccaccgccgaccatgtctccggcgatgtctgcttcaacatcccccaagattggagcatgaggggatcagagctttcggcgctcgtcgcggagccgaagctggaggacttcctcggcggcatctccttctccgagcagcatcacaaggccaactgcaacatgatacccagcactagcagcacagtttgctacgcgagctcaggtgctagcaccggctaccatcaccagctgtaccaccagcccaccagctcagcgctccacttcgcggactccgtaatggtggcttcctcggccggtgtccacgacggcggtgccatgctcagcgcggccgccgctaacggtgtcgctggcgctgccagtgccaacggcggcggcatcgggctgtccatgattaagaactggctgcggagccaaccggcgcccatgcagccgagggtggcggcggctgagggcgcgcaggggctctctttgtccatgaacatggcggggacgacccaaggcgctgctggcatgccacttctcgctggagagcgcgcacgggcgcccgagagtgtatcgacgtcagcacagggtggagccgtcgtcgtcacggcgccgaaggaggatagcggtggcagcggtgttgccggcgctctagtagccgtgagcacggacacgggtggcagcggcggcgcgtcggctgacaacacggcaaggaagacggtggacacgttcgggcagcgcacgtcgatttaccgtggcgtgacaaggcatagatggactgggagatatgaggcacatctttgggataacagttgcagaagggaagggcaaactcgtaagggtcgtcaagtctatttaggtggctatgataaagaggagaaagctgctagggcttatgatcttgctgctctgaagtactggggtgccacaacaacaacaaattttccagtgagtaactacgaaaaggagctcgaggacatgaagcacatgacaaggcaggagtttgtagcgtctctgagaaggaagagcagtggtttctccagaggtgcatccatttacaggggagtgactaggcatcaccaacatggaagatggcaagcacggattggacgagttgcagggaacaaggatctttacttgggcaccttcagcacccaggaggaggcagcggaggcgtacgacatcgcggcgatcaagttccgcggcctcaacgccgtcaccaacttcgacatgagccgctacgacgtgaagagcatcctggacagcagcgccctccccatcggcagcgccgccaagcgcctcaaggaggccgaggccgcagcgtccgcgcagcaccaccacgccggcgtggtgagctacgacgtcggccgcatcgcctcgcagctcggcgacggcggagccctggcggcggcgtacggcgcgcactaccacggcgccgcctggccgaccatcgcgttccagccgggcgccgccagcacaggcctgtaccacccgtacgcgcagcagccaatgcgcggcggcgggtggtgcaagcaggagcaggaccacgcggtgatcgcggccgcgcacagcctgcaggacctccaccacctgaacctgggcgcggccggcgcgcacgactttttctcggcagggcagcaggccgccgccgctgcgatgcacggcctgggtagcatcgacagtgcgtcgctcgagcacagcaccggctccaactccgtcgtctacaacggcggggtcggcgacagcaacggcgccagcgccgtcggcggcagtggcggtggctacatgatgccgatgagcgctgccggagcaaccactacatcggcaatggtgagccacgagcaggtgcatgcacgggcctacgacgaagccaagcaggctgctcagatggggtacgagagctacctggtgaacgcggagaacaatggtggcggaaggatgtctgcatgggggactgtcgtgtctgcagccgcggcggcagcagcaagcagcaacgacaacatggccgccgacgtcgggcatggcggcgcgcagctcttcagtgtctggaacgacacttaagcgtacctagtggtacctgacatcttatagtctgcaacctctcgtgtctgaattcctatctttatcaagtgttattgcttccacgactataggacagctttcgtcgaaagcttttgctcatgtgatctcgaaggattcatctagtctgatttttcgtgacttgtatcggttttattggattcatccaacatatatcaataaaaaatgagttgtgtttcctttcttcctagttcagttaaaattatttccctcctgcgcttgtgctgtaattgtctgtgtacctgttgtttgtgactgtgttagttcccttggatatgatttcgtatttgatatgtacatggagatagcttagcttcattattggagtatgaagttagtatgacatagtcactctcctggaaaattgacactgcaaaccatatttttattctgaaccacaaatcctagtcagtccgctggcatatgccgtccgtttgctgaatccagaacgtgggtttggagatgtacggctgagatgcctctatgcgaaggggatttcgtggtgaaacgagatgggagtagagcaacgcccgtggaagatgcttcaaacttccacacttttgagcaacgatcggcagtagtaaggtagacgatttcaagatcaaagcatatgaagataaacaacatcaacaacaaaatttgttggggttctatagagagaaacagagctacatacatacactgttttgtatctaccatctgagatgatgaaaagatgaaaaactaaagaatgccccggcgccaacgccaggacacgccgcgcgcgcgtcacccgagccatctcttgacccagccggcgctgtatatttacacacgttgcagcatcgatcaccacctgttcgatcgcgtcgccgtcaccggcgcgccgcgacttattgaactagtctagggcgcggctaacaacctagcttagattgccttgtctaaacccttaggctaacgcgccactctagaaggccgatctcccccgaacgcgccagatccgatatcgatgggccctggccgaagcttggtcacccggtccgggcctagaaggccgatctcccgggcacccagctttcttgtacaaagtggccgttaacggatcggccagaatggcccggaccgggttaccccgcggttcaaagccaatgactgttgttaggtccagtttctaaggacgaatcatccaatcactggttctttctgaacaaaacaaagagctatagagttacgttactgtagccgagacagagcctgcaatctggttatgccacatactaggttctttcttaaagttgactcactctatcctaagttctacttacaaggagctacaacaaattggtcataaccggagagcgttcaaggaggtaatatcccatcttactctgtagcaaggctacaaaaggagagctaaagaactaggctacaaaaagagagctaaagaactaactatctagcaagactacagagctatagtgtagagatttcataaccggtgagcgttcaaggatactttgaagagaagaggtaatatctcaactagcaagactacaaaaaaatggagatataaaactaactgtctaacaagactacagagctatagtagagatagatacgttcgacacttaagcatgagaattcgagctcggtaccctggttcacaaactcaatacaacacacagtggagtagggtattacgctccggcggcccgaaccactctaaatccttgtgtcctcgtgtgctcttccaccattaatgactgtaattgcagggacacgaagagttgtagcgcttttgccaacaagatccgctatatgctagtagagtggaacctgcacagcaacaagcatccaataatctgagaataagaattatgtgtggtgatggttctcatctctgcaactcgccattttcgcgagagaaccaaatccaagttggtgaagatcatgatttgggctcatgggctggcatagtagctattacctttgcaattgtggttcgaatctatccgatattctccttttcagggagagctaatgcttatgcttattgggtattttggtttgacactgcttcacgcccaaaaaaaggcaactatgtctgagttggatatggcccaaaaaaaggcagctatgtctgagttggatatggaagtcttctttcgtttagggtgaagtaagaccaagctcatgagcttattatcttaggtcggaacaaattagttgataggcatggcacatttatcaaattataatgattttaacagaaaagcaacacctctttttcagcagcaccagctttgcaagctgcaattgacactccaagcatagtatttgctccaaactcagcctgcatttcgcacaatatcatatctatttccatttggataaaatatattttccagaaatatgggaacagaatcaagatacagaaaaaagttgtggtagtagtggtaagtggaaacacaagtacagtgaaaagatagcattatttctgaacagtcaaattaaccgaaataagtagtatcacatactgcccctaaattgactacacccaatgtaaagaattgcttgagcatattgagccatcagttgtttgtttgtgtaacggatttgacaatgcagagttcaggagcaaaaaaccgcaaaggagagaaagagggaaaggatctcctagtatcccaccttgtggcgcgccctgtcaagtgcatgatggcctggtcgatctgcgtctgctgctgcggttccatcccaacgagtgcctccgacaccttgtcgttgatcacccgcaccgcgtaggcgacccccctggcgaggaacttccgcctctcggaggccccggccgcgtcggcggcggcgccctcgagcgcgcccacgctagccgtagatgctcggtgcacggccttgttggtgtgcaactcgacctcaacggccggtgcgctacgcccgtcaaggatctggcgcgcccgcaccctcgtgatcacggtgggcgcctcccgcctcatgtggccgacgatgaaaagcgccgggttaggggccttggcgcgcaccgccgtattcagggcctcctcgctcttgcgcgagagcaggtgcttccccaggtactcctgcactgacaaggctgccacagcggtggaatttgtcctcacgacttcgccacgtcgtcctcacctccctggcttcccacgactccgccgtatcgaggtgctcggtgggtcgtcttaatccgaagtccgaactaggaagacgagacagagaggtctgaggaatgggcctcgtttgatgttgagctgaattatttttccagcataagcccaggtcttggtccatgaacaaaattactagaaacccagcccagtactacgatctaaaagagggactgccactggatagctctctctagcattctccacgctccaatacagcggcgtcgtgtctatccgggtctatccgcgaacacgtgagaactctccagaaactgctttctcctccacttcatctctctcgctttccctctataaaaagaccccttctaggaattgagggagacagcaagcaccaagcagcgatccgaagctcaatcaattcactcaaacctcttccccaaatcttcgattagatcttcgttgacaagaagactagaaccgaacctgacatgtccaacctgctcacggttcaccagaaccttccggctcttccagtggacgcgacgtccgatgaagtcaggaagaacctcatggacatgttccgcgacaggcaagcgttcagcgagcacacctggaagatgctgctctccgtctgccgctcctgggctgcatggtgcaagctgaacaacaggaagtggttccccgctgagcccgaggacgtgagggattaccttctgtacctgcaagcgcgaggtttgtttctgcttctacctttgatatatatataataattatcattaattagtagtaatataatatttcaaatatttttttcaaaataaaagaatgtagtatatagcaattgcttttctgtagtttataagtgtgtatattttaatttataacttttctaatatatgaccaaaacatggtgatgcctaggtctggcagtgaagaccatccagcaacaccttggacaactgaacatgcttcacaggcgctccggcctcccgcgccccagcgactcgaacgccgtgagcctcgtcatgcgccgcatcaggaaggaaaacgtcgatgccggcgaaagggcaaagcaggccctcgcgttcgagaggaccgatttcgaccaggtccgcagcctgatggagaacagcgacaggtgccaggacattaggaacctggcgttcctcggaattgcatacaacacgctcctcaggatcgcggaaattgcccgcattcgcgtgaaggacattagccgcaccgacggcggcaggatgcttatccacattggcaggaccaagacgctcgtttccaccgcaggcgtcgaaaaggccctcagcctcggagtgaccaagctcgtcgaacgctggatctccgtgtccggcgtcgcggacgacccaaacaactacctcttctgccgcgtccgcaagaacggggtggctgcccctagcgccaccagccaactcagcacgagggccttggaaggtattttcgaggccacccaccgcctgatctacggcgcgaaggatgacagcggtcaacgctacctcgcatggtccgggcactccgcccgcgttggagctgctagggacatggcccgcgccggtgtttccatccccgaaatcatgcaggcgggtggatggacgaacgtgaacattgtcatgaactacattcgcaaccttgacagcgagacgggcgcaatggttcgcctcctggaagatggtgactgaggtacccaacctagacttgtccatcttctggattggccaacttaattaatgtatgaaataaaaggatgcacacatagtgacatgctaatcactataatgtgggcatcaaagttgtgtgttatgtgtaattactagttatctgaataaaagagaaagagatcatccatatttcttatcctaaatgaatgtcacgtgtctttataattctttgatgaaccagatgcatttcattaaccaaatccatatacatataaatattaatcatatataattaatatcaattgggttagcaaaacaaatctagtctaggtgtgttttgcgatccgatatcgaattggccacggtaccagctgctgctgttctagggttcacaagtctgcctatttgtcttccccaatggagctatggttgtctggtctggtccttggtcgtgtcccgtttcattgtgtactatttacctgtaatgtgtatccttaagtctggtttgatggtgtctgaaacgttttgctgtggtagagcagcatggaagaactataatgaataagtgatccctaatcattgtgtccaaattttgcttctgctatacccttttgtgctgtttcttatgttttgcttaaaaatttgatctgacaaacaaatttgtctaaattatgctcttgttctgactgtgtactgtacacatttgtattgctaccggtttggcacatagttttctctttgattgcagatcaaacccttctgattgcagattgcttggctatggctgatgtgctcactgttcttctttagcttgtatattgctgatggtggcttggctacggctgaaaaagttgctgctgcgccgacttggcaactgttgctccagtaatgctttgtcctctcttcctagccgccgacttggcacttggcagctgttgctcctgtaatgcgttgttatctcttatctcttgagatgtactatgattttgaggctgtttgacttgtgccagattgccagtgctgatgctatattatctcaggtttttatgctagtatatgttttactgtgtgctgcctgtgtcgagttacgtaatctattgaaccgctatgcgtgttgatgccctgttgttgcttgccagattgatgcccctgttgcttgcagcttgcaagctgtagtgaaatcctaaaattccaaaccaaatctattctgaacttttgaagatctgtgatgtccggaagaaaagattcaaacagataaacgggactctccagaatctataaaataaatgatcgacaaacgctttgctttggtaggcttcaagcttggtcacccggtccgggcctagaaggccagcttcggccgccccgggcaactttattatacaaagttgatagataaatcagatatctggttcctaaggacccggcggaccgattaaactgattcggtccgacgcgttacctaataacttcgtatagcatacattatacgaagttattagctaactaactagtaagcttaagccatgggtcgacggatccgttaactagcgtggcatttggcaccgccgcacactatgcgagctaggagtgctagtttacagatgaaactatgaaaccaagaaaacacaattgtccgtagctagcgcgtggcgtcgtgtcaagcttcacacagtatcttcgttcttcactataaatcgcgcctgttgttcgtgagacccaccaccgtggataacagtcccctaataataagcgatcaacagcactgctgatggctgaacaccgaggcgccgccgcgcgtaaccatccgccggagcagcccgtcgtgccggcgaacgacgccttccccgaccgcgcccagcagctctgcctcgacgccgggcgcgcgctcgcgatgtgcggcgtgctcgtcgccgtccctcccgcattttacgcgtcgacgtcgcggacgacaccgcacttgccttcgtcggcttcgtcctctggatcatcggtgcgtggctgtgcctcctggcgctcacgcccttggctccacgggcggtgagggcgggcggggccgccgccagcaccttgctgatcaggtgcctgtccctttcatgaactactagcgcccgcgcccgcggccgccgggcacaagagaacacatcgatgttcgctgcgtacgtcagcaataaggcactctttgtcagtagtcgagtgcatatgttgggtgtttgccctgggagatttcaagtgttgtggccattatcccgcaggataaaaaatcggcggcttttggattgatacggaaaataacgatgtttcatgctcgtgttgtgtgtgtgacatcttgtcagccaagtttttaaccgttgctactccccctctgtgggctcagtgtgtggaccggaatacgtcgtacataggccgtagcctaagcccaatatgccgtttttcaggttggcctgtgtgacgacaagcgggtctcaaaagcccatcacgcaactggcctgcaattattggaggagagcgcgtcgagttggttccagaggctgcgtggtggggccggactctgcgacgacctctcgttcgcgtccgatttggttgccgtgagccgtgacgtaacgcctccttccgttcctccctatataagttccacccccgggtccggtttccccaagccccagtgacccccgatcccgatcgcgaaatctccgcacccgccggcaagggaccgaagcaagcctctctcccgaccgtcgcatcaaggtacgcgtccgctcgatctgtcctcttccttctcgatttgacttgctgtggtgcccgatcacgggatcagaatcgcaccagtgtagatttcgcatgttctaagatgtgttagtttccaggctaatccagttctcttgacgcccgatccgatcgagctccgtgtttatttcagcctaatcgtagtattcccctaaaatttcctcattagggggttcgcaagattgttggtcgacaggttcacttatgctcgatcgcttacttttagtcgattcatgctgcgtactattgttgccccccgtggttttatcttttctcgtgtgaaatccagtagatatagtagatatcgtagcattaggttttaattcaatcgattgattattgtatcatcaaaattgagaagttcgaatcatgcctatcatgctgcctcaaccgaaatcctgtatattgaagtttcaattcaattgattgatcattcattagattcaaccaaaatctagaaggttagatgacgcatgtcatgctgcctgcgtagtttacctttgatctgtttatgattaccttatcagtaggatatttgtgattttgggaagtagcactaactgattcatgctgacatgatgttccctttcagattatactgttgagtcctatctaattgatgctttgtatgctatatgaatacgtcatggtaaattagcagttaattagcatattagcaattgggcgtacctcatcaggattgctcttgtagatgtgtgtggtgatgtttcttgttcaattcatgttctgctttaaaagtatgtgttctctgtttgttaattaagattcatggttataatgatttggacctaattaatcagggttgcccttttagatgcgtggttacttgttgagttcatttttttcctgctatagttgtatgcgtttgttcattcatggttagatttgatttgtttcttctctattccatgccttccatatacttcaattgtagcttaacatgagatttctgtatatgcaggtcgaccgccggggatccacacgacaccatggcccagtccaagcacggcctgaccaaggagatgaccatgaagtaccgcatggagggctgcgtggacggccacaagttcgtgatcaccggcgagggcatcggctaccccttcaagggcaagcaggccatcaacctgtgcgtggtggagggcggccccttgcccttcgccgaggacatcttgtccgccgccttcatgtacggcaaccgcgtgttcaccgagtacccccaggacatcgtcgactacttcaagaactcctgccccgccggctacacctgggaccgctccttcctgttcgaggacggcgccgtgtgcatctgcaacgccgacatcaccgtgagcgtggaggagaactgcatgtaccacgagtccaagttctacggcgtgaacttccccgccgacggccccgtgatgaagaagatgaccgacaactgggagccctcctgcgagaagatcatccccgtgcccaagcagggcatcttgaagggcgacgtgagcatgtacctgctgctgaaggacggtggccgcttgcgctgccagttcgacaccgtgtacaaggccaagtccgtgccccgcaagatgcccgactggcacttcatccagcacaagctgacccgcgaggaccgcagcgacgccaagaaccagaagtggcacctgaccgagcacgccatcgcctccggctccgccttgccctccggactcagatctcgatagagtcaacctagacttgtccatcttctggattggccaacttaattaatgtatgaaataaaaggatgcacacatagtgacatgctaatcactataatgtgggcatcaaagttgtgtgttatgtgtaattactagttatctgaataaaagagaaagagatcatccatatttcttatcctaaatgaatgtcacgtgtctttataattctttgatgaaccagatgcatttcattaaccaaatccatatacatataaatattaatcatatataattaatatcaattgggttagcaaaacaaatctagtctaggtgtgttttgcgaattgcggcgcccttactttaacgcctctaaccaacacccctttatctttataaggaacaataaacagaatttgccccactgttctaaatcacctaataatatccccagctaaaaacaataaaggtttcctagaattaagacaagcatgactgttcctccaggagggtttggaacattgttgcagtcttgcagatacgggcgaagggtgagaaacagagcggagggctggaggtgacctcggtagtcgacgccggagttgagcttgacaacgacggggcggcccctgatggacttgaggaagtccgatggcgtcttcaccgtcccgccggcgcccgaggcgggcctgtcgctgccgccgccgccgctgctcatcttgcgcgctgtgcccccggcggtgtccctgtgttgcggatcgcgggtgggccaggtggatgcgagggcgacccgtttggactccggccggagccgccggatccctggtcggtgtcagtgccgtttactctgggccccacgtgtcagtaccgtctgtagatgacaacaacccgtcgtccacagtcatgtccaaaatatcctttcttcttttttttcgattcggatatctatcttccttttttttttccaaaaatcttcttgacgcaccagcgcgcacgtttgtggtaaacgccgacacgtcggtcccacgtcgatagaccccacccaccagtgagtagcgtgtacgtattcgggggtgacggacgtgtcgccgtcgtcttgctagtcccattcccatctgagccacacatctctgaacaaaaaaaaggagggaggcctccacgcacatccccctccgtgccacccgccccaaaccctcgcgccgcctccgagacagccgccgcaaccatggccaccgccgccgccgcgtctaccgcgctcactggcgccactaccgctgcgcccaaggcgaggcgccgggcgcacctcctggccacccgccgcgccctcgccgcgcccatcaggtgctcagcggcgtcacccgccatgccgatggctcccccggccaccccgctccggccgtggggccccaccgagccccgcaagggtgctgacatcctcgtcgagtccctcgagcgctgcggcgtccgcgacgtcttcgcctaccccggcggcgcgtccatggagatccaccaggcactcacccgctcccccgtcatcgccaaccacctcttccgccacgagcaaggggaggcctttgccgcctccggctacgcgcgctcctcgggccgcgtcggcgtctgcatcgccacctccggccccggcgccaccaacctagtctccgcgctcgccgacgcgctgctcgattccgtccccatggtcgccatcacgggacaggtggcgcgacgcatgattggcaccgacgccttccaggagacgcccatcgtcgaggtcacccgctccatcaccaagcacaactacctggtcctcgacgtcgacgacatcccccgcgtcgtgcaggaggctttcttcctcgcctcctctggtcgaccagggccggtgcttgtcgacatccccaaggacatccagcagcagatggcggtgcctgtctgggacaagcccatgagtctgcctgggtacattgcgcgccttcccaagccccctgcgactgagttgcttgagcaggtgctgcgtcttgttggtgaatcgcggcgccctgttctttatgtgggcggtggctgcgcagcatctggtgaggagttgcgacgctttgtggagctgactggaatcccggtcacaactactcttatgggcctcggcaacttccccagcgacgacccactgtctctgcgcatgctaggtatgcatgggacggtgtatgcaaattatgcagtggataaggccgatctgttgcttgcacttggtgtgcggtttgatgatcgcgtgacagggaagattgaggcttttgcaagcagggctaagattgtgcacgttgatattgatccggctgagattggcaagaacaagcagccacatgtgtccatctgtgcagatgttaagcttgctttgcagggcatgaatgctcttcttgaaggaagcacatcaaagaagagctttgactttggctcatggaacgatgagttggatcagcagaagagggaattcccccttgggtataaaacatctaatgaggagatccagccacaatatgctattcaggttcttgatgagctgacgaaaggcgaggccatcatcggcacaggtgttgggcagcaccagatgtgggcggcacagtactacacttacaagcggccaaggcagtggttgtcttcagctggtcttggggctatgggatttggtttgccggctgctgctggtgcttctgtggcaaacccaggtgtcactgttgttgacatcgatggagatggtagctttctcatgaacgttcaggagctagctatgatccgaattgagaacctcccagtgaaggtctttgtgctaaacaaccagcacctggggatggtggtgcagttggaggacaggttctataaggccaacagagcgcacacatacttgggaaacccagagaatgaaagtgagatatatccagatttcgtgacgatcgccaaagggttcaacattccagcggtccgtgtgacaaagaagaacgaagtccgcgcagcgataaagaagatgctcgagactccagggccgtacctcttggatataatcgtcccacaccaggagcatgtgttgcctatgatccctagtggtggggctttcaaggatatgatcctggatggtgatggcaggactgtgtactgactagctagtcagttaacagatctgccagatcctcggtgtacaaataacccgtcttatcctatgagacgggccggcgtcagtgtgttctggaggaatttttatgtcagagcctttttctttgtgtgcttgatgtagatgccaagggaagcttattggctgttgaagcttgatgcaaaataaattatggaactctgttttttgtttatctaataataactagcaaatatgcttccattgcattgaaactaacagccttttgtgtttccaagttttattttgtgacaatgtcatctatttcaattagttgtggaatcggaaacttgcaggactaacttggaaactccaatccctcagcatcctggactttttcctggtgtaatccatgtagatattattttaatcatcattttagttctggaggtttttccatctccggttttgctcccctttcttcaaaaaaaaaaaaaaaatgccgtaggcgccgcaacgcccacctgttgttcaaactcatgggcacgagtggctcgaagattttatacaacaattgctgtagtttcaccgttgctggtgaagaagcatttttttaaaaaaatatagtggtattcattttaattagtttagttgtgcagcgagcaaaatttggacatgctctgctcggaatctgatcgacctagacacagattagcagcagtagctttgtcatctgttccaagagttgcgatctgatagaagaaaaaaaaaccttcccttcaatgtaaaaccgaaactaacaagaaagaagcacagtgccgtttaggcaagtatggagtacgtattaagcatgtagaaggccatgcatgaaccactaacaagaaagaagcgcagtgccattcaggcaagcataagcatgtagattggcatgcatgaacaactaacagtagatcgtctctggtctgattagaagttttttgggaagccaagaaatcatgtacaactggttccatctcaaattccgtggcaaaaagaggcctaagcaacatacctcgagtagatcacattcaagcttggtcacccggtccgtcaatattctgattccgatgacttcgtaggttcctagctcaagccgctcgtgtccaagcgtcacttacgattagctaatgattacggcatctaggaccgactagtggcgcgccgactagctagctaaggtaccgagctcgaattcattccgattaatcgtggcctcttgctcttcaggatgaagagctatgtttaaacgtgcaagcgctactagacaattcagtacattaaaaacgtccgcaatgtgttattaagttgtctaagcgtcaatttgtttacaccacaatatatcctgcca

SEQ ID NO: 259 - DNA, 22361 bp, Artificial Sequence
  PHP98564
gtttacccgccaatatatcctgtcaaacactgatagtttaaactgaaggcgggaaacgacaatctgatcatgagcggagaattaagggagtcacgttatgacccccgccgatgacgcgggacaagccgttttacgtttggaactgacagaaccgcaacgttgaaggagccactcagcaagctggtacgattgtaatacgactcactatagggcgaattgagcgctgtttaaacgctcttcaactggaagagcggttacgctgtttaaacgctcttcaactggaagagcggttactaccggttcactagctagctgctaatcgagctagttaccctatgaggtgacatgaagcgctcacggttactatgacggttagcttcacgactgttggtggcagtagcgtacgacttagctatagttccggacttacccttaagcgatttaaatctgcggttaccgaattcgagctcggtacctagtacccttgtacttttggtttcacctgcatagagaaaacccacaagaatatgacagtctgatttgtcagtctcattctcaagcaacatttctctatccgttactttcatggtgaataacacaatccatcatcaatactttgtgttactcagaaactgaaagttattccgagtcttgcatatctttggacctactcgtttttctaccattattgctgattgttaagctctcgctacttgaatcggcattgttggagtgggaaggttcaaaaaattggagttatgactagttgtctctttctatgtacgatggagaaaatgaataaacaactgagaaaatggctcttgtttagttgatgatgctcttaagctttccactggttgccatatatgatttgggcatttcactttgatcttaatgggccttgtaaagcccaagactcatgattatctttagttgatgctcttaattaggtgtgggcaaataattcaaactgtatgtacccgaccaaaaccaaagcaaaaataatcgaaccaaaccgaaaatttaaaaataaccgaatgaaaactaaatcctataactgaaagaactgaaaccgaatcaaaatatttaatgtaaccaaaaatatccgaaatataattatattgtcaaaaatattaataatttctagattaaataattaaaaatacttaaaaatttatataaaatagtaaaaatactcgaaaataaccacaaatattcaaaaacaaccgaaatatcccaaaatattcaaagcaaaataaccgaatggataccaaattttaaaaccgaaaaaactggaacaaaaccaaaatcgaaccaaaatttcaaaaatcgaataaatactaaactttagaacaaaaaaaaacgataaccgaatgtatacgaaccaaagccgaattagataaccgaacgtccaggactactcttaatctttccgccacttatgatttgggctattactttgtttataatgagccttttcaagctcaagttcatgattgtccgtgagatgagaaactgacttgttggattcgaaaccctagctagtattggttaatacttaatacataaatgacctgcattgacatcatcatccaagaaaataaaaattgtatgcttgagatatttagttttcctagctaggttttctttattttagtaccgaatctttaggtgtgccacgttaatttagacccattttttcatacttaccaactgagtctagtttaatcatgactataatcgtataaaatgattcagtcgacgtcattgcgaacgtatataaaatcatccaaattgacgtcattccaaagaggtaagcatgcttatctaagagtccgagcatactaaacaagacgacattttatttgcactccaaatcaaattttgtattgcctaaagaaaaacaatcaaactcaagtttcttaaaattaatttcattcaaactaatcactttcaatatctcacatattattcatgccatttctatttgtctaaacatgatttaaaaaaaaaagtaaaatacaaagattactatgcaaaaactctataaaaaaaaattcaaatttcttatttatttgtgacatcaaattttcaaaataatttttttaattatcggttgatccggtcagtcgataaaaacataaactttcagcgaccgttaaaactttcctactaccgatttagagaaaatcttagcttgaaacgtaattgtaacctgccttcatgcaagtcgcaagatatgtcatcctaagttgtatatgttttctcaaaagatgtatttacttgagaaaatacgtttcaacgttgatggacaaccaattaagaatcaagcacctttcgtaatcaatttaggcttatcgtctaaggtatactgatttacgacagttgactagacttataaggaacaaaataatagaatagtttctaaacacttcacctaatcatagagactaagatggtaattcgtaaacgacaaagcctagtgacactgtccattgtaaaattccacatcatattagtattaaacatatacatgtagtttcctgaacacatgtagtatcaaacacacttcgtggcttcttcctcgaaacctgcggccgcgctatagttccggacttacccttaagataacttcgtatagcatacattatacgaagttatgggcccacgcgtgaagagcggttaccagagctggtcacctttgtccaccaagatggaactgtcttcggccagaatggccatctggattcagcaggcctagaaggccatttatcgctatcaactttgtatagaaaagttgggccgagctcggtacggccagaatggcccggaccgggttaccgaattcttaccctagctccctgcggctgttacgcggtcccccatcaatcttctgttcttgcggttgtagcctgtgtaacagtgctagagtatgtatgataaataggttttaagtctgcttacatgacattttttattgtggaagagacatataaaaattagagagagtggttctcatgcaacggcggacggcccggtgctaaaagagcttcaagacaaaataatgaaacaggaagagagtagatttatctaagagccaactttattatatgaatgtgtttattgttggctttagatgatatggtaaggagttagagctaataatagataggctctattattattattattaattaaactcgctctaaggaggaaagtgggaggaagggacgaggacgaagactactggaagcatcgtgcatggatgatggatgtggtgtctcttaatgtaggtggccggaggatgtacgtgttaattgcgcgataagcactcagatccaaccgcaaactacctccacactgacacactgatagagagaaagagagacctccgacgactgccgccgcagatgagccacgtacgtatacgacgtctgccggccggctcaggctgccgccatcaccctgctcgaaagtcgcgttaggcggcgccagctacataggagtatctagtctagccagttagtatactactactgcgctgatgatgaattaactctgcatagatactgtacttgcctccctccaacacccaaccacctcctgctcggctcttaataacttggacacggatcgatgccatccaaggaagaacacgacgacgacgacggaacatccaccatgcaagcttgcatccatacgccgatacgcgtgcatccatccatccaccattatttccattttccaccgatcacacgtacacaggcctatttaaggagcgacatcccactgcaactctcctcaccactcatcaccagctagctctagcaaagcacttgccatctaccgaccgccgcattccaaacagcccgacgagctagcagagcggcaggcacctccctcctcaaggaacccatggcggccaatgcgggcggcggtggagcgggaggaggcagcggcagcggcagcgtggctgcgccggcggtgtgccgccccagcggctcgcggtggacgccgacgccggagcagatcaggatgctgaaggagctctactacggctgcggcatccggtcgcccagctcggagcagatccagcgcatcaccgccatgctgcggcagcacggcaagatcgagggcaagaacgtcttctactggttccagaaccacaaggcccgcgagcgccagaagcgccgcctcaccagcctcgacgtcaacgtgcccgccgccggcgcggccgacgccaccaccagccaactcggcgtcctctcgctgtcgtcgccgccgccttcaggcgcggcgcctccctcgcccaccctcggcttctacgccgccggcaatggcggcggatcggctgtgctgctggacacgagttccgactggggcagcagcggcgctgctatggccaccgagacatgcttcctgcaggactacatgggcgtgacggacacgggcagctcgtcgcagtggccacgcttctcgtcgtcggacacgataatggcggcggccgcggcgcgggcggcgacgacgcgggcgcccgagacgctccctctcttcccgacctgcggcgacgacggcggcagcggtagcagcagctacttgccgttctggggtgccgcgtccacaactgccggcgccacttcttccgttgcgatccaacagcaacaccagctgcaggagcagtacagcttttacagcaacagcaacagcacccagctggccggcaccggcaaccaagacgtatcggcaacagcagcagcagccgccgccctggagctgagcctcagctcatggtgctccccttaccctgctgcagggagtatgtgagagcaacgcgagctgccactgctcttcactgatgtctctggaatggaaggaggaggaagtgagaacagatcattcgacaaagcagcattagtccgttgatcggtggaagaccactcgtcagtgttgagttgaatgtttgatcaataaaatacggcaatgctgtaagggttgttttttatgccattgataatacactgtactgttcagttgttgaactctatttcttagccatgccaagtgcttttcttattttgaataacattacagcaaaaagttgaaagacaaaaaaaaaaacccccgaacagagtgctttgggtcccaagcttctttagactgtgttcggcgttccccctaaatttctccccctatatctcactcacttgtcacatcagcgttctctttccccctatatctccacgctctacagcagttccacctatatcaaacctctataccccaccacaacaatattatatactttcatcttcaactaactcatgtaccttccaatttttttctactaataattatttacgtgcacagaaacttagcaaggagagagagagcggggtcacccggtccgggcctagaaggccagcttcaagtttgtacaaaaaagcaggctccggccagaatggcccggaccgggttaccgaattcgagctcggtaccatttaaattgcgcccgccacggccgtggaggtcgtattccggtcagcttgcatccctgcagtgcagcgtgacccggtcgtgcccctctctagagataatgagcattgcatgtctaagttataaaaaattaccacatattttttttgtcacacttgtttgaagtgcagtttatctatctttatacatatatttaaactttactctacgaataatataatctatagtactacaataatatcagtgttttagagaatcatataaatgaacagttagacatggtctaaaggacaattgagtattttgacaacaggactctacagttttatctttttagtgtgcatgtgttctcctttttttttgcaaatagcttcacctatataatacttcatccattttattagtacatccatttagggtttagggttaatggtttttatagactaatttttttagtacatctattttattctattttagcctctaaattaagaaaactaaaactctattttagtttttttatttaataatttagatataaaatagaataaaataaagtgactaaaaattaaacaaataccctttaagaaattaaaaaaactaaggaaacatttttcttgtttcgagtagataatgccagcctgttaaacgccgtcgacgagtctaacggacaccaaccagcgaaccagcagcgtcgcgtcgggccaagcgaagcagacggcacggcatctctgtcgctgcctctggacccctctcgagagttccgctccaccgttggacttgctccgctgtcggcatccagaaattgcgtggcggagcggcagacgtgagccggcacggcaggcggcctcctcctcctctcacggcaccggcagctacgggggattcctttcccaccgctccttcgctttcccttcctcgcccgccgtaataaatagacaccccctccacaccctctttccccaacctcgtgttgttcggagcgcacacacacacaaccagatctcccccaaatccacccgtcggcacctccgcttcaaggtacgccgctcgtcctcccccccccccctctctaccttctctagatcggcgttccggtccatgcatggttagggcccggtagttctacttctgttcatgtttgtgttagatccgtgtttgtgttagatccgtgctgctagcgttcgtacacggatgcgacctgtacgtcagacacgttctgattgctaacttgccagtgtttctctttggggaatcctgggatggctctagccgttccgcagacgggatcgatttcatgattttttttgtttcgttgcatagggtttggtttgcccttttcctttatttcaatatatgccgtgcacttgtttgtcgggtcatcttttcatgcttttttttgtcttggttgtgatgatgtggtctggttgggcggtcgttctagatcggagtagaattctgtttcaaactacctggtggatttattaattttggatctgtatgtgtgtgccatacatattcatagttacgaattgaagatgatggatggaaatatcgatctaggataggtatacatgttgatgcgggttttactgatgcatatacagagatgctttttgttcgcttggttgtgatgatgtggtgtggttgggcggtcgttcattcgttctagatcggagtagaatactgtttcaaactacctggtgtatttattaattttggaactgtatgtgtgtgtcatacatcttcatagttacgagtttaagatggatggaaatatcgatctaggataggtatacatgttgatgtgggttttactgatgcatatacatgatggcatatgcagcatctattcatatgctctaaccttgagtacctatctattataataaacaagtatgttttataattattttgatcttgatatacttggatgatggcatatgcagcagctatatgtggatttttttagccctgccttcatacgctatttatttgcttggtactgtttcttttgtcgatgctcaccctgttgtttggtgttacttctgcaggtcgactctagaggatccatggccactgtgaacaactggctcgctttctccctctccccgcaggagctgccgccctcccagacgacggactccacactcatctcggccgccaccgccgaccatgtctccggcgatgtctgcttcaacatcccccaagattggagcatgaggggatcagagctttcggcgctcgtcgcggagccgaagctggaggacttcctcggcggcatctccttctccgagcagcatcacaaggccaactgcaacatgatacccagcactagcagcacagtttgctacgcgagctcaggtgctagcaccggctaccatcaccagctgtaccaccagcccaccagctcagcgctccacttcgcggactccgtaatggtggcttcctcggccggtgtccacgacggcggtgccatgctcagcgcggccgccgctaacggtgtcgctggcgctgccagtgccaacggcggcggcatcgggctgtccatgattaagaactggctgcggagccaaccggcgcccatgcagccgagggtggcggcggctgagggcgcgcaggggctctctttgtccatgaacatggcggggacgacccaaggcgctgctggcatgccacttctcgctggagagcgcgcacgggcgcccgagagtgtatcgacgtcagcacagggtggagccgtcgtcgtcacggcgccgaaggaggatagcggtggcagcggtgttgccggcgctctagtagccgtgagcacggacacgggtggcagcggcggcgcgtcggctgacaacacggcaaggaagacggtggacacgttcgggcagcgcacgtcgatttaccgtggcgtgacaaggcatagatggactgggagatatgaggcacatctttgggataacagttgcagaagggaagggcaaactcgtaagggtcgtcaagtctatttaggtggctatgataaagaggagaaagctgctagggcttatgatcttgctgctctgaagtactggggtgccacaacaacaacaaattttccagtgagtaactacgaaaaggagctcgaggacatgaagcacatgacaaggcaggagtttgtagcgtctctgagaaggaagagcagtggtttctccagaggtgcatccatttacaggggagtgactaggcatcaccaacatggaagatggcaagcacggattggacgagttgcagggaacaaggatctttacttgggcaccttcagcacccaggaggaggcagcggaggcgtacgacatcgcggcgatcaagttccgcggcctcaacgccgtcaccaacttcgacatgagccgctacgacgtgaagagcatcctggacagcagcgccctccccatcggcagcgccgccaagcgcctcaaggaggccgaggccgcagcgtccgcgcagcaccaccacgccggcgtggtgagctacgacgtcggccgcatcgcctcgcagctcggcgacggcggagccctggcggcggcgtacggcgcgcactaccacggcgccgcctggccgaccatcgcgttccagccgggcgccgccagcacaggcctgtaccacccgtacgcgcagcagccaatgcgcggcggcgggtggtgcaagcaggagcaggaccacgcggtgatcgcggccgcgcacagcctgcaggacctccaccacctgaacctgggcgcggccggcgcgcacgactttttctcggcagggcagcaggccgccgccgctgcgatgcacggcctgggtagcatcgacagtgcgtcgctcgagcacagcaccggctccaactccgtcgtctacaacggcggggtcggcgacagcaacggcgccagcgccgtcggcggcagtggcggtggctacatgatgccgatgagcgctgccggagcaaccactacatcggcaatggtgagccacgagcaggtgcatgcacgggcctacgacgaagccaagcaggctgctcagatggggtacgagagctacctggtgaacgcggagaacaatggtggcggaaggatgtctgcatgggggactgtcgtgtctgcagccgcggcggcagcagcaagcagcaacgacaacatggccgccgacgtcgggcatggcggcgcgcagctcttcagtgtctggaacgacacttaagcgtacgtgccggcctggctctccgaaagggcgtattccagcacactggcggccgttactagacccaacctagacttgtccatcttctggattggccaacttaattaatgtatgaaataaaaggatgcacacatagtgacatgctaatcactataatgtgggcatcaaagttgtgtgttatgtgtaattactagttatctgaataaaagagaaagagatcatccatatttcttatcctaaatgaatgtcacgtgtctttataattctttgatgaaccagatgcatttcattaaccaaatccatatacatataaatattaatcatatataattaatatcaattgggttagcaaaacaaatctagtctaggtgtgttttgcgaatgcggcctccgggcacccagctttcttgtacaaagtggccgttaacggatcggccagaatggcccggaccgggttaccgaattcgagctcggtaccctggttcacaaactcaatacaacacacagtggagtagggtattacgctccggcggcccgaaccactctaaatccttgtgtcctcgtgtgctcttccaccattaatgactgtaattgcagggacacgaagagttgtagcgcttttgccaacaagatccgctatatgctagtagagtggaacctgcacagcaacaagcatccaataatctgagaataagaattatgtgtggtgatggttctcatctctgcaactcgccattttcgcgagagaaccaaatccaagttggtgaagatcatgatttgggctcatgggctggcatagtagctattacctttgcaattgtggttcgaatctatccgatattctccttttcagggagagctaatgcttatgcttattgggtattttggtttgacactgcttcacgcccaaaaaaaggcaactatgtctgagttggatatggcccaaaaaaaggcagctatgtctgagttggatatggaagtcttctttcgtttagggtgaagtaagaccaagctcatgagcttattatcttaggtcggaacaaattagttgataggcatggcacatttatcaaattataatgattttaacagaaaagcaacacctctttttcagcagcaccagctttgcaagctgcaattgacactccaagcatagtatttgctccaaactcagcctgcatttcgcacaatatcatatctatttccatttggataaaatatattttccagaaatatgggaacagaatcaagatacagaaaaaagttgtggtagtagtggtaagtggaaacacaagtacagtgaaaagatagcattatttctgaacagtcaaattaaccgaaataagtagtatcacatactgcccctaaattgactacacccaatgtaaagaattgcttgagcatattgagccatcagttgtttgtttgtgtaacggatttgacaatgcagagttcaggagcaaaaaaccgcaaaggagagaaagagggaaaggatctcctagtatcccaccttgtggcgcgccctgtcaagtgcatgatggcctggtcgatctgcgtctgctgctgcggttccatcccaacgagtgcctccgacaccttgtcgttgatcacccgcaccgcgtaggcgacccccctggcgaggaacttccgcctctcggaggccccggccgcgtcggcggcggcgccctcgagcgcgcccacgctagccgtagatgctcggtgcacggccttgttggtgtgcaactcgacctcaacggccggtgcgctacgcccgtcaaggatctggcgcgcccgcaccctcgtgatcacggtgggcgcctcccgcctcatgtggccgacgatgaaaagcgccgggttaggggccttggcgcgcaccgccgtattcagggcctcctcgctcttgcgcgagagcaggtgcttccccaggtactcctgcactgacaaggctgccacagcggtggaatttgtcctcacgacttcgccacgtcgtcctcacctccctggcttcccacgactccgccgtatcgaggtgctcggtgggtcgtcttaatccgaagtccgaactaggaagacgagacagagaggtctgaggaatgggcctcgtttgatgttgagctgaattatttttccagcataagcccaggtcttggtccatgaacaaaattactagaaacccagcccagtactacgatctaaaagagggactgccactggatagctctctctagcattctccacgctccaatacagcggcgtcgtgtctatccgggtctatccgcgaacacgtgagaactctccagaaactgctttctcctccacttcatctctctcgctttccctctataaaaagaccccttctaggaattgagggagacagcaagcaccaagcagcgatccgaagctcaatcaattcactcaaacctcttccccaaatcttcgattagatcttcgttgacaagaagactagaaccgaacctgacatgtccaacctgctcacggttcaccagaaccttccggctcttccagtggacgcgacgtccgatgaagtcaggaagaacctcatggacatgttccgcgacaggcaagcgttcagcgagcacacctggaagatgctgctctccgtctgccgctcctgggctgcatggtgcaagctgaacaacaggaagtggttccccgctgagcccgaggacgtgagggattaccttctgtacctgcaagcgcgaggtttgtttctgcttctacctttgatatatatataataattatcattaattagtagtaatataatatttcaaatatttttttcaaaataaaagaatgtagtatatagcaattgcttttctgtagtttataagtgtgtatattttaatttataacttttctaatatatgaccaaaacatggtgatgcctaggtctggcagtgaagaccatccagcaacaccttggacaactgaacatgcttcacaggcgctccggcctcccgcgccccagcgactcgaacgccgtgagcctcgtcatgcgccgcatcaggaaggaaaacgtcgatgccggcgaaagggcaaagcaggccctcgcgttcgagaggaccgatttcgaccaggtccgcagcctgatggagaacagcgacaggtgccaggacattaggaacctggcgttcctcggaattgcatacaacacgctcctcaggatcgcggaaattgcccgcattcgcgtgaaggacattagccgcaccgacggcggcaggatgcttatccacattggcaggaccaagacgctcgtttccaccgcaggcgtcgaaaaggccctcagcctcggagtgaccaagctcgtcgaacgctggatctccgtgtccggcgtcgcggacgacccaaacaactacctcttctgccgcgtccgcaagaacggggtggctgcccctagcgccaccagccaactcagcacgagggccttggaaggtattttcgaggccacccaccgcctgatctacggcgcgaaggatgacagcggtcaacgctacctcgcatggtccgggcactccgcccgcgttggagctgctagggacatggcccgcgccggtgtttccatccccgaaatcatgcaggcgggtggatggacgaacgtgaacattgtcatgaactacattcgcaaccttgacagcgagacgggcgcaatggttcgcctcctggaagatggtgactgaggtacccaacctagacttgtccatcttctggattggccaacttaattaatgtatgaaataaaaggatgcacacatagtgacatgctaatcactataatgtgggcatcaaagttgtgtgttatgtgtaattactagttatctgaataaaagagaaagagatcatccatatttcttatcctaaatgaatgtcacgtgtctttataattctttgatgaaccagatgcatttcattaaccaaatccatatacatataaatattaatcatatataattaatatcaattgggttagcaaaacaaatctagtctaggtgtgttttgcgatccgatatcgaattggccacggtaccagctgctgctgttctagggttcacaagtctgcctatttgtcttccccaatggagctatggttgtctggtctggtccttggtcgtgtcccgtttcattgtgtactatttacctgtaatgtgtatccttaagtctggtttgatggtgtctgaaacgttttgctgtggtagagcagcatggaagaactataatgaataagtgatccctaatcattgtgtccaaattttgcttctgctatacccttttgtgctgtttcttatgttttgcttaaaaatttgatctgacaaacaaatttgtctaaattatgctcttgttctgactgtgtactgtacacatttgtattgctaccggtttggcacatagttttctctttgattgcagatcaaacccttctgattgcagattgcttggctatggctgatgtgctcactgttcttctttagcttgtatattgctgatggtggcttggctacggctgaaaaagttgctgctgcgccgacttggcaactgttgctccagtaatgctttgtcctctcttcctagccgccgacttggcacttggcagctgttgctcctgtaatgcgttgttatctcttatctcttgagatgtactatgattttgaggctgtttgacttgtgccagattgccagtgctgatgctatattatctcaggtttttatgctagtatatgttttactgtgtgctgcctgtgtcgagttacgtaatctattgaaccgctatgcgtgttgatgccctgttgttgcttgccagattgatgcccctgttgcttgcagcttgcaagctgtagtgaaatcctaaaattccaaaccaaatctattctgaacttttgaagatctgtgatgtccggaagaaaagattcaaacagataaacgggactctccagaatctataaaataaatgatcgacaaacgctttgctttggtaggcttcaagcttggtcacccggtccgggcctagaaggccagcttcggccgccccgggcaactttattatacaaagttgatagataaatcagatatctggttcctaaggacccggcggaccgattaaactgattcggtccgacgcgttacctaataacttcgtatagcatacattatacgaagttattagctaactaactagtaagcttaagccatgggtcgacggatccgttaactagcgtggcatttggcaccgccgcacactatgcgagctaggagtgctagtttacagatgaaactatgaaaccaagaaaacacaattgtccgtagctagcgcgtggcgtcgtgtcaagcttcacacagtatcttcgttcttcactataaatcgcgcctgttgttcgtgagacccaccaccgtggataacagtcccctaataataagcgatcaacagcactgctgatggctgaacaccgaggcgccgccgcgcgtaaccatccgccggagcagcccgtcgtgccggcgaacgacgccttccccgaccgcgcccagcagctctgcctcgacgccgggcgcgcgctcgcgatgtgcggcgtgctcgtcgccgtccctcccgcattttacgcgtcgacgtcgcggacgacaccgcacttgccttcgtcggcttcgtcctctggatcatcggtgcgtggctgtgcctcctggcgctcacgcccttggctccacgggcggtgagggcgggcggggccgccgccagcaccttgctgatcaggtgcctgtccctttcatgaactactagcgcccgcgcccgcggccgccgggcacaagagaacacatcgatgttcgctgcgtacgtcagcaataaggcactctttgtcagtagtcgagtgcatatgttgggtgtttgccctgggagatttcaagtgttgtggccattatcccgcaggataaaaaatcggcggcttttggattgatacggaaaataacgatgtttcatgctcgtgttgtgtgtgtgacatcttgtcagccaagtttttaaccgttgctactccccctctgtgggctcagtgtgtggaccggaatacgtcgtacataggccgtagcctaagcccaatatgccgtttttcaggttggcctgtgtgacgacaagcgggtctcaaaagcccatcacgcaactggcctgcaattattggaggagagcgcgtcgagttggttccagaggctgcgtggtggggccggactctgcgacgacctctcgttcgcgtccgatttggttgccgtgagccgtgacgtaacgcctccttccgttcctccctatataagttccacccccgggtccggtttccccaagccccagtgacccccgatcccgatcgcgaaatctccgcacccgccggcaagggaccgaagcaagcctctctcccgaccgtcgcatcaaggtacgcgtccgctcgatctgtcctcttccttctcgatttgacttgctgtggtgcccgatcacgggatcagaatcgcaccagtgtagatttcgcatgttctaagatgtgttagtttccaggctaatccagttctcttgacgcccgatccgatcgagctccgtgtttatttcagcctaatcgtagtattcccctaaaatttcctcattagggggttcgcaagattgttggtcgacaggttcacttatgctcgatcgcttacttttagtcgattcatgctgcgtactattgttgccccccgtggttttatcttttctcgtgtgaaatccagtagatatagtagatatcgtagcattaggttttaattcaatcgattgattattgtatcatcaaaattgagaagttcgaatcatgcctatcatgctgcctcaaccgaaatcctgtatattgaagtttcaattcaattgattgatcattcattagattcaaccaaaatctagaaggttagatgacgcatgtcatgctgcctgcgtagtttacctttgatctgtttatgattaccttatcagtaggatatttgtgattttgggaagtagcactaactgattcatgctgacatgatgttccctttcagattatactgttgagtcctatctaattgatgctttgtatgctatatgaatacgtcatggtaaattagcagttaattagcatattagcaattgggcgtacctcatcaggattgctcttgtagatgtgtgtggtgatgtttcttgttcaattcatgttctgctttaaaagtatgtgttctctgtttgttaattaagattcatggttataatgatttggacctaattaatcagggttgcccttttagatgcgtggttacttgttgagttcatttttttcctgctatagttgtatgcgtttgttcattcatggttagatttgatttgtttcttctctattccatgccttccatatacttcaattgtagcttaacatgagatttctgtatatgcaggtcgaccgccggggatccacacgacaccatggcccagtccaagcacggcctgaccaaggagatgaccatgaagtaccgcatggagggctgcgtggacggccacaagttcgtgatcaccggcgagggcatcggctaccccttcaagggcaagcaggccatcaacctgtgcgtggtggagggcggccccttgcccttcgccgaggacatcttgtccgccgccttcatgtacggcaaccgcgtgttcaccgagtacccccaggacatcgtcgactacttcaagaactcctgccccgccggctacacctgggaccgctccttcctgttcgaggacggcgccgtgtgcatctgcaacgccgacatcaccgtgagcgtggaggagaactgcatgtaccacgagtccaagttctacggcgtgaacttccccgccgacggccccgtgatgaagaagatgaccgacaactgggagccctcctgcgagaagatcatccccgtgcccaagcagggcatcttgaagggcgacgtgagcatgtacctgctgctgaaggacggtggccgcttgcgctgccagttcgacaccgtgtacaaggccaagtccgtgccccgcaagatgcccgactggcacttcatccagcacaagctgacccgcgaggaccgcagcgacgccaagaaccagaagtggcacctgaccgagcacgccatcgcctccggctccgccttgccctccggactcagatctcgatagagtcaacctagacttgtccatcttctggattggccaacttaattaatgtatgaaataaaaggatgcacacatagtgacatgctaatcactataatgtgggcatcaaagttgtgtgttatgtgtaattactagttatctgaataaaagagaaagagatcatccatatttcttatcctaaatgaatgtcacgtgtctttataattctttgatgaaccagatgcatttcattaaccaaatccatatacatataaatattaatcatatataattaatatcaattgggttagcaaaacaaatctagtctaggtgtgttttgcgaattgcggcgcccttactttaacgcctctaaccaacacccctttatctttataaggaacaataaacagaatttgccccactgttctaaatcacctaataatatccccagctaaaaacaataaaggtttcctagaattaagacaagcatgactgttcctccaggagggtttggaacattgttgcagtcttgcagatacgggcgaagggtgagaaacagagcggagggctggaggtgacctcggtagtcgacgccggagttgagcttgacaacgacggggcggcccctgatggacttgaggaagtccgatggcgtcttcaccgtcccgccggcgcccgaggcgggcctgtcgctgccgccgccgccgctgctcatcttgcgcgctgtgcccccggcggtgtccctgtgttgcggatcgcgggtgggccaggtggatgcgagggcgacccgtttggactccggccggagccgccggatccctggtcggtgtcagtgccgtttactctgggccccacgtgtcagtaccgtctgtagatgacaacaacccgtcgtccacagtcatgtccaaaatatcctttcttcttttttttcgattcggatatctatcttccttttttttttccaaaaatcttcttgacgcaccagcgcgcacgtttgtggtaaacgccgacacgtcggtcccacgtcgatagaccccacccaccagtgagtagcgtgtacgtattcgggggtgacggacgtgtcgccgtcgtcttgctagtcccattcccatctgagccacacatctctgaacaaaaaaaaggagggaggcctccacgcacatccccctccgtgccacccgccccaaaccctcgcgccgcctccgagacagccgccgcaaccatggccaccgccgccgccgcgtctaccgcgctcactggcgccactaccgctgcgcccaaggcgaggcgccgggcgcacctcctggccacccgccgcgccctcgccgcgcccatcaggtgctcagcggcgtcacccgccatgccgatggctcccccggccaccccgctccggccgtggggccccaccgagccccgcaagggtgctgacatcctcgtcgagtccctcgagcgctgcggcgtccgcgacgtcttcgcctaccccggcggcgcgtccatggagatccaccaggcactcacccgctcccccgtcatcgccaaccacctcttccgccacgagcaaggggaggcctttgccgcctccggctacgcgcgctcctcgggccgcgtcggcgtctgcatcgccacctccggccccggcgccaccaacctagtctccgcgctcgccgacgcgctgctcgattccgtccccatggtcgccatcacgggacaggtggcgcgacgcatgattggcaccgacgccttccaggagacgcccatcgtcgaggtcacccgctccatcaccaagcacaactacctggtcctcgacgtcgacgacatcccccgcgtcgtgcaggaggctttcttcctcgcctcctctggtcgaccagggccggtgcttgtcgacatccccaaggacatccagcagcagatggcggtgcctgtctgggacaagcccatgagtctgcctgggtacattgcgcgccttcccaagccccctgcgactgagttgcttgagcaggtgctgcgtcttgttggtgaatcgcggcgccctgttctttatgtgggcggtggctgcgcagcatctggtgaggagttgcgacgctttgtggagctgactggaatcccggtcacaactactcttatgggcctcggcaacttccccagcgacgacccactgtctctgcgcatgctaggtatgcatgggacggtgtatgcaaattatgcagtggataaggccgatctgttgcttgcacttggtgtgcggtttgatgatcgcgtgacagggaagattgaggcttttgcaagcagggctaagattgtgcacgttgatattgatccggctgagattggcaagaacaagcagccacatgtgtccatctgtgcagatgttaagcttgctttgcagggcatgaatgctcttcttgaaggaagcacatcaaagaagagctttgactttggctcatggaacgatgagttggatcagcagaagagggaattcccccttgggtataaaacatctaatgaggagatccagccacaatatgctattcaggttcttgatgagctgacgaaaggcgaggccatcatcggcacaggtgttgggcagcaccagatgtgggcggcacagtactacacttacaagcggccaaggcagtggttgtcttcagctggtcttggggctatgggatttggtttgccggctgctgctggtgcttctgtggcaaacccaggtgtcactgttgttgacatcgatggagatggtagctttctcatgaacgttcaggagctagctatgatccgaattgagaacctcccagtgaaggtctttgtgctaaacaaccagcacctggggatggtggtgcagttggaggacaggttctataaggccaacagagcgcacacatacttgggaaacccagagaatgaaagtgagatatatccagatttcgtgacgatcgccaaagggttcaacattccagcggtccgtgtgacaaagaagaacgaagtccgcgcagcgataaagaagatgctcgagactccagggccgtacctcttggatataatcgtcccacaccaggagcatgtgttgcctatgatccctagtggtggggctttcaaggatatgatcctggatggtgatggcaggactgtgtactgactagctagtcagttaacagatctgccagatcctcggtgtacaaataacccgtcttatcctatgagacgggccggcgtcagtgtgttctggaggaatttttatgtcagagcctttttctttgtgtgcttgatgtagatgccaagggaagcttattggctgttgaagcttgatgcaaaataaattatggaactctgttttttgtttatctaataataactagcaaatatgcttccattgcattgaaactaacagccttttgtgtttccaagttttattttgtgacaatgtcatctatttcaattagttgtggaatcggaaacttgcaggactaacttggaaactccaatccctcagcatcctggactttttcctggtgtaatccatgtagatattattttaatcatcattttagttctggaggtttttccatctccggttttgctcccctttcttcaaaaaaaaaaaaaaaatgccgtaggcgccgcaacgcccacctgttgttcaaactcatgggcacgagtggctcgaagattttatacaacaattgctgtagtttcaccgttgctggtgaagaagcatttttttaaaaaaatatagtggtattcattttaattagtttagttgtgcagcgagcaaaatttggacatgctctgctcggaatctgatcgacctagacacagattagcagcagtagctttgtcatctgttccaagagttgcgatctgatagaagaaaaaaaaaccttcccttcaatgtaaaaccgaaactaacaagaaagaagcacagtgccgtttaggcaagtatggagtacgtattaagcatgtagaaggccatgcatgaaccactaacaagaaagaagcgcagtgccattcaggcaagcataagcatgtagattggcatgcatgaacaactaacagtagatcgtctctggtctgattagaagttttttgggaagccaagaaatcatgtacaactggttccatctcaaattccgtggcaaaaagaggcctaagcaacatacctcgagtagatcacattcaagcttggtcacccggtccgtcaatattctgattccgatgacttcgtaggttcctagctcaagccgctcgtgtccaagcgtcacttacgattagctaatgattacggcatctaggaccgactagtggcgcgccgactagctagctaaggtaccgagctcgaattcattccgattaatcgtggcctcttgctcttcaggatgaagagctatgtttaaacgtgcaagcgctactagacaattcagtacattaaaaacgtccgcaatgtgttattaagttgtctaagcgtcaatttgtttacaccacaatatatcctgcca

SEQ ID NO: 260 - DNA, 24141 bp, Artificial Sequence
  PHP98565
gtttacccgccaatatatcctgtcaaacactgatagtttaaactgaaggcgggaaacgacaatctgatcatgagcggagaattaagggagtcacgttatgacccccgccgatgacgcgggacaagccgttttacgtttggaactgacagaaccgcaacgttgaaggagccactcagcaagctggtacgattgtaatacgactcactatagggcgaattgagcgctgtttaaacgctcttcaactggaagagcggttacgctgtttaaacgctcttcaactggaagagcggttactaccggttcactagctagctgctaatcgagctagttaccctatgaggtgacatgaagcgctcacggttactatgacggttagcttcacgactgttggtggcagtagcgtacgacttagctatagttccggacttacccttaagcgatttaaatctgcggttaccgaattcgagctcggtacctagtacccttgtacttttggtttcacctgcatagagaaaacccacaagaatatgacagtctgatttgtcagtctcattctcaagcaacatttctctatccgttactttcatggtgaataacacaatccatcatcaatactttgtgttactcagaaactgaaagttattccgagtcttgcatatctttggacctactcgtttttctaccattattgctgattgttaagctctcgctacttgaatcggcattgttggagtgggaaggttcaaaaaattggagttatgactagttgtctctttctatgtacgatggagaaaatgaataaacaactgagaaaatggctcttgtttagttgatgatgctcttaagctttccactggttgccatatatgatttgggcatttcactttgatcttaatgggccttgtaaagcccaagactcatgattatctttagttgatgctcttaattaggtgtgggcaaataattcaaactgtatgtacccgaccaaaaccaaagcaaaaataatcgaaccaaaccgaaaatttaaaaataaccgaatgaaaactaaatcctataactgaaagaactgaaaccgaatcaaaatatttaatgtaaccaaaaatatccgaaatataattatattgtcaaaaatattaataatttctagattaaataattaaaaatacttaaaaatttatataaaatagtaaaaatactcgaaaataaccacaaatattcaaaaacaaccgaaatatcccaaaatattcaaagcaaaataaccgaatggataccaaattttaaaaccgaaaaaactggaacaaaaccaaaatcgaaccaaaatttcaaaaatcgaataaatactaaactttagaacaaaaaaaaacgataaccgaatgtatacgaaccaaagccgaattagataaccgaacgtccaggactactcttaatctttccgccacttatgatttgggctattactttgtttataatgagccttttcaagctcaagttcatgattgtccgtgagatgagaaactgacttgttggattcgaaaccctagctagtattggttaatacttaatacataaatgacctgcattgacatcatcatccaagaaaataaaaattgtatgcttgagatatttagttttcctagctaggttttctttattttagtaccgaatctttaggtgtgccacgttaatttagacccattttttcatacttaccaactgagtctagtttaatcatgactataatcgtataaaatgattcagtcgacgtcattgcgaacgtatataaaatcatccaaattgacgtcattccaaagaggtaagcatgcttatctaagagtccgagcatactaaacaagacgacattttatttgcactccaaatcaaattttgtattgcctaaagaaaaacaatcaaactcaagtttcttaaaattaatttcattcaaactaatcactttcaatatctcacatattattcatgccatttctatttgtctaaacatgatttaaaaaaaaaagtaaaatacaaagattactatgcaaaaactctataaaaaaaaattcaaatttcttatttatttgtgacatcaaattttcaaaataatttttttaattatcggttgatccggtcagtcgataaaaacataaactttcagcgaccgttaaaactttcctactaccgatttagagaaaatcttagcttgaaacgtaattgtaacctgccttcatgcaagtcgcaagatatgtcatcctaagttgtatatgttttctcaaaagatgtatttacttgagaaaatacgtttcaacgttgatggacaaccaattaagaatcaagcacctttcgtaatcaatttaggcttatcgtctaaggtatactgatttacgacagttgactagacttataaggaacaaaataatagaatagtttctaaacacttcacctaatcatagagactaagatggtaattcgtaaacgacaaagcctagtgacactgtccattgtaaaattccacatcatattagtattaaacatatacatgtagtttcctgaacacatgtagtatcaaacacacttcgtggcttcttcctcgaaacctgcggccgcgctatagttccggacttacccttaagataacttcgtatagcatacattatacgaagttatgggcccacgcgtgaagagcggttaccagagctggtcacctttgtccaccaagatggaactgtcttcggccagaatggccatctggattcagcaggcctagaaggccatttatcgctatcaactttgtatagaaaagttgggccgagctcggtacggccagaatggcccggaccgggttaccgaattcttaccctagctccctgcggctgttacgcggtcccccatcaatcttctgttcttgcggttgtagcctgtgtaacagtgctagagtatgtatgataaataggttttaagtctgcttacatgacattttttattgtggaagagacatataaaaattagagagagtggttctcatgcaacggcggacggcccggtgctaaaagagcttcaagacaaaataatgaaacaggaagagagtagatttatctaagagccaactttattatatgaatgtgtttattgttggctttagatgatatggtaaggagttagagctaataatagataggctctattattattattattaattaaactcgctctaaggaggaaagtgggaggaagggacgaggacgaagactactggaagcatcgtgcatggatgatggatgtggtgtctcttaatgtaggtggccggaggatgtacgtgttaattgcgcgataagcactcagatccaaccgcaaactacctccacactgacacactgatagagagaaagagagacctccgacgactgccgccgcagatgagccacgtacgtatacgacgtctgccggccggctcaggctgccgccatcaccctgctcgaaagtcgcgttaggcggcgccagctacataggagtatctagtctagccagttagtatactactactgcgctgatgatgaattaactctgcatagatactgtacttgcctccctccaacacccaaccacctcctgctcggctcttaataacttggacacggatcgatgccatccaaggaagaacacgacgacgacgacggaacatccaccatgcaagcttgcatccatacgccgatacgcgtgcatccatccatccaccattatttccattttccaccgatcacacgtacacaggcctatttaaggagcgacatcccactgcaactctcctcaccactcatcaccagctagctctagcaaagcacttgccatctaccgaccgccgcattccaaacagcccgacgagctagcagagcggcaggcacctccctcctcaaggaacccatggcggccaatgcgggcggcggtggagcgggaggaggcagcggcagcggcagcgtggctgcgccggcggtgtgccgccccagcggctcgcggtggacgccgacgccggagcagatcaggatgctgaaggagctctactacggctgcggcatccggtcgcccagctcggagcagatccagcgcatcaccgccatgctgcggcagcacggcaagatcgagggcaagaacgtcttctactggttccagaaccacaaggcccgcgagcgccagaagcgccgcctcaccagcctcgacgtcaacgtgcccgccgccggcgcggccgacgccaccaccagccaactcggcgtcctctcgctgtcgtcgccgccgccttcaggcgcggcgcctccctcgcccaccctcggcttctacgccgccggcaatggcggcggatcggctgtgctgctggacacgagttccgactggggcagcagcggcgctgctatggccaccgagacatgcttcctgcaggactacatgggcgtgacggacacgggcagctcgtcgcagtggccacgcttctcgtcgtcggacacgataatggcggcggccgcggcgcgggcggcgacgacgcgggcgcccgagacgctccctctcttcccgacctgcggcgacgacggcggcagcggtagcagcagctacttgccgttctggggtgccgcgtccacaactgccggcgccacttcttccgttgcgatccaacagcaacaccagctgcaggagcagtacagcttttacagcaacagcaacagcacccagctggccggcaccggcaaccaagacgtatcggcaacagcagcagcagccgccgccctggagctgagcctcagctcatggtgctccccttaccctgctgcagggagtatgtgagagcaacgcgagctgccactgctcttcactgatgtctctggaatggaaggaggaggaagtgagaacagatcattcgacaaagcagcattagtccgttgatcggtggaagaccactcgtcagtgttgagttgaatgtttgatcaataaaatacggcaatgctgtaagggttgttttttatgccattgataatacactgtactgttcagttgttgaactctatttcttagccatgccaagtgcttttcttattttgaataacattacagcaaaaagttgaaagacaaaaaaaaaaacccccgaacagagtgctttgggtcccaagcttctttagactgtgttcggcgttccccctaaatttctccccctatatctcactcacttgtcacatcagcgttctctttccccctatatctccacgctctacagcagttccacctatatcaaacctctataccccaccacaacaatattatatactttcatcttcaactaactcatgtaccttccaatttttttctactaataattatttacgtgcacagaaacttagcaaggagagagagagcggggtcacccggtccgggcctagaaggccagcttcaagtttgtacaaaaaagcaggctccggccagaatctcactgactagctaaacagcggccgcatcgagcagctggcttgtggggaccagacaaaaaaggaatggtgcagaattgttaggcgcacctaccaaaagcatctttgcctttattgcaaagataaagcagattcctctagtacaagtggggaacaaaataacgtggaaaagagctgtcctgacagcccactcactaatgcgtatgacgaacgcagtgacgaccacaaaactcgagcaacgagatcatgagccaatcaaagaggagtgatgtagacctaaagcaataatggagccatgacgtaagggcttacgcccatacgaaataattaaaggctgatgtgacctgtcggtctctcagaacctttactttttatgtttggcgtgtatttttaaatttccacggcaatgacgatgtgaccgtcgacccactaaaacattgctttgtcaaaagctaaaaaagatgatgcccgacagccacttgtgtgaagcatgagaagccggtccctccactaagaaaattagtgaagcatcttccagtggtccctccactcacagctcaatcagtgagcaacaggacgaaggaaatgacgtaagccatgacgtctaatcccagggcccggtgaccaatcgaattagcttggcgcgtggaccgaagcttgcatgcctgcagtgcagcgtgacccggtcgtgcccctctctagagataatgagcattgcatgtctaagttataaaaaattaccacatattttttttgtcacacttgtttgaagtgcagtttatctatctttatacatatatttaaactttactctacgaataatataatctatagtactacaataatatcagtgttttagagaatcatataaatgaacagttagacatggtctaaaggacaattgagtattttgacaacaggactctacagttttatctttttagtgtgcatgtgttctcctttttttttgcaaatagcttcacctatataatacttcatccattttattagtacatccatttagggtttagggttaatggtttttatagactaatttttttagtacatctattttattctattttagcctctaaattaagaaaactaaaactctattttagtttttttatttaataatttagatataaaatagaataaaataaagtgactaaaaattaaacaaataccctttaagaaattaaaaaaactaaggaaacatttttcttgtttcgagtagataatgccagcctgttaaacgccgtcgacgagtctaacggacaccaaccagcgaaccagcagcgtcgcgtcgggccaagcgaagcagacggcacggcatctctgtcgctgcctctggacccctctcgagagttccgctccaccgttggacttgctccgctgtcggcatccagaaattgcgtggcggagcggcagacgtgagccggcacggcaggcggcctcctcctcctctcacggcaccggcagctacgggggattcctttcccaccgctccttcgctttcccttcctcgcccgccgtaataaatagacaccccctccacaccctctttccccaacctcgtgttgttcggagcgcacacacacacaaccagatctcccccaaatccacccgtcggcacctccgcttcaaggtacgccgctcgtcctcccccccccccctctctaccttctctagatcggcgttccggtccatgcatggttagggcccggtagttctacttctgttcatgtttgtgttagatccgtgtttgtgttagatccgtgctgctagcgttcgtacacggatgcgacctgtacgtcagacacgttctgattgctaacttgccagtgtttctctttggggaatcctgggatggctctagccgttccgcagacgggatcgatttcatgattttttttgtttcgttgcatagggtttggtttgcccttttcctttatttcaatatatgccgtgcacttgtttgtcgggtcatcttttcatgcttttttttgtcttggttgtgatgatgtggtctggttgggcggtcgttctagatcggagtagaattctgtttcaaactacctggtggatttattaattttggatctgtatgtgtgtgccatacatattcatagttacgaattgaagatgatggatggaaatatcgatctaggataggtatacatgttgatgcgggttttactgatgcatatacagagatgctttttgttcgcttggttgtgatgatgtggtgtggttgggcggtcgttcattcgttctagatcggagtagaatactgtttcaaactacctggtgtatttattaattttggaactgtatgtgtgtgtcatacatcttcatagttacgagtttaagatggatggaaatatcgatctaggataggtatacatgttgatgtgggttttactgatgcatatacatgatggcatatgcagcatctattcatatgctctaaccttgagtacctatctattataataaacaagtatgttttataattattttgatcttgatatacttggatgatggcatatgcagcagctatatgtggatttttttagcactgccttcatacgctatttatttgcttggtactgtttcttttgtcgatgctcaccctgttgtttggtgttacttctgcaggtcgactttaacttagcctaggatccatggccactgtgaacaactggctcgctttctccctctccccgcaggagctgccgccctcccagacgacggactccacactcatctcggccgccaccgccgaccatgtctccggcgatgtctgcttcaacatcccccaagattggagcatgaggggatcagagctttcggcgctcgtcgcggagccgaagctggaggacttcctcggcggcatctccttctccgagcagcatcacaaggccaactgcaacatgatacccagcactagcagcacagtttgctacgcgagctcaggtgctagcaccggctaccatcaccagctgtaccaccagcccaccagctcagcgctccacttcgcggactccgtaatggtggcttcctcggccggtgtccacgacggcggtgccatgctcagcgcggccgccgctaacggtgtcgctggcgctgccagtgccaacggcggcggcatcgggctgtccatgattaagaactggctgcggagccaaccggcgcccatgcagccgagggtggcggcggctgagggcgcgcaggggctctctttgtccatgaacatggcggggacgacccaaggcgctgctggcatgccacttctcgctggagagcgcgcacgggcgcccgagagtgtatcgacgtcagcacagggtggagccgtcgtcgtcacggcgccgaaggaggatagcggtggcagcggtgttgccggcgctctagtagccgtgagcacggacacgggtggcagcggcggcgcgtcggctgacaacacggcaaggaagacggtggacacgttcgggcagcgcacgtcgatttaccgtggcgtgacaaggcatagatggactgggagatatgaggcacatctttgggataacagttgcagaagggaagggcaaactcgtaagggtcgtcaagtctatttaggtggctatgataaagaggagaaagctgctagggcttatgatcttgctgctctgaagtactggggtgccacaacaacaacaaattttccagtgagtaactacgaaaaggagctcgaggacatgaagcacatgacaaggcaggagtttgtagcgtctctgagaaggaagagcagtggtttctccagaggtgcatccatttacaggggagtgactaggcatcaccaacatggaagatggcaagcacggattggacgagttgcagggaacaaggatctttacttgggcaccttcagcacccaggaggaggcagcggaggcgtacgacatcgcggcgatcaagttccgcggcctcaacgccgtcaccaacttcgacatgagccgctacgacgtgaagagcatcctggacagcagcgccctccccatcggcagcgccgccaagcgcctcaaggaggccgaggccgcagcgtccgcgcagcaccaccacgccggcgtggtgagctacgacgtcggccgcatcgcctcgcagctcggcgacggcggagccctggcggcggcgtacggcgcgcactaccacggcgccgcctggccgaccatcgcgttccagccgggcgccgccagcacaggcctgtaccacccgtacgcgcagcagccaatgcgcggcggcgggtggtgcaagcaggagcaggaccacgcggtgatcgcggccgcgcacagcctgcaggacctccaccacctgaacctgggcgcggccggcgcgcacgactttttctcggcagggcagcaggccgccgccgctgcgatgcacggcctgggtagcatcgacagtgcgtcgctcgagcacagcaccggctccaactccgtcgtctacaacggcggggtcggcgacagcaacggcgccagcgccgtcggcggcagtggcggtggctacatgatgccgatgagcgctgccggagcaaccactacatcggcaatggtgagccacgagcaggtgcatgcacgggcctacgacgaagccaagcaggctgctcagatggggtacgagagctacctggtgaacgcggagaacaatggtggcggaaggatgtctgcatgggggactgtcgtgtctgcagccgcggcggcagcagcaagcagcaacgacaacatggccgccgacgtcgggcatggcggcgcgcagctcttcagtgtctggaacgacacttaagcgtacctagtggtacctgacatcttatagtctgcaacctctcgtgtctgaattcctatctttatcaagtgttattgcttccacgactataggacagctttcgtcgaaagcttttgctcatgtgatctcgaaggattcatctagtctgatttttcgtgacttgtatcggttttattggattcatccaacatatatcaataaaaaatgagttgtgtttcctttcttcctagttcagttaaaattatttccctcctgcgcttgtgctgtaattgtctgtgtacctgttgtttgtgactgtgttagttcccttggatatgatttcgtatttgatatgtacatggagatagcttagcttcattattggagtatgaagttagtatgacatagtcactctcctggaaaattgacactgcaaaccatatttttattctgaaccacaaatcctagtcagtccgctggcatatgccgtccgtttgctgaatccagaacgtgggtttggagatgtacggctgagatgcctctatgcgaaggggatttcgtggtgaaacgagatgggagtagagcaacgcccgtggaagatgcttcaaacttccacacttttgagcaacgatcggcagtagtaaggtagacgatttcaagatcaaagcatatgaagataaacaacatcaacaacaaaatttgttggggttctatagagagaaacagagctacatacatacactgttttgtatctaccatctgagatgatgaaaagatgaaaaactaaagaatgccccggcgccaacgccaggacacgccgcgcgcgcgtcacccgagccatctcttgacccagccggcgctgtatatttacacacgttgcagcatcgatcaccacctgttcgatcgcgtcgccgtcaccggcgcgccgcgacttattgaactagtctagggcgcggctaacaacctagcttagattgccttgtctaaacccttaggctaacgcgccactctagaaggccgatctcccccgaacgcgccagatccgatatcgatgggccctggccgaagcttggtcacccggtccgggcctagaaggccgatctcccgggcacccagctttcttgtacaaagtggccgttaacggatcggccagaatggcccggaccgggttaccccgcggttcaaagccaatgactgttgttaggtccagtttctaaggacgaatcatccaatcactggttctttctgaacaaaacaaagagctatagagttacgttactgtagccgagacagagcctgcaatctggttatgccacatactaggttctttcttaaagttgactcactctatcctaagttctacttacaaggagctacaacaaattggtcataaccggagagcgttcaaggaggtaatatcccatcttactctgtagcaaggctacaaaaggagagctaaagaactaggctacaaaaagagagctaaagaactaactatctagcaagactacagagctatagtgtagagatttcataaccggtgagcgttcaaggatactttgaagagaagaggtaatatctcaactagcaagactacaaaaaaatggagatataaaactaactgtctaacaagactacagagctatagtagagatagatacgttcgacacttaagcatgagaattcgagctcggtaccctggttcacaaactcaatacaacacacagtggagtagggtattacgctccggcggcccgaaccactctaaatccttgtgtcctcgtgtgctcttccaccattaatgactgtaattgcagggacacgaagagttgtagcgcttttgccaacaagatccgctatatgctagtagagtggaacctgcacagcaacaagcatccaataatctgagaataagaattatgtgtggtgatggttctcatctctgcaactcgccattttcgcgagagaaccaaatccaagttggtgaagatcatgatttgggctcatgggctggcatagtagctattacctttgcaattgtggttcgaatctatccgatattctccttttcagggagagctaatgcttatgcttattgggtattttggtttgacactgcttcacgcccaaaaaaaggcaactatgtctgagttggatatggcccaaaaaaaggcagctatgtctgagttggatatggaagtcttctttcgtttagggtgaagtaagaccaagctcatgagcttattatcttaggtcggaacaaattagttgataggcatggcacatttatcaaattataatgattttaacagaaaagcaacacctctttttcagcagcaccagctttgcaagctgcaattgacactccaagcatagtatttgctccaaactcagcctgcatttcgcacaatatcatatctatttccatttggataaaatatattttccagaaatatgggaacagaatcaagatacagaaaaaagttgtggtagtagtggtaagtggaaacacaagtacagtgaaaagatagcattatttctgaacagtcaaattaaccgaaataagtagtatcacatactgcccctaaattgactacacccaatgtaaagaattgcttgagcatattgagccatcagttgtttgtttgtgtaacggatttgacaatgcagagttcaggagcaaaaaaccgcaaaggagagaaagagggaaaggatctcctagtatcccaccttgtggcgcgccctgtcaagtgcatgatggcctggtcgatctgcgtctgctgctgcggttccatcccaacgagtgcctccgacaccttgtcgttgatcacccgcaccgcgtaggcgacccccctggcgaggaacttccgcctctcggaggccccggccgcgtcggcggcggcgccctcgagcgcgcccacgctagccgtagatgctcggtgcacggccttgttggtgtgcaactcgacctcaacggccggtgcgctacgcccgtcaaggatctggcgcgcccgcaccctcgtgatcacggtgggcgcctcccgcctcatgtggccgacgatgaaaagcgccgggttaggggccttggcgcgcaccgccgtattcagggcctcctcgctcttgcgcgagagcaggtgcttccccaggtactcctgcactgacaaggctgccacagcggtggaatttgtcctcacgacttcgccacgtcgtcctcacctccctggcttcccacgactccgccgtatcgaggtgctcggtgggtcgtcttaatccgaagtccgaactaggaagacgagacagagaggtctgaggaatgggcctcgtttgatgttgagctgaattatttttccagcataagcccaggtcttggtccatgaacaaaattactagaaacccagcccagtactacgatctaaaagagggactgccactggatagctctctctagcattctccacgctccaatacagcggcgtcgtgtctatccgggtctatccgcgaacacgtgagaactctccagaaactgctttctcctccacttcatctctctcgctttccctctataaaaagaccccttctaggaattgagggagacagcaagcaccaagcagcgatccgaagctcaatcaattcactcaaacctcttccccaaatcttcgattagatcttcgttgacaagaagactagaaccgaacctgacatgtccaacctgctcacggttcaccagaaccttccggctcttccagtggacgcgacgtccgatgaagtcaggaagaacctcatggacatgttccgcgacaggcaagcgttcagcgagcacacctggaagatgctgctctccgtctgccgctcctgggctgcatggtgcaagctgaacaacaggaagtggttccccgctgagcccgaggacgtgagggattaccttctgtacctgcaagcgcgaggtttgtttctgcttctacctttgatatatatataataattatcattaattagtagtaatataatatttcaaatatttttttcaaaataaaagaatgtagtatatagcaattgcttttctgtagtttataagtgtgtatattttaatttataacttttctaatatatgaccaaaacatggtgatgcctaggtctggcagtgaagaccatccagcaacaccttggacaactgaacatgcttcacaggcgctccggcctcccgcgccccagcgactcgaacgccgtgagcctcgtcatgcgccgcatcaggaaggaaaacgtcgatgccggcgaaagggcaaagcaggccctcgcgttcgagaggaccgatttcgaccaggtccgcagcctgatggagaacagcgacaggtgccaggacattaggaacctggcgttcctcggaattgcatacaacacgctcctcaggatcgcggaaattgcccgcattcgcgtgaaggacattagccgcaccgacggcggcaggatgcttatccacattggcaggaccaagacgctcgtttccaccgcaggcgtcgaaaaggccctcagcctcggagtgaccaagctcgtcgaacgctggatctccgtgtccggcgtcgcggacgacccaaacaactacctcttctgccgcgtccgcaagaacggggtggctgcccctagcgccaccagccaactcagcacgagggccttggaaggtattttcgaggccacccaccgcctgatctacggcgcgaaggatgacagcggtcaacgctacctcgcatggtccgggcactccgcccgcgttggagctgctagggacatggcccgcgccggtgtttccatccccgaaatcatgcaggcgggtggatggacgaacgtgaacattgtcatgaactacattcgcaaccttgacagcgagacgggcgcaatggttcgcctcctggaagatggtgactgaggtacccaacctagacttgtccatcttctggattggccaacttaattaatgtatgaaataaaaggatgcacacatagtgacatgctaatcactataatgtgggcatcaaagttgtgtgttatgtgtaattactagttatctgaataaaagagaaagagatcatccatatttcttatcctaaatgaatgtcacgtgtctttataattctttgatgaaccagatgcatttcattaaccaaatccatatacatataaatattaatcatatataattaatatcaattgggttagcaaaacaaatctagtctaggtgtgttttgcgatccgatatcgaattggccacggtaccagctgctgctgttctagggttcacaagtctgcctatttgtcttccccaatggagctatggttgtctggtctggtccttggtcgtgtcccgtttcattgtgtactatttacctgtaatgtgtatccttaagtctggtttgatggtgtctgaaacgttttgctgtggtagagcagcatggaagaactataatgaataagtgatccctaatcattgtgtccaaattttgcttctgctatacccttttgtgctgtttcttatgttttgcttaaaaatttgatctgacaaacaaatttgtctaaattatgctcttgttctgactgtgtactgtacacatttgtattgctaccggtttggcacatagttttctctttgattgcagatcaaacccttctgattgcagattgcttggctatggctgatgtgctcactgttcttctttagcttgtatattgctgatggtggcttggctacggctgaaaaagttgctgctgcgccgacttggcaactgttgctccagtaatgctttgtcctctcttcctagccgccgacttggcacttggcagctgttgctcctgtaatgcgttgttatctcttatctcttgagatgtactatgattttgaggctgtttgacttgtgccagattgccagtgctgatgctatattatctcaggtttttatgctagtatatgttttactgtgtgctgcctgtgtcgagttacgtaatctattgaaccgctatgcgtgttgatgccctgttgttgcttgccagattgatgcccctgttgcttgcagcttgcaagctgtagtgaaatcctaaaattccaaaccaaatctattctgaacttttgaagatctgtgatgtccggaagaaaagattcaaacagataaacgggactctccagaatctataaaataaatgatcgacaaacgctttgctttggtaggcttcaagcttggtcacccggtccgggcctagaaggccagcttcggccgccccgggcaactttattatacaaagttgatagataaatcagatatctggttcctaaggacccggcggaccgattaaactgattcggtccgacgcgttacctaataacttcgtatagcatacattatacgaagttattagctaactaactagtaagcttaagccatgggtcgacggatccgttaactagcgtggcatttggcaccgccgcacactatgcgagctaggagtgctagtttacagatgaaactatgaaaccaagaaaacacaattgtccgtagctagcgcgtggcgtcgtgtcaagcttcacacagtatcttcgttcttcactataaatcgcgcctgttgttcgtgagacccaccaccgtggataacagtcccctaataataagcgatcaacagcactgctgatggctgaacaccgaggcgccgccgcgcgtaaccatccgccggagcagcccgtcgtgccggcgaacgacgccttccccgaccgcgcccagcagctctgcctcgacgccgggcgcgcgctcgcgatgtgcggcgtgctcgtcgccgtccctcccgcattttacgcgtcgacgtcgcggacgacaccgcacttgccttcgtcggcttcgtcctctggatcatcggtgcgtggctgtgcctcctggcgctcacgcccttggctccacgggcggtgagggcgggcggggccgccgccagcaccttgctgatcaggtgcctgtccctttcatgaactactagcgcccgcgcccgcggccgccgggcacaagagaacacatcgatgttcgctgcgtacgtcagcaataaggcactctttgtcagtagtcgagtgcatatgttgggtgtttgccctgggagatttcaagtgttgtggccattatcccgcaggataaaaaatcggcggcttttggattgatacggaaaataacgatgtttcatgctcgtgttgtgtgtgtgacatcttgtcagccaagtttttaaccgttgctactccccctctgtgggctcagtgtgtggaccggaatacgtcgtacataggccgtagcctaagcccaatatgccgtttttcaggttggcctgtgtgacgacaagcgggtctcaaaagcccatcacgcaactggcctgcaattattggaggagagcgcgtcgagttggttccagaggctgcgtggtggggccggactctgcgacgacctctcgttcgcgtccgatttggttgccgtgagccgtgacgtaacgcctccttccgttcctccctatataagttccacccccgggtccggtttccccaagccccagtgacccccgatcccgatcgcgaaatctccgcacccgccggcaagggaccgaagcaagcctctctcccgaccgtcgcatcaaggtacgcgtccgctcgatctgtcctcttccttctcgatttgacttgctgtggtgcccgatcacgggatcagaatcgcaccagtgtagatttcgcatgttctaagatgtgttagtttccaggctaatccagttctcttgacgcccgatccgatcgagctccgtgtttatttcagcctaatcgtagtattcccctaaaatttcctcattagggggttcgcaagattgttggtcgacaggttcacttatgctcgatcgcttacttttagtcgattcatgctgcgtactattgttgccccccgtggttttatcttttctcgtgtgaaatccagtagatatagtagatatcgtagcattaggttttaattcaatcgattgattattgtatcatcaaaattgagaagttcgaatcatgcctatcatgctgcctcaaccgaaatcctgtatattgaagtttcaattcaattgattgatcattcattagattcaaccaaaatctagaaggttagatgacgcatgtcatgctgcctgcgtagtttacctttgatctgtttatgattaccttatcagtaggatatttgtgattttgggaagtagcactaactgattcatgctgacatgatgttccctttcagattatactgttgagtcctatctaattgatgctttgtatgctatatgaatacgtcatggtaaattagcagttaattagcatattagcaattgggcgtacctcatcaggattgctcttgtagatgtgtgtggtgatgtttcttgttcaattcatgttctgctttaaaagtatgtgttctctgtttgttaattaagattcatggttataatgatttggacctaattaatcagggttgcccttttagatgcgtggttacttgttgagttcatttttttcctgctatagttgtatgcgtttgttcattcatggttagatttgatttgtttcttctctattccatgccttccatatacttcaattgtagcttaacatgagatttctgtatatgcaggtcgaccgccggggatccacacgacaccatggcccagtccaagcacggcctgaccaaggagatgaccatgaagtaccgcatggagggctgcgtggacggccacaagttcgtgatcaccggcgagggcatcggctaccccttcaagggcaagcaggccatcaacctgtgcgtggtggagggcggccccttgcccttcgccgaggacatcttgtccgccgccttcatgtacggcaaccgcgtgttcaccgagtacccccaggacatcgtcgactacttcaagaactcctgccccgccggctacacctgggaccgctccttcctgttcgaggacggcgccgtgtgcatctgcaacgccgacatcaccgtgagcgtggaggagaactgcatgtaccacgagtccaagttctacggcgtgaacttccccgccgacggccccgtgatgaagaagatgaccgacaactgggagccctcctgcgagaagatcatccccgtgcccaagcagggcatcttgaagggcgacgtgagcatgtacctgctgctgaaggacggtggccgcttgcgctgccagttcgacaccgtgtacaaggccaagtccgtgccccgcaagatgcccgactggcacttcatccagcacaagctgacccgcgaggaccgcagcgacgccaagaaccagaagtggcacctgaccgagcacgccatcgcctccggctccgccttgccctccggactcagatctcgatagagtcaacctagacttgtccatcttctggattggccaacttaattaatgtatgaaataaaaggatgcacacatagtgacatgctaatcactataatgtgggcatcaaagttgtgtgttatgtgtaattactagttatctgaataaaagagaaagagatcatccatatttcttatcctaaatgaatgtcacgtgtctttataattctttgatgaaccagatgcatttcattaaccaaatccatatacatataaatattaatcatatataattaatatcaattgggttagcaaaacaaatctagtctaggtgtgttttgcgaattgcggcgcccttactttaacgcctctaaccaacacccctttatctttataaggaacaataaacagaatttgccccactgttctaaatcacctaataatatccccagctaaaaacaataaaggtttcctagaattaagacaagcatgactgttcctccaggagggtttggaacattgttgcagtcttgcagatacgggcgaagggtgagaaacagagcggagggctggaggtgacctcggtagtcgacgccggagttgagcttgacaacgacggggcggcccctgatggacttgaggaagtccgatggcgtcttcaccgtcccgccggcgcccgaggcgggcctgtcgctgccgccgccgccgctgctcatcttgcgcgctgtgcccccggcggtgtccctgtgttgcggatcgcgggtgggccaggtggatgcgagggcgacccgtttggactccggccggagccgccggatccctggtcggtgtcagtgccgtttactctgggccccacgtgtcagtaccgtctgtagatgacaacaacccgtcgtccacagtcatgtccaaaatatcctttcttcttttttttcgattcggatatctatcttccttttttttttccaaaaatcttcttgacgcaccagcgcgcacgtttgtggtaaacgccgacacgtcggtcccacgtcgatagaccccacccaccagtgagtagcgtgtacgtattcgggggtgacggacgtgtcgccgtcgtcttgctagtcccattcccatctgagccacacatctctgaacaaaaaaaaggagggaggcctccacgcacatccccctccgtgccacccgccccaaaccctcgcgccgcctccgagacagccgccgcaaccatggccaccgccgccgccgcgtctaccgcgctcactggcgccactaccgctgcgcccaaggcgaggcgccgggcgcacctcctggccacccgccgcgccctcgccgcgcccatcaggtgctcagcggcgtcacccgccatgccgatggctcccccggccaccccgctccggccgtggggccccaccgagccccgcaagggtgctgacatcctcgtcgagtccctcgagcgctgcggcgtccgcgacgtcttcgcctaccccggcggcgcgtccatggagatccaccaggcactcacccgctcccccgtcatcgccaaccacctcttccgccacgagcaaggggaggcctttgccgcctccggctacgcgcgctcctcgggccgcgtcggcgtctgcatcgccacctccggccccggcgccaccaacctagtctccgcgctcgccgacgcgctgctcgattccgtccccatggtcgccatcacgggacaggtggcgcgacgcatgattggcaccgacgccttccaggagacgcccatcgtcgaggtcacccgctccatcaccaagcacaactacctggtcctcgacgtcgacgacatcccccgcgtcgtgcaggaggctttcttcctcgcctcctctggtcgaccagggccggtgcttgtcgacatccccaaggacatccagcagcagatggcggtgcctgtctgggacaagcccatgagtctgcctgggtacattgcgcgccttcccaagccccctgcgactgagttgcttgagcaggtgctgcgtcttgttggtgaatcgcggcgccctgttctttatgtgggcggtggctgcgcagcatctggtgaggagttgcgacgctttgtggagctgactggaatcccggtcacaactactcttatgggcctcggcaacttccccagcgacgacccactgtctctgcgcatgctaggtatgcatgggacggtgtatgcaaattatgcagtggataaggccgatctgttgcttgcacttggtgtgcggtttgatgatcgcgtgacagggaagattgaggcttttgcaagcagggctaagattgtgcacgttgatattgatccggctgagattggcaagaacaagcagccacatgtgtccatctgtgcagatgttaagcttgctttgcagggcatgaatgctcttcttgaaggaagcacatcaaagaagagctttgactttggctcatggaacgatgagttggatcagcagaagagggaattcccccttgggtataaaacatctaatgaggagatccagccacaatatgctattcaggttcttgatgagctgacgaaaggcgaggccatcatcggcacaggtgttgggcagcaccagatgtgggcggcacagtactacacttacaagcggccaaggcagtggttgtcttcagctggtcttggggctatgggatttggtttgccggctgctgctggtgcttctgtggcaaacccaggtgtcactgttgttgacatcgatggagatggtagctttctcatgaacgttcaggagctagctatgatccgaattgagaacctcccagtgaaggtctttgtgctaaacaaccagcacctggggatggtggtgcagttggaggacaggttctataaggccaacagagcgcacacatacttgggaaacccagagaatgaaagtgagatatatccagatttcgtgacgatcgccaaagggttcaacattccagcggtccgtgtgacaaagaagaacgaagtccgcgcagcgataaagaagatgctcgagactccagggccgtacctcttggatataatcgtcccacaccaggagcatgtgttgcctatgatccctagtggtggggctttcaaggatatgatcctggatggtgatggcaggactgtgtactgactagctagtcagttaacagatctgccagatcctcggtgtacaaataacccgtcttatcctatgagacgggccggcgtcagtgtgttctggaggaatttttatgtcagagcctttttctttgtgtgcttgatgtagatgccaagggaagcttattggctgttgaagcttgatgcaaaataaattatggaactctgttttttgtttatctaataataactagcaaatatgcttccattgcattgaaactaacagccttttgtgtttccaagttttattttgtgacaatgtcatctatttcaattagttgtggaatcggaaacttgcaggactaacttggaaactccaatccctcagcatcctggactttttcctggtgtaatccatgtagatattattttaatcatcattttagttctggaggtttttccatctccggttttgctcccctttcttcaaaaaaaaaaaaaaaatgccgtaggcgccgcaacgcccacctgttgttcaaactcatgggcacgagtggctcgaagattttatacaacaattgctgtagtttcaccgttgctggtgaagaagcatttttttaaaaaaatatagtggtattcattttaattagtttagttgtgcagcgagcaaaatttggacatgctctgctcggaatctgatcgacctagacacagattagcagcagtagctttgtcatctgttccaagagttgcgatctgatagaagaaaaaaaaaccttcccttcaatgtaaaaccgaaactaacaagaaagaagcacagtgccgtttaggcaagtatggagtacgtattaagcatgtagaaggccatgcatgaaccactaacaagaaagaagcgcagtgccattcaggcaagcataagcatgtagattggcatgcatgaacaactaacagtagatcgtctctggtctgattagaagttttttgggaagccaagaaatcatgtacaactggttccatctcaaattccgtggcaaaaagaggcctaagcaacatacctcgagtagatcacattcaagcttggtcacccggtccgtcaatattctgattccgatgacttcgtaggttcctagctcaagccgctcgtgtccaagcgtcacttacgattagctaatgattacggcatctaggaccgactagtggcgcgccgactagctagctaaggtaccgagctcgaattcattccgattaatcgtggcctcttgctcttcaggatgaagagctatgtttaaacgtgcaagcgctactagacaattcagtacattaaaaacgtccgcaatgtgttattaagttgtctaagcgtcaatttgtttacaccacaatatatcctgcca

SEQ ID NO: 261 - DNA, 21542 bp, Artificial Sequence
  PHP97447
gtttacccgccaatatatcctgtcaaacactgcggccgcacttgaccgcggatggagccggagctgtggtgaggccatcgacgggaggtgggggagaacacagtctcagtgttctttgtgagtccgcaaggtttttagcttttctgtattaattaaggttgctgttggctgtagaatacggtcgtggaagagctgtatcggtagctactacgtaagctattatatactggaagtctggagctcgtcgatctccggtcgtcttcctccatttctcctcgtcttgctttgactgctgctaccatttgcttctgttttctgatgaagcatgccatgtcggccaccagtgtttgtgtggtttttgcagggaatggctttcaagtgctgtgattgaatggccctcgtcgtcctcggctgagctcacatggacgcgtcatgtgagtgagatatatgatcatatgatgagtggggttcgggtgagtgcgtacttgaagtaggatcccgctttcactcattcattcattggcctttaaaccgggaaattttcgcgaggagatggagggaagcaagcagggtgacgagtgcagagtgccgcgagcgctttgtcaaaaggcaccgccgtaggcaaaaaaatcaatggccctgactgactcgatggtagtactactgtagagactagagagggttgctccccatatcttcgtgtgacttttactccagcattgcatttccgtcattgagacgttaattaatagcagctttcgggacagatgactgtggccatgtttcgtcacggccgcttcgtgccagctgggggtactatagtactgtgattttgttagtaaaaactttcattaggccaccattgacgaccgggccttcgcttttgctgcgctaattaaccatttcccggcgaccgaagggaacatgaacatgccccgacacatgagggcatgaggactagtgttctccctgtcgttcgttgacttgactagtgatagtttaaacgctcttcaactggaagagcggttactaccggttcactagctagctgctaatcgagctagttaccctatgaggtgacatgaagcgctcacggttactatgacggttagcttcacgactgttggtggcagtagcgtacgacttagctatagttccggacttacctagctaataacttcgtatagcatacattatacgaagttatggttaccgaattcgagctcggtaccctggttcacaaactcaatacaacacacagtggagtagggtattacgctccggcggcccgaaccactctaaatccttgtgtcctcgtgtgctcttccaccattaatgactgtaattgcagggacacgaagagttgtagcgcttttgccaacaagatccgctatatgctagtagagtggaacctgcacagcaacaagcatccaataatctgagaataagaattatgtgtggtgatggttctcatctctgcaactcgccattttcgcgagagaaccaaatccaagttggtgaagatcatgatttgggctcatgggctggcatagtagctattacctttgcaattgtggttcgaatctatccgatattctccttttcagggagagctaatgcttatgcttattgggtattttggtttgacactgcttcacgcccaaaaaaaggcaactatgtctgagttggatatggcccaaaaaaaggcagctatgtctgagttggatatggaagtcttctttcgtttagggtgaagtaagaccaagctcatgagcttattatcttaggtcggaacaaattagttgataggcatggcacatttatcaaattataatgattttaacagaaaagcaacacctctttttcagcagcaccagctttgcaagctgcaattgacactccaagcatagtatttgctccaaactcagcctgcatttcgcacaatatcatatctatttccatttggataaaatatattttccagaaatatgggaacagaatcaagatacagaaaaaagttgtggtagtagtggtaagtggaaacacaagtacagtgaaaagatagcattatttctgaacagtcaaattaaccgaaataagtagtatcacatactgcccctaaattgactacacccaatgtaaagaattgcttgagcatattgagccatcagttgtttgtttgtgtaacggatttgacaatgcagagttcaggagcaaaaaaccgcaaaggagagaaagagggaaaggatctcctagtatcccaccttgtggcgcgccctgtcaagtgcatgatggcctggtcgatctgcgtctgctgctgcggttccatcccaacgagtgcctccgacaccttgtcgttgatcacccgcaccgcgtaggcgacccccctggcgaggaacttccgcctctcggaggccccggccgcgtcggcggcggcgccctcgagcgcgcccacgctagccgtagatgctcggtgcacggccttgttggtgtgcaactcgacctcaacggccggtgcgctacgcccgtcaaggatctggcgcgcccgcaccctcgtgatcacggtgggcgcctcccgcctcatgtggccgacgatgaaaagcgccgggttaggggccttggcgcgcaccgccgtattcagggcctcctcgctcttgcgcgagagcaggtgcttccccaggtactcctgcactgacaaggctgccacagcggtggaatttgtcctcacgacttcgccacgtcgtcctcacctccctggcttcccacgactccgccgtatcgaggtgctcggtgggtcgtcttaatccgaagtccgaactaggaagacgagacagagaggtctgaggaatgggcctcgtttgatgttgagctgaattatttttccagcataagcccaggtcttggtccatgaacaaaattactagaaacccagcccagtactacgatctaaaagagggactgccactggatagctctctctagcattctccacgctccaatacagcggcgtcgtgtctatccgggtctatccgcgaacacgtgagaactctccagaaactgctttctcctccacttcatctctctcgctttccctctataaaaagaccccttctaggaattgagggagacagcaagcaccaagcagcgatccgaagctcaatcaattcactcaaacctcttccccaaatcttcgattagatcttcgttgacaagaagactagaaccgaacctgacatgtccaacctgctcacggttcaccagaaccttccggctcttccagtggacgcgacgtccgatgaagtcaggaagaacctcatggacatgttccgcgacaggcaagcgttcagcgagcacacctggaagatgctgctctccgtctgccgctcctgggctgcatggtgcaagctgaacaacaggaagtggttccccgctgagcccgaggacgtgagggattaccttctgtacctgcaagcgcgaggtttgtttctgcttctacctttgatatatatataataattatcattaattagtagtaatataatatttcaaatatttttttcaaaataaaagaatgtagtatatagcaattgcttttctgtagtttataagtgtgtatattttaatttataacttttctaatatatgaccaaaacatggtgatgcctaggtctggcagtgaagaccatccagcaacaccttggacaactgaacatgcttcacaggcgctccggcctcccgcgccccagcgactcgaacgccgtgagcctcgtcatgcgccgcatcaggaaggaaaacgtcgatgccggcgaaagggcaaagcaggccctcgcgttcgagaggaccgatttcgaccaggtccgcagcctgatggagaacagcgacaggtgccaggacattaggaacctggcgttcctcggaattgcatacaacacgctcctcaggatcgcggaaattgcccgcattcgcgtgaaggacattagccgcaccgacggcggcaggatgcttatccacattggcaggaccaagacgctcgtttccaccgcaggcgtcgaaaaggccctcagcctcggagtgaccaagctcgtcgaacgctggatctccgtgtccggcgtcgcggacgacccaaacaactacctcttctgccgcgtccgcaagaacggggtggctgcccctagcgccaccagccaactcagcacgagggccttggaaggtattttcgaggccacccaccgcctgatctacggcgcgaaggatgacagcggtcaacgctacctcgcatggtccgggcactccgcccgcgttggagctgctagggacatggcccgcgccggtgtttccatccccgaaatcatgcaggcgggtggatggacgaacgtgaacattgtcatgaactacattcgcaaccttgacagcgagacgggcgcaatggttcgcctcctggaagatggtgactgaggtacccaacctagacttgtccatcttctggattggccaacttaattaatgtatgaaataaaaggatgcacacatagtgacatgctaatcactataatgtgggcatcaaagttgtgtgttatgtgtaattactagttatctgaataaaagagaaagagatcatccatatttcttatcctaaatgaatgtcacgtgtctttataattctttgatgaaccagatgcatttcattaaccaaatccatatacatataaatattaatcatatataattaatatcaattgggttagcaaaacaaatctagtctaggtgtgttttgcgatccgatcgagtctaaaaacggcccctaactaacgcttagttgcccgctagattagtcccccgttagtgcctagttagacacacgacgaactaggggctaggccggccgagctcggtccgggccattctggcccggaccgaagcttgcatgcctgcagtgcagcgtgacccggtcgtgcccctctctagagataatgagcattgcatgtctaagttataaaaaattaccacatattttttttgtcacacttgtttgaagtgcagtttatctatctttatacatatatttaaactttactctacgaataatataatctatagtactacaataatatcagtgttttagagaatcatataaatgaacagttagacatggtctaaaggacaattgagtattttgacaacaggactctacagttttatctttttagtgtgcatgtgttctcctttttttttgcaaatagcttcacctatataatacttcatccattttattagtacatccatttagggtttagggttaatggtttttatagactaatttttttagtacatctattttattctattttagcctctaaattaagaaaactaaaactctattttagtttttttatttaataatttagatataaaatagaataaaataaagtgactaaaaattaaacaaataccctttaagaaattaaaaaaactaaggaaacatttttcttgtttcgagtagataatgccagcctgttaaacgccgtcgacgagtctaacggacaccaaccagcgaaccagcagcgtcgcgtcgggccaagcgaagcagacggcacggcatctctgtcgctgcctctggacccctctcgagagttccgctccaccgttggacttgctccgctgtcggcatccagaaattgcgtggcggagcggcagacgtgagccggcacggcaggcggcctcctcctcctctcacggcaccggcagctacgggggattcctttcccaccgctccttcgctttcccttcctcgcccgccgtaataaatagacaccccctccacaccctctttccccaacctcgtgttgttcggagcgcacacacacacaaccagatctcccccaaatccacccgtcggcacctccgcttcaaggtacgccgctcgtcctcccccccccccctctctaccttctctagatcggcgttccggtccatgcatggttagggcccggtagttctacttctgttcatgtttgtgttagatccgtgtttgtgttagatccgtgctgctagcgttcgtacacggatgcgacctgtacgtcagacacgttctgattgctaacttgccagtgtttctctttggggaatcctgggatggctctagccgttccgcagacgggatcgatttcatgattttttttgtttcgttgcatagggtttggtttgcccttttcctttatttcaatatatgccgtgcacttgtttgtcgggtcatcttttcatgcttttttttgtcttggttgtgatgatgtggtctggttgggcggtcgttctagatcggagtagaattctgtttcaaactacctggtggatttattaattttggatctgtatgtgtgtgccatacatattcatagttacgaattgaagatgatggatggaaatatcgatctaggataggtatacatgttgatgcgggttttactgatgcatatacagagatgctttttgttcgcttggttgtgatgatgtggtgtggttgggcggtcgttcattcgttctagatcggagtagaatactgtttcaaactacctggtgtatttattaattttggaactgtatgtgtgtgtcatacatcttcatagttacgagtttaagatggatggaaatatcgatctaggataggtatacatgttgatgtgggttttactgatgcatatacatgatggcatatgcagcatctattcatatgctctaaccttgagtacctatctattataataaacaagtatgttttataattattttgatcttgatatacttggatgatggcatatgcagcagctatatgtggatttttttagccctgccttcatacgctatttatttgcttggtactgtttcttttgtcgatgctcaccctgttgtttggtgttacttctgcaggtcgactttaacttagcctaggatccatggcggccaatgcgggcggcggtggagcgggaggaggcagcggcagcggcagcgtggctgcgccggcggtgtgccgccccagcggctcgcggtggacgccgacgccggagcagatcaggatgctgaaggagctctactacggctgcggcatccggtcgcccagctcggagcagatccagcgcatcaccgccatgctgcggcagcacggcaagatcgagggcaagaacgtcttctactggttccagaaccacaaggcccgcgagcgccagaagcgccgcctcaccagcctcgacgtcaacgtgcccgccgccggcgcggccgacgccaccaccagccaactcggcgtcctctcgctgtcgtcgccgccgccttcaggcgcggcgcctccctcgcccaccctcggcttctacgccgccggcaatggcggcggatcggctgtgctgctggacacgagttccgactggggcagcagcggcgctgctatggccaccgagacatgcttcctgcaggactacatgggcgtgacggacacgggcagctcgtcgcagtggccacgcttctcgtcgtcggacacgataatggcggcggccgcggcgcgggcggcgacgacgcgggcgcccgagacgctccctctcttcccgacctgcggcgacgacggcggcagcggtagcagcagctacttgccgttctggggtgccgcgtccacaactgccggcgccacttcttccgttgcgatccaacagcaacaccagctgcaggagcagtacagcttttacagcaacagcaacagcacccagctggccggcaccggcaaccaagacgtatcggcaacagcagcagcagccgccgccctggagctgagcctcagctcatggtgctccccttaccctgctgcagggagtatgtgagagcaacgcgagctgccactgctcttcactgatgtctctggaatggaaggaggaggaagtgagaacagatcattcgacaaagcagcattagtccgttgatcggtggaagaccactcgtcagtgttgagttgaatgtttgatcaataaaatacggcaatgctgtaagggttgttttttatgccattgataatacactgtactgttcagttgttgaactctatttcttagccatgccaagtgcttttcttattttgaataacattacagcaaaaagttgaaagacaaaaaaaaaaacccccgaacagagtgctttgggtcccaagcttctttagactgtgttcggcgttccccctaaatttctccccctatatctcactcacttgtcacatcagcgttctctttccccctatatctccacgctctacagcagttccacctatatcaaacctctataccccaccacaacaatattatatactttcatcttcaactaactcatgtaccttccaatttttttctactaataattatttacgtgcacagaaacttagcaaggagagagagagcgggaatttaaatgctcggcgttaggcttttagtccgctaggtggctagaccgaggttaggacgctagttcactaggggcctagtggtgttttaagacgtcacggtcaccacgcgtggaccgaagcttgcatgcctgcagtgcagcgtgacccggtcgtgcccctctctagagataatgagcattgcatgtctaagttataaaaaattaccacatattttttttgtcacacttgtttgaagtgcagtttatctatctttatacatatatttaaactttactctacgaataatataatctatagtactacaataatatcagtgttttagagaatcatataaatgaacagttagacatggtctaaaggacaattgagtattttgacaacaggactctacagttttatctttttagtgtgcatgtgttctcctttttttttgcaaatagcttcacctatataatacttcatccattttattagtacatccatttagggtttagggttaatggtttttatagactaatttttttagtacatctattttattctattttagcctctaaattaagaaaactaaaactctattttagtttttttatttaataatttagatataaaatagaataaaataaagtgactaaaaattaaacaaataccctttaagaaattaaaaaaactaaggaaacatttttcttgtttcgagtagataatgccagcctgttaaacgccgtcgacgagtctaacggacaccaaccagcgaaccagcagcgtcgcgtcgggccaagcgaagcagacggcacggcatctctgtcgctgcctctggacccctctcgagagttccgctccaccgttggacttgctccgctgtcggcatccagaaattgcgtggcggagcggcagacgtgagccggcacggcaggcggcctcctcctcctctcacggcaccggcagctacgggggattcctttcccaccgctccttcgcacgtaagcgcttacgcaccgaacaacgtaagcgcttacgcaccgaacaacgtaagcgcttacgctttcccttcctcgcccgccgtaataaatagacaccccctccacaccctctttccccaacctcgtgttgttcggagcgcacacacacacaaccagatctcccccaaatccacccgtcggcacctccgcttcaaggtacgccgctcgtcctcccccccccccctctctaccttctctagatcggcgttccggtccatgcatggttagggcccggtagttctacttctgttcatgtttgtgttagatccgtgtttgtgttagatccgtgctgctagcgttcgtacacggatgcgacctgtacgtcagacacgttctgattgctaacttgccagtgtttctctttggggaatcctgggatggctctagccgttccgcagacgggatcgatttcatgattttttttgtttcgttgcatagggtttggtttgcccttttcctttatttcaatatatgccgtgcacttgtttgtcgggtcatcttttcatgcttttttttgtcttggttgtgatgatgtggtctggttgggcggtcgttctagatcggagtagaattctgtttcaaactacctggtggatttattaattttggatctgtatgtgtgtgccatacatattcatagttacgaattgaagatgatggatggaaatatcgatctaggataggtatacatgttgatgcgggttttactgatgcatatacagagatgctttttgttcgcttggttgtgatgatgtggtgtggttgggcggtcgttcattcgttctagatcggagtagaatactgtttcaaactacctggtgtatttattaattttggaactgtatgtgtgtgtcatacatcttcatagttacgagtttaagatggatggaaatatcgatctaggataggtatacatgttgatgtgggttttactgatgcatatacatgatggcatatgcagcatctattcatatgctctaaccttgagtacctatctattataataaacaagtatgttttataattattttgatcttgatatacttggatgatggcatatgcagcagctatatgtggatttttttagccctgccttcatacgctatttatttgcttggtactgtttcttttgtcgatgctcaccctgttgtttggtgttacttctgcaggtcgactttaacttagcctaggatccatggccactgtgaacaactggctcgctttctccctctccccgcaggagctgccgccctcccagacgacggactccacactcatctcggccgccaccgccgaccatgtctccggcgatgtctgcttcaacatcccccaagattggagcatgaggggatcagagctttcggcgctcgtcgcggagccgaagctggaggacttcctcggcggcatctccttctccgagcagcatcacaaggccaactgcaacatgatacccagcactagcagcacagtttgctacgcgagctcaggtgctagcaccggctaccatcaccagctgtaccaccagcccaccagctcagcgctccacttcgcggactccgtaatggtggcttcctcggccggtgtccacgacggcggtgccatgctcagcgcggccgccgctaacggtgtcgctggcgctgccagtgccaacggcggcggcatcgggctgtccatgattaagaactggctgcggagccaaccggcgcccatgcagccgagggtggcggcggctgagggcgcgcaggggctctctttgtccatgaacatggcggggacgacccaaggcgctgctggcatgccacttctcgctggagagcgcgcacgggcgcccgagagtgtatcgacgtcagcacagggtggagccgtcgtcgtcacggcgccgaaggaggatagcggtggcagcggtgttgccggcgctctagtagccgtgagcacggacacgggtggcagcggcggcgcgtcggctgacaacacggcaaggaagacggtggacacgttcgggcagcgcacgtcgatttaccgtggcgtgacaaggcatagatggactgggagatatgaggcacatctttgggataacagttgcagaagggaagggcaaactcgtaagggtcgtcaagtctatttaggtggctatgataaagaggagaaagctgctagggcttatgatcttgctgctctgaagtactggggtgccacaacaacaacaaattttccagtgagtaactacgaaaaggagctcgaggacatgaagcacatgacaaggcaggagtttgtagcgtctctgagaaggaagagcagtggtttctccagaggtgcatccatttacaggggagtgactaggcatcaccaacatggaagatggcaagcacggattggacgagttgcagggaacaaggatctttacttgggcaccttcagcacccaggaggaggcagcggaggcgtacgacatcgcggcgatcaagttccgcggcctcaacgccgtcaccaacttcgacatgagccgctacgacgtgaagagcatcctggacagcagcgccctccccatcggcagcgccgccaagcgcctcaaggaggccgaggccgcagcgtccgcgcagcaccaccacgccggcgtggtgagctacgacgtcggccgcatcgcctcgcagctcggcgacggcggagccctggcggcggcgtacggcgcgcactaccacggcgccgcctggccgaccatcgcgttccagccgggcgccgccagcacaggcctgtaccacccgtacgcgcagcagccaatgcgcggcggcgggtggtgcaagcaggagcaggaccacgcggtgatcgcggccgcgcacagcctgcaggacctccaccacctgaacctgggcgcggccggcgcgcacgactttttctcggcagggcagcaggccgccgccgctgcgatgcacggcctgggtagcatcgacagtgcgtcgctcgagcacagcaccggctccaactccgtcgtctacaacggcggggtcggcgacagcaacggcgccagcgccgtcggcggcagtggcggtggctacatgatgccgatgagcgctgccggagcaaccactacatcggcaatggtgagccacgagcaggtgcatgcacgggcctacgacgaagccaagcaggctgctcagatggggtacgagagctacctggtgaacgcggagaacaatggtggcggaaggatgtctgcatgggggactgtcgtgtctgcagccgcggcggcagcagcaagcagcaacgacaacatggccgccgacgtcgggcatggcggcgcgcagctcttcagtgtctggaacgacacttaagcgtacctagtggtacctgacatcttatagtctgcaacctctcgtgtctgaattcctatctttatcaagtgttattgcttccacgactataggacagctttcgtcgaaagcttttgctcatgtgatctcgaaggattcatctagtctgatttttcgtgacttgtatcggttttattggattcatccaacatatatcaataaaaaatgagttgtgtttcctttcttcctagttcagttaaaattatttccctcctgcgcttgtgctgtaattgtctgtgtacctgttgtttgtgactgtgttagttcccttggatatgatttcgtatttgatatgtacatggagatagcttagcttcattattggagtatgaagttagtatgacatagtcactctcctggaaaattgacactgcaaaccatatttttattctgaaccacaaatcctagtcagtccgctggcatatgccgtccgtttgctgaatccagaacgtgggtttggagatgtacggctgagatgcctctatgcgaaggggatttcgtggtgaaacgagatgggagtagagcaacgcccgtggaagatgcttcaaacttccacacttttgagcaacgatcggcagtagtaaggtagacgatttcaagatcaaagcatatgaagataaacaacatcaacaacaaaatttgttggggttctatagagagaaacagagctacatacatacactgttttgtatctaccatctgagatgatgaaaagatgaaaaactaaagaatgccccggcgccaacgccaggacacgccgcgcgcgcgtcacccgagccatctcttgacccagccggcgctgtatatttacacacgttgcagcatcgatcaccacctgttcgatcgcgtcgccgtcaccggcgcgccgcgacttattgaactagtctagggcgcggctaacaacctagcttagattgccttgtctaaacccttaggctaacgcgccactctagaaggccgatctcccgggataacttcgtatagcatacattatacgaagttatgaattccggaccgggttaccgaattcctgcccttaaggccaattgttcaagattcattcaacaattgaaacatctcccatgattaaatcagtataaggttgctatggtcttgcttgacaaagtttttttttgagggaatttcaactaaatttttgagtgaaactatcaaatactgattttaaaaaatttttataaaaggaagcgcagagataaaaggccatctatgctacaaaagtacccaaaaatgtaatcctaaagtatgaattgcattttttttttgtttggacgaaaggaaaggagtattaccacaagaatgatatcatcttcatatttagatcttttttgggtaaagcttgagattctctaaatatagagaaatcagaagaaaaaaaaaccgtgttttggtggttttgatttctagcctccacaataactttgacggcgtcgacaagtctaacggacaccaagcagcgaaccaccagcgccgagccaagcgaagcagacggccgagacgttgacaccttcggcgcggcatctctcgagagttccgctccggcgctccacctccaccgctggcggtttcttattccgttccgttccgcctcctgctctgctcctctccacaccacacggcacgaaaccgttacggcaccggcagcacccagcacgggagaggggattcctttcccaccgttccttccctttccgccccgccgctataaatagccagccccatccccagcttttttccccaatctcatctcctctctcctgttgttcggagcacacgcacaatccgatcgatccccaaatccccttcgtctctcctcgcgagcctcgtggatcccagcttcaaggtacggcgatcgatcatcccccctccttctctctaccttcttttctctagactacatcggatggcgatccatggttagggcctgctagtttcccttcctgttttgtcgatggctgcgaggcacaatagatctgatggcgttatgacggctaacttgtcatgttgttgcgatttatagtccctttaggagatcagtttaatttctcggatggttcgagatcggtggtccatggttagtaccctaagatccgcgctgttagggttcgtagatggaggcgacctgttctgattgttaacttgtcagtacctgggaaatcctgggatggttctagctcgtccgcagatgagatcgatttcatgatcctctgtatcttgtttcgttgcctaggttccgtctaatctatccgtggtatgatgtagatgttttgatcgtgctaactacgtcttgtaaagttaattgtcaggtcataatttttagcatgcctttttttttgtttggttttgtctaattgggctgtcgttctagatcagagtagaagactgttccaaactacctgctggatttattgaacttggatctgtatgtgtgtcacatatcttcataaattcatgattaagatggattgaaatatcttttatctttttggtatggatagttctatatgttggtgtggctttgttagatgtatacatgcttagatacatgaagcaacgtgctgctactgtttagtaattgctgttcatttgtctaataaacagataaggatatgtatttatgttgctgttggttttgctggtactttgttggatacaaatgcttcaatacagaaaacagcatgctgctacgatttaccatttatctaatcttatcatatgtctaatctaataaacaaacatgcttttaaattatcttcatatgcttggatgatggcatacacagcggctatgtgtggttttttaaatacccagcatcatgggcatgcatgacactgctttaatatgctttttatttgcttgagactgtttcttttgtttatactgaccctttagttcggtgactcttctgcaggtcgactttaacttagcctaggatccatggcccagtccaagcacggcctgaccaaggagatgaccatgaagtaccgcatggagggctgcgtggacggccacaagttcgtgatcaccggcgagggcatcggctaccccttcaagggcaagcaggccatcaacctgtgcgtggtggagggcggccccttgcccttcgccgaggacatcttgtccgccgccttcatgtacggcaaccgcgtgttcaccgagtacccccaggacatcgtcgactacttcaagaactcctgccccgccggctacacctgggaccgctccttcctgttcgaggacggcgccgtgtgcatctgcaacgccgacatcaccgtgagcgtggaggagaactgcatgtaccacgagtccaagttctacggcgtgaacttccccgccgacggccccgtgatgaagaagatgaccgacaactgggagccctcctgcgagaagatcatccccgtgcccaagcagggcatcttgaagggcgacgtgagcatgtacctgctgctgaaggacggtggccgcttgcgctgccagttcgacaccgtgtacaaggccaagtccgtgccccgcaagatgcccgactggcacttcatccagcacaagctgacccgcgaggaccgcagcgacgccaagaaccagaagtggcacctgaccgagcacgccatcgcctccggctccgccttgccctccggactcagatctcgatagggtaccaatggccagttaacagatccagctgctgctgttctagggttcacaagtctgcctatttgtcttccccaatggagctatggttgtctggtctggtccttggtcgtgtcccgtttcattgtgtactatttacctgtaatgtgtatccttaagtctggtttgatggtgtctgaaacgttttgctgtggtagagcagcatggaagaactataatgaataagtgatccctaatcattgtgtccaaattttgcttctgctatacccttttgtgctgtttcttatgttttgcttaaaaatttgatctgacaaacaaatttgtctaaattatgctcttgttctgactgtgtactgtacacatttgtattgctaccggtttggcacatagttttctctttgattgcagatcaaacccttctgattgcagattgcttggctatggctgatgtgctcactgttcttctttagcttgtatattgctgatggtggcttggctacggctgaaaaagttgctgctgcgccgacttggcaactgttgctccagtaatgctttgtcctctcttcctagccgccgacttggcacttggcagctgttgctcctgtaatgcgttgttatctcttatctcttgagatgtactatgattttgaggctgtttgacttgtgccagattgccagtgctgatgctatattatctcaggtttttatgctagtatatgttttactgtgtgctgcctgtgtcgagttacgtaatctattgaaccgctatgcgtgttgatgccctgttgttgcttgccagattgatgcccctgttgcttgcagcttgcaagctgtagtgaaatcctaaaattcgaaaccaaatctattctgaacttttgaagatctgtgatgtccggaagaaaagattcaaacagataaacgggactctccagaatctataaaataaatgatcgacaaacgctttgctttggtaggcttcctagttagttagcggaccgggatccgacggcgtcttcaccgccccgccgccgcccgagccggacttgtcgctgccgccgccgctgctcatcttgcgcgcttgtgtccctccctcagtccctgcgttcgcggatcgcgggcgggtgcgacccgtttggactccggccggtagccttcgtgccgacctcgctcggtccaccggtttgtcggggacccacatgtcagtgaaggtacgcgtccacgtccacagaccctactaccccagacgagtccaaatcgctgttccctcacactctcgtgtaccagcgcgcggcggaaagcacctttccaacaaccgccgacacgtcggtcccacgtcggcatgctccaccggtcagtgtttggcgtgtacggctcccggcgacgaacgagtgtggcctaagctttcctactcccatcccatctgagccacacatctctctcacgccacgcgcacaaaacagccaggctcccacgcgcatcaaccggctctccctttccgtgccactcgcccccaagccccaaaccctcgccgccgcctccgagacagccgccgccacctaggccatggccaccgccgccgccgcgtctaccgcgctcactggcgccactaccgctgcgcccaaggcgaggcgccgggcgcacctcctggccacccgccgcgccctcgccgcgcccatcaggtgctcagcggcgtcacccgccatgccgatggctcccccggccaccccgctccggccgtggggccccaccgagccccgcaagggtgctgacatcctcgtcgagtccctcgagcgctgcggcgtccgcgacgtcttcgcctaccccggcggcgcgtcgatggagatccaccaggcactcacccgctcccccgtcatcgccaaccacctcttccgccacgagcaaggggaggcctttgccgcctccggctacgcgcgctcctcgggccgcgtcggcgtctgcatcgccacctccggccccggcgccaccaacctagtctccgcgctcgccgacgcgctgctcgattccgtcccgatggtcgccatcacgggacaggtggcgcgacgcatgattggcaccgacgccttccaggagacgcccatcgtcgaggtcacgcgctccatcaccaagcacaactacctggtcctcgacgtcgacgacatcccccgcgtcgtgcaggaggctttcttcctcgcctcctctggtcgaccagggccggtgcttgtcgacatccccaaggacatccagcagcagatggcggtgcctgtctgggacaagcccatgagtctgcctgggtacattgcgcgccttcccaagccccctgcgactgagttgcttgagcaggtgctgcgtcttgttggtgaatcgcggcgccctgttctttatgtgggcggtggctgcgcagcatctggtgaggagttgcgacgctttgtggagctgactggaatcccggtcacaactactcttatgggcctcggcaacttccccagcgacgacccactgtctctgcgcatgctaggtatgcatgggacggtgtatgcaaattatgcagtggataaggccgatctgttgcttgcacttggtgtgcggtttgatgatcgcgtgacagggaagattgaggcttttgcaagcagggctaagattgtgcacgttgatattgatccggctgagattggcaagaacaagcagccacatgtgtccatctgtgcagatgttaagcttgctttgcagggcatgaatgctcttcttgaaggaagcacatcaaagaagagctttgactttggctcatggaacgatgagttggatcagcagaagagggaattcccccttgggtataaaacatctaatgaggagatccagccacaatatgctattcaggttcttgatgagctgacgaaaggcgaggccatcatcggcacaggtgttgggcagcaccagatgtgggcggcacagtactacacttacaagcggccaaggcagtggttgtcttcagctggtcttggggctatgggatttggtttgccggctgctgctggtgcttctgtggcaaacccaggtgtcactgttgttgacatcgatggagatggtagctttctcatgaacgttcaggagctagctatgatccgaattgagaacctcccagtgaaggtctttgtgctaaacaaccagcacctggggatggtggtgcagttggaggacaggttctataaggccaacagagcgcacacatacttgggaaacccagagaatgaaagtgagatatatccagatttcgtgacgatcgccaaagggttcaacattccagccgtccgtgtgacaaagaagaacgaagtccgcgcagcgataaagaagatgctcgagactccagggccgtacctcttggatataatcgtcccacaccaggagcatgtgttgcctatgatccctagtggtggggctttcaaggatatgatcctggatggtgatggcaggactgtgtactgacttcgaataggtacccggggatcctctagtgccgtgggtcgtttaagctgccgctgtacctgtgtcgtctggtgccttctggtgtacctgggaggttgtcgtctatcaagtatctgtggttggtgtcatgagtcagtgagtcccaatactgttcgtgtcctgtgtgcattatacccaaaactgttatgggcaaatcatgaataagcttgatgttcgaacttaaaagtctctgctcaatatggtattatggttgtttttgttcgtctcctaatatttgcctgggatcaaattttattggctggtgttcatttgacctccatgttcttgctaggctccattttttactctacagccataatatgtttgattgtttggtttgttctttgttgtacacctggttctgtcgagcttagttttcgacactggcttacagcttaacatgttgctattttattgggttctgattgctattttattgggttctgattgctagtttttgctgaatccaaaaaccatgttatttatttaagcgatccaggttattattatgatggtggctaagtttttttttttccaagggtaaattttctggattctccagtgtttctgtggccgaattcaatcactagagtcgacctgcaaagcttcggtccgggcctagaaggcccgcgccacttacgcttgattccgatgacttcgtaggttcctagctcaagccgctcgtgtccaagcgtcacttacgattagctaatgattacggcatctaggaccgactagttcttatgtgcttctagtctccaaatgtggttgatagttattttgctctaagatcaacagtaatgaagtataaatcatcgttgtggtgtgctactcggttaattgagcattaacacacacaaacatgacgaggatggtataatctccaaaaatgtgtactttgttaggtgggaccctatagccttgattaatgtgctatgttaggcatgcctggaaacgtgtgacgcatatgttttgtgaacctgttgatattatatgtgcttttatattaccatattttattaaaatactaatatttattactagtaagatataacattctatctagcttaaaaactaaccataaatattccataataactagatttaccaaactaatatactaaatatacataataaatacaaaattaacaagacaataatcaatatttatgagcttaatatatttagacattatggttggtcgacgataatcatgctaacttttcgtaattgcttgattgaaatatgcttagaataatgcctctttgttctacatggcaaatagggaccattatggtgtaacaccctgggaaccacaaacaccccgaaatgctactaaactacacaactaaccttcatatataaaatttcgacagcatctcctttgaaaatttgcatagacgtggaagcaacagagtataaacagatctgcgtttaaacgtgcaagcgctactagacaattcagtacattaaaaacgtccgcaatgtgttattaagttgtctaagcgtcaatttgtttacaccacaatatatcctgcca

(The sequence listing continues in the following parts.)

1. A method of producing a transgenic monocot plant that contains a heterologous polynucleotide comprising:
contacting a monocot leaf explant with a heterologous polynucleotide expression cassette and a morphogenic gene expression cassette, wherein the morphogenic gene expression cassette comprises a nucleotide sequence encoding a functional WUS/WOX polypeptide and a nucleotide sequence encoding a Babyboom (BBM) polypeptide or an Ovule Development Protein 2 (ODP2) polypeptide or a functional homolog of a WUS/WOX and a BBM or ODP2 polypeptide, wherein the combined expression of the nucleotide sequence encoding the functional WUS/WOX polypeptide and the nucleotide sequence encoding the Babyboom (BBM) polypeptide or the Ovule Development Protein 2 (ODP2) polypeptide or the functional homolog of a WUS/WOX and a BBM or ODP2 polypeptide is adequate in strength and duration such that the monocot leaf explant forms a regenerable plant structure containing the heterologous polynucleotide expression cassette within about eight weeks or less, or within about 6 weeks or less, or within about 4 weeks or less, or within about ten days to about fourteen days of the contacting; and
regenerating a transgenic monocot plant from the regenerable plant structure containing the heterologous polynucleotide expression cassette.

2. The method of claim 1, wherein the monocot leaf explant is a haploid monocot leaf explant.

3. The method of claim 1, wherein the heterologous polynucleotide expression cassette and the morphogenic gene expression cassette are introduced through a method of transformation by a Rhizobia bacterial species or particle bombardment.

4. The method of claim 1, wherein the heterologous polynucleotide expression cassette and the morphogenic gene expression cassette are introduced through a method of electroporation, PEG transfection, or RNP (ribonucleoprotein) delivery.

5. The method of claim 1, wherein the combined expression of the nucleotide sequence encoding the functional WUS/WOX polypeptide and the nucleotide sequence encoding the Babyboom (BBM) polypeptide or the Ovule Development Protein 2 (ODP2) polypeptide or the functional homolog of a WUS/WOX and a BBM or ODP2 polypeptide is greater than the expression of the morphogenic gene expression cassette comprising the nucleotide sequence encoding the functional WUS/WOX polypeptide operably linked to the Agrobacterium-NOS promoter having SEQ ID NO: 290 and the nucleotide sequence encoding the Babyboom (BBM) polypeptide or the Ovule Development Protein 2 (ODP2) polypeptide operably linked to the ubiquitin (UBI) promoter having SEQ ID NO: 339.

6. The method of claim 1, wherein the monocot leaf explant is derived from a seedling and not directly derived from an embryo or a seed or an unmodified embryonic tissue.

7. The method of claim 6, wherein the monocot leaf explant is derived from a seedling that is about 8-20 days old, about 12-18 days old, about 10-20 days old, about 14-16 days old, about 16-18 days old or about 14-18 days old.

8. The method of claim 1, wherein the nucleotide sequence encoding the functional WUS/WOX polypeptide is selected from WUS, WUS1, WUS2, WUS3, WOX2A, WOX4, WOX5A, and WOX9, and wherein the nucleotide sequence encoding the Babyboom (BBM) polypeptide is selected from BBM, BBM1, BBM2, BBM3, BMN2, and BMN3 or the Ovule Development Protein 2 (ODP2) polypeptide is ODP2.

9. The method of claim 1, wherein the heterologous polynucleotide expression cassette comprises a heterologous polynucleotide selected from the group consisting of:
a heterologous polynucleotide conferring a nutritional enhancement, a heterologous polynucleotide conferring a modified oil content, a heterologous polynucleotide conferring a modified protein content, a heterologous polynucleotide conferring a modified metabolite content, a heterologous polynucleotide conferring increased yield, a heterologous polynucleotide conferring abiotic stress tolerance, a heterologous polynucleotide conferring drought tolerance, a heterologous polynucleotide conferring cold tolerance, a heterologous polynucleotide conferring herbicide tolerance, a heterologous polynucleotide conferring pest resistance, a heterologous polynucleotide conferring pathogen resistance, a heterologous polynucleotide conferring insect resistance, a heterologous polynucleotide conferring nitrogen use efficiency (NUE), a heterologous polynucleotide conferring disease resistance, a heterologous polynucleotide conferring increased biomass, a heterologous polynucleotide conferring an ability to alter a metabolic pathway, and a combination of the foregoing.

10. The method of claim 1, wherein the leaf explant is selected from the group consisting of a leaf, a radical leaf, a cauline leaf, an alternate leaf, an opposite leaf, a decussate leaf, an opposite superposed leaf, a whorled leaf, a petiolate leaf, a sessile leaf, a subsessile leaf, a stipulate leaf, an exstipulate leaf, a simple leaf, a compound leaf, leaf primordia, a leaf sheath, a leaf base, a portion of a leaf immediately proximal to its attachment point to a petiole or stem, a bud, including but not limited to a lateral bud, and a combination of the foregoing.

11. The method of claim 1, wherein the monocot is selected from the group consisting of Panicum virgatum (switchgrass), Sorghum bicolor (sorghum, sudangrass), Miscanthus giganteus (miscanthus), Saccharum sp. (energy cane), Zea mays (corn), Triticum aestivum (wheat), Oryza sativa (rice), Pennisetum glaucum (pearl millet), Panicum spp., Sorghum spp., Miscanthus spp., Saccharum spp., and Erianthus spp.

12. The method of claim 1, wherein the monocot is selected from the Poaceae family.

13-17. (canceled)

18. The method of claim 1,
wherein the functional WUS/WOX polypeptide comprises an amino acid sequence selected from SEQ ID NO: 144, 146, 148, 150, 152, 154, 156, 158, 160, 162, 164, 166, 168, 170, 172, 174, 176, 178, 180, 182, 184, 186, 188, 190, 192, 194, 196, 198, 200, 202, 204, 206, 208, 210, or 212; or wherein the functional WUS/WOX polypeptide is encoded by a nucleotide sequence selected from SEQ ID NO: 143, 145, 147, 149, 151, 153, 155, 157, 159, 161, 163, 165, 167, 169, 171, 173, 175, 177, 179, 181, 183, 185, 187, 189, 191, 193, 195, 197, 199, 201, 203, 205, 207, 209, or 211, and
wherein the Babyboom (BBM) polypeptide or the Ovule Development Protein 2 (ODP2) polypeptide comprises an amino acid sequence selected from SEQ ID NO: 214, 216, 219, 221, 223, 225, 227, 229, or 231; or wherein the Babyboom (BBM) polypeptide or the Ovule Development Protein 2 (ODP2) polypeptide is encoded by a nucleotide sequence selected from SEQ ID NO: 213, 215, 217, 218, 220, 222, 224, 226, 228, 230, or 232.

19. The method of claim 1, wherein the morphogenic gene expression cassette further comprises a polynucleotide selected from a ZM-MIR-Corngrass1 nucleotide, a ZM-GRF5 nucleotide, a ZM-GRF4 nucleotide, a ZM-GIF1 nucleotide, a ZM-GRF4˜GIF1 nucleotide, a ZM-STEMIN1 nucleotide, a ZM-REV nucleotide, a ZM-ESR1 nucleotide, a ZM-LAS nucleotide, a ZM-CUC1 nucleotide, a ZM-CUC2 nucleotide, a ZM-CUC3 nucleotide, a ZM-RLD1 nucleotide, a ZM-KN1 nucleotide, a ZM-CYCD2 nucleotide, a ZM-GPCNAC-1 nucleotide, a ZM-MIR156B nucleotide, a ZM-LEC1 nucleotide, an AT-RKD4 nucleotide, an AT-LEC2 nucleotide, an AT-RAP2.6L nucleotide, a ZM-MIR-SPS1 nucleotide, a ZM-MIR-MAX1 nucleotide, or a ZM-MIR-MAX4 nucleotide.

20. The method of claim 1, wherein the morphogenic gene expression cassette further comprises a polynucleotide sequence encoding a site-specific recombinase selected from the group consisting of FLP, FLPe, KD, Cre, SSV1, lambda Int, phi C31 Int, HK022, R, B2, B3, Gin, Tn1721, CinH, ParA, Tn5053, Bxb1, TP907-1, or U153, wherein the site-specific recombinase is operably linked to a constitutive promoter, an inducible promoter, a tissue-specific promoter, or a developmentally regulated promoter.

21. The method of claim 20, further comprising excising the morphogenic gene expression cassette to provide the transgenic monocot plant that contains the heterologous polynucleotide.

22. The method of claim 1, further comprising breeding away from the morphogenic gene expression cassette.

23. The transgenic plant produced by the method of claim 21, wherein the plant comprises the heterologous polynucleotide.

24. A seed of the transgenic plant of claim 21, wherein the seed comprises the heterologous polynucleotide.

25. A regenerable plant structure derived from a transgenic monocot leaf explant, the monocot leaf explant comprising a heterologous polynucleotide expression cassette and a morphogenic gene expression cassette, wherein the morphogenic gene expression cassette comprises a nucleotide sequence encoding a functional WUS/WOX polypeptide and a nucleotide sequence encoding a Babyboom (BBM) polypeptide or an Ovule Development Protein 2 (ODP2) polypeptide or a functional homolog of a WUS/WOX and a BBM or ODP2 polypeptide, wherein the combined expression of the nucleotide sequence encoding the functional WUS/WOX polypeptide and the nucleotide sequence encoding the Babyboom (BBM) polypeptide or the Ovule Development Protein 2 (ODP2) polypeptide or the functional homolog of a WUS/WOX and a BBM or ODP2 polypeptide is adequate in strength and duration such that the monocot leaf explant forms a regenerable plant structure containing the heterologous polynucleotide expression cassette within about eight weeks or less, or within about 6 weeks or less, or within about 4 weeks or less, or within about ten days to about fourteen days of the monocot leaf explant receiving the heterologous polynucleotide expression cassette and the morphogenic gene expression cassette.

26. The regenerable plant structure of claim 25, wherein the monocot leaf explant is a haploid monocot leaf explant.

27. The regenerable plant structure of claim 25, wherein the nucleotide sequence encoding the functional WUS/WOX polypeptide is selected from WUS, WUS1, WUS2, WUS3, WOX2A, WOX4, WOX5A, and WOX9, and wherein the nucleotide sequence encoding the Babyboom (BBM) polypeptide is selected from BBM, BBM1, BBM2, BBM3, BMN2, and BMN3 or the Ovule Development Protein 2 (ODP2) polypeptide is ODP2.

28. The regenerable plant structure of claim 25, wherein the heterologous polynucleotide expression cassette and the morphogenic gene expression cassette are introduced through a method of transformation by a Rhizobia bacterial species or particle bombardment.

29. The regenerable plant structure of claim 25, wherein the heterologous polynucleotide expression cassette and the morphogenic gene expression cassette are introduced through a method of electroporation, PEG transfection, or RNP (ribonucleoprotein) delivery.

30-42. (canceled)

43. A fertile transgenic monocot plant produced from the regenerable plant structure of claim 25.

44. The fertile transgenic monocot plant of claim 43, wherein the monocot plant does not comprise the morphogenic gene expression cassette.

45. A plurality of monocot seeds produced from the transgenic monocot plant of claim 43.

46. A method of producing a transgenic monocot plant that contains a heterologous polynucleotide comprising:
contacting a monocot leaf explant with a heterologous polynucleotide expression cassette and a morphogenic gene expression cassette, wherein the morphogenic gene expression cassette comprises a nucleotide sequence encoding a functional WUS/WOX polypeptide and a nucleotide sequence encoding a Babyboom (BBM) polypeptide or an Ovule Development Protein 2 (ODP2) polypeptide or a functional homolog of a WUS/WOX and a BBM or ODP2 polypeptide, wherein the combined expression of the nucleotide sequence encoding the functional WUS/WOX polypeptide and the nucleotide sequence encoding the Babyboom (BBM) polypeptide or the Ovule Development Protein 2 (ODP2) polypeptide is greater than the combined expression of the morphogenic gene expression cassette comprising the nucleotide sequence encoding the functional WUS/WOX polypeptide operably linked to the Agrobacterium-NOS promoter having SEQ ID NO: 290 and the nucleotide sequence encoding the Babyboom (BBM) polypeptide or the Ovule Development Protein 2 (ODP2) polypeptide operably linked to the ubiquitin (UBI) promoter having SEQ ID NO: 339;
selecting a monocot leaf explant containing the heterologous polynucleotide expression cassette, wherein the monocot leaf explant forms a regenerable plant structure containing the heterologous polynucleotide expression cassette within about eight weeks or less, or within about 6 weeks or less, or within about 4 weeks or less, or within about ten days to about fourteen days of the contacting; and
regenerating a transgenic monocot plant from the regenerable plant structure containing the heterologous polynucleotide expression cassette.

47-111. (canceled)

112. A method of producing a genome-edited maize plant comprising:
contacting a maize leaf explant with a morphogenic gene expression cassette, wherein the morphogenic gene expression cassette comprises a nucleotide sequence encoding a functional WUS/WOX polypeptide and a nucleotide sequence encoding a Babyboom (BBM) polypeptide or an Ovule Development Protein 2 (ODP2) polypeptide or a functional homolog of a WUS/WOX and a BBM or ODP2 polypeptide, wherein the combined expression of the nucleotide sequence encoding the functional WUS/WOX polypeptide and the nucleotide sequence encoding the Babyboom (BBM) polypeptide or the Ovule Development Protein 2 (ODP2) polypeptide or the functional homolog of a WUS/WOX and a BBM or ODP2 polypeptide is greater than the expression of the morphogenic gene expression cassette comprising the nucleotide sequence encoding the functional WUS/WOX polypeptide operably linked to the Agrobacterium-NOS promoter having SEQ ID NO: 290 and the nucleotide sequence encoding the Babyboom (BBM) polypeptide or the Ovule Development Protein 2 (ODP2) polypeptide operably linked to the ubiquitin (UBI) promoter having SEQ ID NO: 339;
providing a polynucleotide encoding a site-specific polypeptide or a site-specific nuclease;
selecting a maize leaf explant containing a genome edit, wherein the maize leaf explant forms a regenerable plant structure containing the genome edit within about eight weeks or less, or within about 6 weeks or less, or within about 4 weeks or less, or within about ten days to about fourteen days of the contacting; and
regenerating a genome-edited plant from the regenerable plant structure containing the genome edit.

113-126. (canceled)
